United States Patent Application Publication US 2007/0161031 A1 - sequence listing, part 12

SEQ ID NO: 14368 - DNA, 2300 bp, Homo sapien
tattacactcaccatccgaggtttgcaggacttttgttttaatattgaatagatggaactgtttacttctgcatctttgcaggcatacaaaatgtgcctaccaggactctgctttatatctattgaaagcaagaagtaatacagtaaaactttgcctggctagaggctttggaagaatggagtattctgatttaacgctattgaagtgtgaaggtgaaaagaatgaaaaacttacatttcctgttgaatgcaacttgaaaatacagccagtgattccacttttcttctctagtaagtttggacattctgatctacttggtgttttattatagaactgctagtgtgcccgagacttacattgtgaagacactttttaaaaaacttgagaggtaagagggtgtaaatggtattgtgtgagatcaggctggatgagaactgacacttgtaaacatactttttaggctgaatctctgattgccgtttgttttcttatttaactcataaaaataaaacacattggatggagggtaggagcaggaaggagatttatgtcttttaattgcatgccattgtttcatatcaagacagaacatatggtatccctggctttggacctacagaaggaaacacatttttctgcctgctgtatgccagaggttcttgaacacctggagggatgactgcagcacagattgctgagccctactccagagtttctgattcaccatgtccagggtggggcctgagaatttgcacttataaaaggttctcaggttctgctgctgctgctagtccagagactacatttttgagaaccactcttgtctactaactgtaaattgtagaactctagaacaaagcttagtttggtgtaggaaaagaagctcacaggttatggagcaaatcatgaaagattcaacccttgatcccagcctagtgtggaattcaggtaacaatcaatacacagtgacataacacaattcttggttttcatgattgcaagtcatagccaagtatcaagtgagaaattcagtttcatttgcaaggcttagagaggccaggtgattctagaaaaataggccttgtatttgctttaaaccagtaaagagctttgagtgcttattaaatggaaagctttgtgtttttatttatttttgactattttattttatttttttgagatggagtctcagtctgtcacccaggctggagtgcagtggcgtgaccttggctcactgcaacttccgcctcccgggttcaagtgattctcctgcctcagcctccccagtagctgggattacgggtacccaccaccacacctggctagtttttgtatttcgagtagagacagggtttcaccatgttggccaggctggtcttgaactcctgacctaaggtgatccacccacctaggcctcccaaagtgctgggattacaggtgtgagccaccacacccggcccaaaagctttgtgtttttaaagatattagacatgtttcttgttttttaaaaaatcttaataatgtaggagaataagagaaatgttttttccaaagccgagaaatcattgtgattattttaccttattgggatgttggataatatagtccacttcattcattaatcatcaaacatgctatggattttccatttttataggatttgtgtcttaactggggtaatactggtaattcttatactccctctgaagatgaaaaatgtaggccaaaatcatagaccatgcatagaagctggataatgaagacagctctggaggaacatgtagacacacacacactgacacacatatatataaagtataaatacatatttttttaaagtttatttttaacattttaaagcaaaaaccagccctcccctctcccggagtaggcaggccccgcccctctccccaagtgggcagggacagcagtcgcatgggcagctttccttgtgatgtcacaggttcctctgggcacactgctgcctggccacgcctcctttccctttcatctttctcattgaccaatgggattggagcagtaaggccacacccctattctgcattctagtgtggccctggttacgcctcctctggctcagtcacacagcagccttgtaggtgactggaggtgttcgctgatgtggccccaaccctacctccctccccaccccatgatgttagaagaatctcgacagaataaattggcagcagccaagaaaaaggtaaaaagccaagaaaaaggtcatggccccccaacctagccagagatcccctctgatgacaagaccactcccaga

SEQ ID NO: 14369 - DNA, 2300 bp, Homo sapien
gacactattattgtcatccccacattttagatgaggaaatggaggcacagagagaccatgtaaccttgctaaggtggtagggccaggacttgaacccgtgttttctggttttagagcctgcacccttccccaccacaccatattgtgtagcatgatacttcatgtggttaaagtattttcttcacttgggagcattttgtgaataatctgaatcttagcataggcaatagccgggtagtgttgacagtgggccttgagcttactcaagctttaggtctgaccccgtgcagtcccagtggtggtagccatagggatgttgtatcagtccaccccagctccaagtgacccagcagagagagaaagggagggagggaggtaggaagagagagagagagagacagacagacagatagacagactgtttttttggagaaaaattacaggtacagaataagagtctctaatgcctggtagcccagatgattcttctagatcttatccaagaccatcagggcagttcctctgagtctgcaagaactttagcgtaacttggcttggagtgtcccctaataaagatacagttgagatcacaacacccacatcctttcaaatacctggaaagccttcccaagggtgggtacaaacaagcccaggctgagaagacggtggcagtttgaaatcagccatggaatatttgcaccaccgaaaatggcaaacactacagaacagacttctgttccctccccgacagagagccccttgtgtaacaacagcacaccactgccccatccctgagcagagcgctgtgtgttgcagcagagtgggggcaggtgtcttctcccttgggctacagaatacacatttttttcctcagcacatggatcattctcaaggacacaccatatcttaggtcacacgacacatcttaaaacattagagaaaaatgaaataatatcaaacatcttctctgatcacaatggaataaaactagaagttagtaacaagaaatgttggaaactatacaaactcatggagattaaataatatgctctgggtcagtgaagaaattaagaaggaaattggaacatttcttaaatgataatggaaacacaacatgccagaacctatgggatacgacaaaagcagtactaagagggaaatttacggctataaactcctactttttaaaagtagaaaagcatcaaataatcaacctaacaatgcatcttaaagaaatagaaaagcaagagcaaagcaaacccaaaattagtagaagaaaaataataaagatcagagcagaaataaatggaattgaaatgaagacaacaatcaaaagcatcaatgaaatgaaaagttgggttttggaagagagaaacaatgttgacaaacttttagccaaagtaagactaagacaaaaagaagacacaagtgaataaaatctaagatgaaaaaggaaaattacaactgataccacaaaaattcacaggctcactagtggctgttataagcaatgtatgcaaagaaataggaaaacctactaaaaatggatacatttctagacacatccagcctgccaagattgaaccgtgatgaaatccaaaacctgaacagaccaataagaaaccatgacatcaaagcggtaataaaaagtctccctgcgaagaaaagcctgggacctggtgcttcactgctgaattctaccaaacatttaaagaagaactcataccaaccttacccaaactattccaaaactagaggccttacccaactattccaaactcattctacaaggctagtattaccctgataccaaaaccaaagatacatccaaaacagagaactacaggccaatatcactgatgaatattgatgcaaaaatcctccacaaaatattagcagattgaattcatcaacacattaaagttggggtgcagtgtcccagcttcactcaacccttccccttttcctgtgtgtgtctactttggctgtgctcccaggtggcagcggtggcggcaatgttggtgtgtgggcctcccaggacaaggggaaagtgagtatgcccttcccacctcctgccaggtgtctgtagcatggcaccacctctggccatgtcttcaagtgagggacctggagatgttcttttccaatttctggattgggaaatggaggcaaattctgggtactagagtcagaactaagacgaggctgaatcgggagagtctggggtcctgagaggcagagacctgaaaccctctagattgtgtggggagctgggtgtgtgttctggccagttgtttctc

SEQ ID NO: 14370 - DNA, 2300 bp, Homo sapien
atgcagcggtgcaatctcggctcactgcagcctccacctcccgcgttcaagcgattctcatgcctcagcctcctgactggctgggattacaggcacccactaccacaccctgctaattttttttgttttttttcagtagagacaggttttgccatgttagccaggccaccgctctcgaactcctgacctcaggtgatctgcctgcctcggcctcccaaagtgctaggattacaggcatgagccaccgtgcccagcctttatttatttatttatttatttatttatttatttttattttattttatttttctgagatggtctccttctgttgctcaggatggatggagtacagtggtgccatcatggttcactgcagcctccacctcccaggctcaagagatcctctgacctcagcctcttaggtagctgggacaacacgtgtgcaccaggacaagcgggtaattttttgtagagactggggtctccctatgttgcacaagctggtctagaactcctgggctcaagcgatccaccggccttggcctaccaaagtgctatgattaaaggtcttaacattcttaaaaaatttttttgacatggtttaggatagtctagtaacttaacgtactgttgttttcaacaggctagtggttatgatttgtaaaagaactcttcagaaatgagctcaattttaccatgaattggggacactttacatttctattttatagtgcagtttaattgtcatgggctctgtcttttaaaaacctgaaagcctgcaacaataaaaccagctgcacctgttgcatgggataggcatggaattgaggagagagctcaaactacagtcagccctctgtatcctgaggttctggatccttggatttaaccaactgtgcatcgaaaatatttggaaaaagtaaaacaataaaaaaacacaggtcgggtgcagtggcgggcgcctgtagtcccagctactcgggaggctgaggcaggagaatggcgtgaacccgggtggcagagctggcagcgagtggagatcgcgccactgcactccagcctgggcaacagagcaagactccgtctcaaaaaaaaaaattaaaaaactttataacagctatttacaaagcatttacgttgtattaggtattatagtaatctagagatgatttaaagtatacggaaggatgtgcacaggttatttgcaaatactatgccatattatatcagggacttgagtatctgtgaattttggtatctctggggtcctggaaccaacatcctgaggttaccaaaggacgactgtattcaattttgtctctggttattagtctattctcaaatgtatttttcttgttgttttgtctttttgtttttgcctcttcaagtcaatgtcggaaacttagttgttctagactacccattagctcagagctaccagtaatcagactaccactgcaacctaagcaaccgatttttcttccccatcagactggcaaaaattaagataagcatctattgatgttgaagctgtagggagttttcctgagcaagtaattatgacagccctttttgctaggcacctagatgattcatcaaaatgaaataaaatacccatgcacttgaagaagttatctggtttatttccttacctgggtgctggttatgtgaggtgtacagttgatgaaaacttattaagctttataataggtacaattttctgtatgtgtagtagacgtcaatagtttttaaaatgtcttttgccacagcccgcagctgtgaataatgctattcgcttaacagtggaaaacgtgtcaatgacctgaaacaccctggctcccgggatcctacccccttaagttaaacaaatgaaataacttccactgtctttcctaatgtcttaattcggtcctcagttaaactggcggttggcgccagttttttccagggaaggattctgggagacggaggaggagacgccagcatttcgccccctgcacctccagcgggctgcggtccgctcccggcctcactcgagcaggccccgccctcccagaggcagttagtccaagtcacgtgatcgtcgactcagctgaccctgcgggaccggaaaaagaaattcccgggccctggcttcttggcgcgatggtgaggcactaggggcgaagcgaggcttgggctgctggagcgggaatgagggggcgccaagtggctccggaaactgggggaggttgtactggcctctccgcaaacacagtgtgtgcgggcgtgagggctgtgagtctggtagggaaaagtcc

SEQ ID NO: 14371 - DNA, 2300 bp, Homo sapien
ccgctcccggcctcactcgagcaggccccgccctcccagaggcagttagtccaagtcacgtgatcgtcgactcagctgaccctgcgggaccggaaaaagaaattcccgggccctggcttcttggcgcgatggtgaggcactaggggcgaagcgaggcttgggctgctggagcgggaatgagggggcgccaagtggctccggaaactgggggaggttgtactggcctctccgcaaacacagtgtgtgcgggcgtgagggctgtgagtctggtagggaaaagtccaccactctcccgctcccgagacgggggcgggggtacggggcgggtaagacagagcaggccggccggcttagagtcccggtgcttccctggcggaaggaagggcccctgcctcccggggcaggaactagggcttgtctggagctgggagtcctttcaggtcttccccatccccaagaggacctcccaaggatacccccttccccagccctgccgtggggcttgtacaagaaggtgcttagaatcaggctcactcttccacactgttaggaagcccctccgctctttccagagccagaaagtagtagttttggggttgagacttatccatccatccatccaatccatccatccgtacgttctaagcgcctggtctataccatgaagtgtgctaggcactgggaggacttgagctgccaagggaaggggaaatcggaggcttgaattggagtcatagctaaggctccaggggcagagacctaactgcgccttgtgtgtagtgctaagggggcttcctaaggatgccatcaaacttaaaggcggatggatggcaggagctggctggctgaagtacagtttgtgtaccaggggtagggaggcaagggtgggagacgtgtgtcttcagacagggaacagcatgtgcagagacttcaggttagagagagtatggctccccaggaatggatgcatttcccatagctgggagagtatcatctgcaggttagggaaagatgaggctggacaagtagagaacaaatcttcctggctcttggatcaccacaatcaagataatgaacgtatccactggcctccataatttccttgtgtgaggggctattttaagaagtataatcaagaaaggctgttctggctgggtgcggtggctcatgcctgtaatcctagcactttgggagagtgaagagggtggatcacctgaggtcaggagttcgagaccagcatggccatggcactccagcctgggcaacagagggagactctgtcttatttttttattttttaaaaaaagaagggctggtctgatgtgtcacttaaaggatagcaagccactggccaggcgccgtggctcacgcctgtaatcccagcactttgggaggctgagggggacggatcacttgaggtcaggagttcaagaccagcctggctaacatagtgaaactctgtctctactaaaaatacaaaattagccgagtgtggtggcacatgcctgtaatcccagctacttgggaggctgaggcaggagaatcacttgaacctgggaagcggaggttgcagtgagccgaggtcgcgccattgcactccagcctggggaacaagagtgaaactgtctcaaaaaaaaaaaaaaaaggatagcaagccacacagagagtgcagcaggcatggaggcgggagcaaggctggtgtgccccagcagcagcagggaagctggagtggctggagttgtgtgggtatggggaagaggggagagagttcactcgtctctgtgaggcccaggactttgttttatcccatgctgtacccccagcacttagagtgggagctagcacagagaaggtgcttaattgatgtttgctgagcagatgaatgcctggagtagacctcagagcagggtttggtggcagggtgggtcagggagagagtttactcaacagcctggtgataggggagaacaagaggccagagggtatccatctatgtcggggaccaggggtccctggtgggcagcagtgtgggagacacacggatcctggccacacctcaggcctccctccagcctgattacctgcctccctcccttgcagaggttccggttctgtggtgatctggactgtcccgactgggtcctggcagaaatcagcacgctggccaagatggttgagtgcacagggtctagtctgggtggaggaggggtgttgggggtggggattgtgggtgtagaggatggtgaggtttctctggggctagggcctcagtgctctcagcctgtgctaccatgctttgt

SEQ ID NO: 14372 - DNA, 2300 bp, Homo sapien
tattatatatcacattttaaaaaatccatgtatcggttggttgtttccacatcttgggaataatgcttcaatgtgtgttatctcttcattggggtggcagttacatgactatgtgtttgtcaaatattgcagtctgaaaggggtaaattttactatatgtaaattatacctttatttaaacaagagaacaacaaagaaattactccatagattatttggtgttcacaaggtatgaaccatatgttttctaatgcagaggtctggctgccacagcccctgtcttgatcagtttcagctcccaataaagtgggacaatgagatattgggtgcctcctgatatgatgcaattcaaagtacagagcagtggccaggcgtagtggcttatccctgtaatcccagcactttgggaggccgaggcaggcagatcacctgaggtcaggagtttgagaccagcctggccaacatggtgaaaccccgtctctactaaaaatacaaaaatcagctgggagtggtggcatatgcctgtagtctcagctactcaggaggctgaggcaagagaatcacttgaacctgggaggcagaggttgcagtgagccaagatcgtgccactgcactccagtctgggtgacagagcaagactccatctcaaataaaacaaaacaaaacaaaaaacaacgaagtacagagcagcacctaggaagtatccctgaatatttatataatcaagcctttagatctaattcccagcatgcaggatgaaccacagatagaggaccaatctctgtgacaatatcagtgacaccctgaggatacattcagacaaattgagaatgtgatgcagcatctatctcaaacaacaactggctgagactcttcagaaaggtatcatgaagataaaagaaggggatgaagtgggtgggagagggaaggtggtttcatctagatttaaaattattaaaaagatataatccagccaggcgcggtggctcacgcctgtaatcccaacactttgggaccccgaggtcgggggatggcttgagcccaggagtttgaggctggcccaggcaacatagtgagaccacatccttacaaaacatgaattagccaggcgtggtggtgtgtgcctgtagtcccagctacttgggaggctgaggctgaggatcacttgagcccgggaggtcggaggctgcaatgacccatgattgtagcctgggggacagagtgagaccctgtctatatgtgtatatatatatatatttgggacaattggggaaatctggatgtggactagctattagatgatattaagaagttactgttggctgggcatggtggctcacttctgtaatcccagcactttgggaggccgaggcgggcagattacttgaggtcaggagttcaagaccagcctggccaacaaggcgaaacctcatctctactaaaaatatgaaaattagccaggcatgtggcacacgcctgtaatcccagttactcgggaggctgaggcaggagaatcacttgaacccgggaagtggaggctgcagtgagccgagatttcaccaccgcactccagcctgggtgacacagtgagaccctgtctcaaaaaaagaagttactgttaactaatttctaataacttagatattattagatattgtcaactaatatcaagttgttaattctattcatttattatggcagaagtattttaaagtaaattagacaaatcatgacatttcatacccaatactttaacatgcatctctaaaaaccaatttcttacaaagccacataattttattacgcctaataaggagacgtagcagggtagtgtgaaggaggggaaatcgtggcgatgggttaggtatacacttagaatgaagtgcagactccacacggaggccctcccgaggcccaaccggacctgacctgggtttgcttctctgtcttcacctgccagcactaacccgcagctatactccagccacacaggacttctttgagttctttcagtgaccaatctctttctcgcctcagggcctttgtactggcggttccttccgccggacacgtcgggtttcctcgtttttgcggactggcgctttctgatttcagagactctccgcaacagaaccatctcaagtgggtctacctcctcgcctttttttgttgttgttgttgcttggctgcgcttctgacagggcaggccgtgatgatgtttgtttatgagttaggtctgactgttcgttggtgcttaagatccccaccgggtccctagggcctgtgcgtaccgcgcacct

SEQ ID NO: 14373 - DNA, 2300 bp, Homo sapien
ggcaagagaatcacttgaacctgggaggcagaggttgcagtgagccaagatcgtgccactgcactccagtctgggtgacagagcaagactccatctcaaataaaacaaaacaaaacaaaaaacaacgaagtacagagcagcacctaggaagtatccctgaatatttatataatcaagcctttagatctaattcccagcatgcaggatgaaccacagatagaggaccaatctctgtgacaatatcagtgacaccctgaggatacattcagacaaattgagaatgtgatgcagcatctatctcaaacaacaactggctgagactcttcagaaaggtatcatgaagataaaagaaggggatgaagtgggtgggagagggaaggtggtttcatctagatttaaaattattaaaaagatataatccagccaggcgcggtggctcacgcctgtaatcccaacactttgggaccccgaggtcgggggatggcttgagcccaggagtttgaggctggcccaggcaacatagtgagaccacatccttacaaaacatgaattagccaggcgtggtggtgtgtgcctgtagtcccagctacttgggaggctgaggctgaggatcacttgagcccgggaggtcggaggctgcaatgacccatgattgtagcctgggggacagagtgagaccctgtctatatgtgtatatatatatatatttgggacaattggggaaatctggatgtggactagctattagatgatattaagaagttactgttggctgggcatggtggctcacttctgtaatcccagcactttgggaggccgaggcgggcagattacttgaggtcaggagttcaagaccagcctggccaacaaggcgaaacctcatctctactaaaaatatgaaaattagccaggcatgtggcacacgcctgtaatcccagttactcgggaggctgaggcaggagaatcacttgaacccgggaagtggaggctgcagtgagccgagatttcaccaccgcactccagcctgggtgacacagtgagaccctgtctcaaaaaaagaagttactgttaactaatttctaataacttagatattattagatattgtcaactaatatcaagttgttaattctattcatttattatggcagaagtattttaaagtaaattagacaaatcatgacatttcatacccaatactttaacatgcatctctaaaaaccaatttcttacaaagccacataattttattacgcctaataaggagacgtagcagggtagtgtgaaggaggggaaatcgtggcgatgggttaggtatacacttagaatgaagtgcagactccacacggaggccctcccgaggcccaaccggacctgacctgggtttgcttctctgtcttcacctgccagcactaacccgcagctatactccagccacacaggacttctttgagttctttcagtgaccaatctctttctcgcctcagggcctttgtactggcggttccttccgccggacacgtcgggtttcctcgtttttgcggactggcgctttctgatttcagagactctccgcaacagaaccatctcaagtgggtctacctcctcgcctttttttgttgttgttgttgcttggctgcgcttctgacagggcaggccgtgatgatgtttgtttatgagttaggtctgactgttcgttggtgcttaagatccccaccgggtccctagggcctgtgcgtaccgcgcacctgtgcacgtcctgcgcgcagctgcaggcgactccgctctggctcgtcgctgctgtttcctgctgggggtgccgaccctgtcccacgctagctgggtgacttcccccaaccgcagagacagcggcgacccggggcctcagacctgcccccgcatctcgccggcgccaggcagtgggaagtcaggttcttccgccacctcccagccaggtaactgccccgaagcctgccccaaagcctggaaccccccaagctcggggaccccaccccgaagaatcgcgaccgcttccctgagggactacacctcccagcggctcccagcgcgctcccgggcaccgcccgttctggcgttaaccctttagtggctgcagtggcgacgagcggaacggagtgcgggttcccggggagggggcgtgcaggatcgggttgtggggggtgcgctgtagggctaaggagaagatgagctttggggggccctgaggaggaggggagtcaggattaaccgaggacagggtcgcagcgggggcatggggaggacgggcccgagagcgccgc

SEQ ID NO: 14374 - DNA, 2300 bp, Homo sapien
tttgagacagggtctcgctctgttgcctaggctagagtacagtggcgccatcacagctcattgcagccttaacctccagggctcaggtgattctctcacctcaacctcctgattaactggaaccacaggagtgcatcactaagcccctggctacttcttaaatttttggtagagatggggtcttccttgttgcccaggctggtctcctgggctgaagtgatcctcctgcttcagcttcccagaatgctgggattacaggtgtgagccaccacaccagcctcaagttactttagatcagtatttttcacctttcacaatgaatttatttttaattttgtttttattttttgagatggagtctcgctctgtggcccaggctggagtgcaatgctgcgatctcagctcactgcaacctccacctcccaggttccagagattctgctgcttcaggcctcccaagtagctgggattacaggcacccaccatcatgcctggctaattttgaatttttagtagagacagggtttcaccatgttggccaggctggtctcgacctcctgacctcaagtgatctgcccgcctcggcctcccaaagtgctgagattacaggcatgagccactgcacctggccgtcctttcacaatgaatttaaatcccttgatgttcccatttaacagataggaaaacgggggcagggagaagaggaactgtaactcccagtttccttccccttgcacccagaaacaggttctctgagcccctctccccatcccatggagggtggggatgggtcttacgcacccagaccgtgttcctccagggagaatgtgctacgaaacctagcggataaggcctttgaccggcccatctgcgaggccctcctggaccagaggttcttcaatggcattggcaactatctgcgggcagagatcctgtaccggtcagcaagcaggcatgggcatggggactgcggtgggccaggtgtgcccacattccccactgcctagcatggcttgccttgcccccactacaggctgaagatccccccctttgagaaggcccgctcggtcctggaggccctgcagcagcacaggccggtaagcccagagagggatggagcacacgtgctggcacactggtgtccacatgggccggcaaggagatgggtggggtcaggtgtccccagcttagctcaacaacaggggtggggaggggatgaactgcccaaagtctgaccaagctcagagagaaggtcagctgcctttacatggccctgctgacagacaggtcctgcccctgccccttcctcagagcccggagctgaccctgagccagaagataaggaccaagctgcagaatccagacctgctggagctatgtcactcagtgcccaaggaagtggtccagttgggtgaggccaaagatggcagcaacctctgcttcagcaaatgattgtgtaaccctggggcacttgtccctctctggacctgattcaccgatttggaagtttgtagccctagctgatactcaatggactaggcctcctcacttgtcaatagtgtttccaggctgggcgcagtggctcatgcctgtaatcccagcacttcgggaggccgagtggggtggctcacctgaggtcaggagttcgagaccatcctggccaacatggtgaaaccccatctctactaaaaatgcaaaaaattagccaggtgtggtggtgggcacctgtaatctcagctactcgggaggatgaggcaggaaaatcgcttaaacccaggaggtggaggttgcagttgagctgagatcgtgccattgcactccagcctgggcaacaagagcaaaactccatctcaaaaaaaaaaaaaacaaaaaaacagtgtttcctccaagctgcccatgagacaggcaggacaaggattcttttatatatttatacacacacacacacacacacacacacgcacgtttatatatatttttggtagagataggatcttgccatgttgcctggactagcctcaaactgggctcaagtgatcctcccacatctgcctctaagtagctaggactacaggctcacaccaccacaccgggctaattgttaaaaattttttttgtagagacagggtctccctatgttgcccaggctggtattgaactcctggcccctagggattctcccatctaagcttcccaaagtgtcgggattacaggtgtggccactgcacagggccaggacaaggattcttaatcccactccaggatgggaaacccatggccgagtgggaagaaaccagctg

SEQ ID NO: 14375 - DNA, 2300 bp, Homo sapien
tgtagtttgtatttctatatattttttcttattcacattggtgatggatgggggtgagcaacttaaataccaaaccagtgtttgaaaaaaaagtgtgcataaggcatgtggtataccttataaatggagttgggagggagagaatttgaaatgggatacctatttttttaattacataaatttaaactagcagacatttaaacatgaatgattaggatttttctatgtggttaacctggactttctgaacaaagaccaactgagcccctcccagtactctggtggatttttcttcagcaaccattacgcaagtcttagttgtaaccagcaatgttctgtgtgttttatgtttgctttttagttaaaaatcaccaccaccaccaaaaagaaaaacaaaattttttggctcctggattttcaaaacacatggtagacctctctgattttaggcttttattgtttaaagacagtgtctcgctttatgacccacactggagtgcagtgccacgatcatagctcactgcaggcttgacctcccaggctcaagcagtcctcccacctcggcctcctgagtagctgcatgccaccacgcccagctaattttttaactttttgtagagacagggtcttgctatgctgcccaggttggtctcaaactcctggcctcaagctgtcctcccacctcggcctcgcaaagtgctgagattacaggtgtgagccaccctggcctgattttaggctttttttgtactggggagaagagactgtgagccaaagtgtagggtgccaaaaagagctttgtgggatgagattttagggcaaagctggggcagtgtctgacttggcggtggtcatgtgtactgatttaggggaaagatcttgaggttttctcaaataattcacctatccccgtgttccctcaagaaaggtcatgttgacctggaaccataggggaaattggtggggtgtgatcagggtcagccccagctgttgctgcccctgcagtgttttgtccagagcacttgcctgcaggtcaggataggatttcaaggccagttcaggagaaagtcccaacccaccagtgcaaccaacaaaagagtaagttttacctacagcctgggttttcacaagtagcatttttattcctcctgctgtctgacatctgagctccaagctctaaacccaacctgtattatatgcagcagcaggttatctttgttttaaatcacatttgttattctgtacttagtcacctttccgtgtgatctgcatttgaaatgttgtaaacttggtcagtatttccattaaaatatcagggctaatcttgtgtatttttttttgttcctaatgattttatagacaaagactcttggcaaccccaggagaaaaaaaataaagctgtcagtggagtactagggatgagaatgaaactggaggtctgtttctggtattatggcttcccgggactctacagtcctgtatggtgaaatacatttttccattgggatcgtcaatgccatgactgttctgccacctcaaactccagagtttctggtgatgtgcaagagttagcaatatacattcagtaaagcgtgtaatcgagtaagtcgtagtaacttgggcgtaaagctctaccaccctgctcactaacaccctgatctccgtccggtatgaaaacacctattccgggtagtctggctccacgttaagcaaacaccactttccgtgttcaccgacagctagagccagaggtctcccggttgctgcttctgaggctgggtctgcagcagctgaggctcccgcctgtcttgccgaatggcctaagtctctgtcttgagactttcgagagttctaatcgtcaaatttcccattttattttgagattttccctgcggcccactatttcggacaacataggagagcctcaaaaacagtttctagcttccaactcggctcaaagttcagacagcagctgggcttccgagagccgccggtgttccaagaaaagctgcccgggactgggaggcgccctctggacgccggaacctttggtttcctgccgtggagcggaacggtagcgccaggggccttccggaaagaggagcgagagcccggcgatggcggctgcgccggccttgaagcactggcgcaccacgctggagcgggtggagaagttcgtgtcgccgctctactttaccgactgtaacctccgcggcaggtgtggcccctggtcccccgcagccggccgaccgcaaccgtgcgcctcaagctttccttccggggagaaacctaagctgcag

SEQ ID NO: 14376 - DNA, 2300 bp, Homo sapien
gcccggcatggtagcgtgcacctgtagtctcagctactcaggagaatgaggtagaaggattgcccccgtctctactaaaaatacaaaaaattagccgggcgtagtggtgggcgtctgtagtcccagctactctggaggctgagtcaggagaatggcgtgaacccgggaggcggagcttgcagtaagctgagatcgcgccactgcactccagcctgggagacagagcgagactccgtctcaaaaaaaaaaaaaaaggattgcttgagcctgggaggtcgaggctgcagtgaggcctgatcgcgtcactgcaccccagcctgggtgacagagcaagactctgtcccaaaaaaatgaaaataaaatgcagataaccaaaaaaagtcaccttagaattctttcctgaaattatcattgatgacatctctatgattctaaacttctctatgcttgagtatatattttgaaagagtttatactggacaaaatggtctttaacttttttttttttttttttaagacagggacacacactgttgcccaggctggagtgcagtggcgcaatcttggttcactgcaacctctgcctcctgagttcaagtgattctcacacgtcagccaccctagtagctgggattacagtcatgtaccactatgtccagctaatttttttttttttcccgagatggaggctcactcttgttgtccaggttgtccaggttgtccaggcttggagtgcagtggtgctatttcagctcactgcaacctccgcctcctgggttcaagcagttctcctgcctcggcctcctgagtagctgggattacagacacgtgccaccatggccagcttgtgtgggtgtgtgtgtttagtagagacagggtttcaccatgttggtcaggctggtcttgaactcctgagctcaggtgatctgccctccttggcctcccaaagtgctgggattacaggcatgagccactgcacccggtctaatttttgtatttttagtagagatgtggtttcaccatgttgggcaggcttgtctcaaactcctggcctcaagtgatctgcccgccttagcctcccaaagtgctgggattacaggtgtgagccactgcatctgaccggaaatggtctttaatgtatttttgctcaattaacaacacttctgggtctttattgtcttttttatggctatttgatattcactttttagagaattaatgcctgtattggtggacatttaggttgtttccaatttttcaccattataatggataattataaaagcaaatagttggaaacatcctagacgtccaacccactatggggactggttaatgacatcctgttatgaatactggagacagattttgcaattcttaaattataaattgtgaaaatgcagggtctgcccccaccccgaaatctattttggaaataactgtatttgtgtgtgtatatattatgttattgtcaggttgtaagctttactagcagagagcaatttttaaagctttaaaagaacactgagctagatctagcttctggctctgcatgtatattgattagtggtgtgccttgagaaaccagaactcttctgaatttcagttttgtctctgtgtaaaatgaagaaggttgaaataaaaaattctcaggtttccttccaggctctgaccttctccatgtgattctgatagttacctcctctattacgtcctagaagtgggattaccaatggacagagcattgacattttgtggttctggctacatgtgccatatttctttctgacaaaatatttgttttgtaaaacattcttactgacattgattattattttagcgaattctagaagtttgaaacatgaaatagtaccttttgctttaatatatttcattttacttgtagtaagtgtagacttttgcctttatcactggccacccaagatctagtatcttcctcatctcttcagttggagcaaagtttactaagtttattgcctctgcacctctcattccttgagaagatagattacagctacagagacggtcttttgtttacgcttaggtttcttatttgcagcttatgtttattcagagccaaggccaggtccagctgactattgagcttctggacacagaagaggagaattcggatgaccctgtggaagcagaggtatgagcaagtacatcacagaccccaggtgccaagcagagctggcgtgccttgagagtctgtccagtgaccctgtctgccaaaaggccaaggcacctcaggcctgtttaagggtcaggacctggat

SEQ ID NO: 14377 - DNA, 2300 bp, Homo sapien
ggggtgggagttccgtagctgtctctggatttgtagtgctgtcttttctgaagactcgaggaggggccagatatccaaaaagagagtatgggtggggaatcagtaatacagtctacttcaacaagaaagtataaagtagaggcggtggctcacgcctgtaatcccagcagtttgggaggccaaggcgggtggatcacttgagctcagaagtttgagatcagactgggcaacatggcaaaaccccgtctcttctgaaaatacaaaaaagttagctgggcgtggtggcacatgcctgtagacccagctacttaagaggctgaggtatgggagggttgcttgagcccaggaagttgaggctgcactgagccaagatcacgatgccactgcactccagcctgggcgacagagcgagactctgtctcaaaaagaaagtagaaagtggaagcatctgtatgtatgattgaagtcatgctttccatctgtttttttccaccttttcttttttctcctaaaacactgtatcttaatcttcctcatgatatcaggtactcataagcattattttaatggttgtatcagaatcctttatctggactcattgtgatttatttatccatctgtagttgctggagatactgccctttctgccacactcagtcaccgttctgacctttcactgtgtccagttatctactaatacacatactggtcatttaggacttaagaataaatagttatcatggttcctaacacttaaaaagaatgtgtcttcctaaaaatagaatggcttggtggttatgatcatcttaaagttttttaaacagacaaatcaatattgaaattaacgttttgctttcttcttgtatctatttttcacttctgtcattttgatgataaagtttcatttggaaggatttttatttcaaaatagaaatagcatgacatgagaatgggaactctgaaacgttcaactttctagtcattagtttcctaagattgtcacaaaagctactgatagtcaatcatgattggcctgtatggaaagtgagttaactttatgtacaacttaagccctatactttctatcagatacagaaaaataggtgatgtgtttggaaaagtattgggctaggagtcaggaaccttgacttttagtcccaaccctccttcttcagctgagcacccctgggcaataattcagcagctatttcttaaatacttaatgagtttcaggctttgtagttggcctgggaatatagacatagatactgcattcatgattctccaaggctcccttcctcaccccagctcacggtgagctttgcagtggtgcagtctcggctcactgcaacctccatctcccaggttcaagcgattctcctgccccagcctcccaagtagctgggattacaggctcctgccaccacgcccggctatttgtgtatttttagtagagatggggtttcgccatgttagccaggctggttttgaacacctgacctcaggtgattggcccacctcggcctcccaaagtgctgggattacaggcgtgagccacctttctgatgcattgtgtaaatttgtctcctaactggccccaactctctgtctagcttgccttcccagggcagttgtgaagatcaaatgagaaagaatatgtatgagagccaattgtaaatgattttaaaatgcaataaagatatgacctatagaaaattatttaaagatgcttagaattttaaatagtacgattatcctgagttctctatggttcttattttaaatagataggaaagttttaccatggaccactgatatggttgaaaatcctggcttgattattctccaagaaaatgatacagtggtttgtgtgattaattttctaaaattgccagcacccccccacccccccaaaaaaagaaaaacctttttggagttgaatgactacatcaaaggaacgttgactgtataatggagaaatgttttctgtgttcactaaaagcttgcctttgtttgcttccagctgcagcatatcgtgagtgatgagatctgtgtgcaggtgactgacctttacctggcagaaaataataatggggccaccggaggccagctgaacacacagaactcaaggagcctcctggagtcaacgtatcagcggaaagctgagcagctaatgtcagatgagaattgctttaaggtgagagttggtcaggtagtcgaagaccttgctggtgacaatgtcagttgttaggattctctgaaccagaagttaaagccggggtactttgacctgtgattct

SEQ ID NO: 14378 - DNA, 2300 bp, Homo sapien
tttgatttctggaaattacctttgttaaatgcaggtgagactctctaagacctgttgattcttgcttgatagctgtcatagccttttctattcctcattctaccattttaaatctaaactatacctttatacctaagctgtttgactagtttcctagtttactgtcctggtttcaacttatacctcctgcctccattttccacttctccgactacctgtttccttcaaacaataataccttgtatccatatagtcccatctctccttacttacagcttcaaaatttgtcattgaccaccaaactctttgtaatccttgcttattcagcatgcctaccaggactataaatagtactaggagctaggatcagagatgaataagcaataaatcctggtttccgtgggctcagttttaggagatggatagaaacataaatgcagtgcaattgggaattcctggagtggggtgatcctgaactttaaaaatagtaaaatgagctcttatgtgaacttaatcaggccgggcacagtggctcatgcctgtaatcccagcactttgggaggctgaggcgggcagatcacctgaggtcaggagttagagaccagcccagccaacatgacgaaaccccgtctttactaaaaatacaaaaattagccaggcgtggtggtgtgcacctgtagtcccagctactcggcagaatgaggtgggagaatggcttgaacctgggaggtggaggatgcagtgagctgagaacatgccactgcactccagtctgggtgacagagcaagattccgtctcaaaatcaataaaataaataaacttaatcctccatattttgctgatgttactttgtcaccctccatacccccaccccagaagtaaagtaaatcacagatctcatatcatatcctttatatagatactaatccagaattttgaaagatagtcccactgggcacagtggctcacgcctgtaatcccatcactttgggaggctgaggtggacagataacttgaggccagaagttcgaaaccagcctggccgacatggtgaaacctcatctctactaaaaatacaaaattagcctggcatggtggtgcacttcttaatcccagctactcaggaggctgaagcataagaatggcttgaacccgggagacggaggttacaatgagccaagattgctccactgcactccagcctgggtgacagagcaagaccctgccaaaaaaaagaaagaaagatggttccaattctgtcctactctccctgtaagtcatcagtgtgtagaaggtacctgtattttgacatcaaaccacgtctctgtcattacctatttgtttctggaagagggacaaaaattattgttatagtcaggtcctaagttttgttttgagacagagtctcactctgttgcccaggctggagtgcagtagtacgatctcggctcactgcaacctttgcctcacgggttcaagtgattctcttgccttagcatcccaagggctgggattacaggcacctaccaccatgttcagctaattttgttatttttagtagaggcggggtttcaccatattggccaggctgatctcaaactcctgacctcaagtgatcaccctcctcggcctaccaaagtgctgggattatagacgtgagccaccgctcccagtcccaggtcctaagtttttgattagaaaaatatagacactgtggttgataatgggatgtatggctgatgtggtcttgtagacatgttgtcgctgtagacatctcacagaatacttttgtgtctctgtcccatcagaggcaagagcaggctacggaggagaatgctggtgtacctgttggcccacacctctcacttgcgtatgaagacaaacaaatactggaagatgctgctgctctgattatccaccatgtgaagaggcagacaggcattcagaaggaggacaaatataagataaaacaaatcatgcatcattttattccagatttgctctttgcccaaagaggtgatctctcagatgtggaggaagaggaagaagaagagatggatgtagatgaagccacaggggcagttaagaagcacaatggtgttgggggcagtccccctaagtccaagttactgtttagtaacacagcagctcaaaaattaagaggaatggatgaagtatacaacctcttctatgtcaacaacaactggtatatttttatgcgactgcaccagattctctgcctgaggctgctacggatttgttcccaagccgaacggcaaattgaagaagaaaaccgaga

SEQ ID NO: 14379 - DNA, 2300 bp, Homo sapien
agtgacccacccgtcttggccttccaaagtgctgggattacaagtgtgagccactgcgcctgtcccaggagctttattttgaagtaattaggaagggaagagtggagtgaataaatgaggtggtagaaggccccataccacctatatcaggagagggactactgaaagtgggctcaatcctcagtgtgtttatatgtctggtttacattatcatttttaaaaagggaagtctggtttgtctaaagatgtaaaatgatacgtatcctatttagtgtatctgttacattaaattgactggctgtgcttacttgtgtggataggtatcttgctggtttttgtttgtttgtttgtttgttttggtactcttttagctctttgccagttttcccgcctcacacttggttcagcagtttctggtgtgtttttaattgagaaccacatgctgcctggccactggcaggtggttggccatctttgccccagcatttataaggagttgcacctatttgcagaaagctaaatcaagacagatgttaacttccatagggagtgttatcaagctaaagaaggcatttctttgttacttacgtttagtaaggttaactgatgagtttagcagagcttggcatttgtttttgacagagtgttcctatcctctctcagctggtatgcctccaaatgagaggcaacttcatttcccatttgtgactacaagggcaaacatgaaagaagtggggtgtgcatgtgtttaagatttggtgggatgagctagtttgaaggaatgtgcgttaccaatcaagataggttagtaatgcctcagtacagacaactcccacatctgagtgacttgtaaaaccaatgggtttaatttctaatcattctacatgtacattgatgtttagcaggggatttggcatatcagaattacttggggattcaggccaagggattgctgccattatgaatgttgctagtcactaggaggaaaagagagcttggaatgatctcacacctttaaatgctgcagcctagaagtaataaacattacttctactcatctcataacaactcattggtcaaaactagttacatggccctatccaatcataagggagccaggaagtttagtccattttttgttcataattggagagcaagaggggccagaaatattgaccaaatgactaccacattcccaaaacaagaaaacttagggaacacttctgcaaacagttggttgtagaccgttgagactgctcatttacttcattttctgtttctcatttagagaaccttattttaagctagggaaaaagtagactcaaaggttgccaggagtccaataagaatttaaatggttacccgcagctacaacagtgaactccttaagttatgatagtcactgctcttattattactggatgtggaacaaggctattgaatatttaagtatttgaatatatttaaatatttcaagttaaaccaaaaaactctcaagacaaagcggtcttttgggattgttttgattgttattgtttgttcataatggatcttagcaattcaggaaagttcagggaaacgtttcagtaaagtcatctcctgtttggttcctctggtctaaaatcagtagtcctaagcaaagcacacggtggtggtggcggcagcagcgacggtggtggtaataactaccatttatccaacttcatcctgtggttcttatgtgccaggtattgtgctaaatactttatgtggattgtatcatttaatccagacacagggttgtgagagtaataggtgctgttatccctattttgctgataaagaaacagtcttatgtagctagtagggcagaaccaggattcaaatccaaggagtttgactccctaccttattcttctaaacactactctattctattttgatttgggtcctgagcatacccttctttgtcttcctcttcagcttgatgtagttttagagaccaatctggcaacaatccgggttctggaagcaatacagaagaagctttcccgcttgtctgctgaagaacaagccaaatttcgcttggacaacacccttgggggcacatcagaagtcatccatagaaaagcactccagaggatatatgctgataaagcagctgacatcattgatggtctgagaaagaatccctccattgctgttccaattgtccttaaaaggtacatgagcaaatgtgcccttagtgctttagtgtacttcactaccggttcagtgtctcattaaataaggctctcattttcaacctggttgtcccatga

SEQ ID NO: 14380 - DNA, 2300 bp, Homo sapien
tgggtttgagatctgcctttcggggccggggccaagtactaaagttctaaccctgtcgcttggctatttccgtgccccttgacttccctgagcttaagctcgagaactctgcagacgctgcaagtgtctgttctttcctaggcatggcagcggctgtccttagttggctgtatctgagactctgacaacctagtgccctggcctggggcccttaggcgagatcttagcgcaggtggtaccctgtgttcacgggaagtcgtgggcggcctaatgctggcttgggttctgagtagttcttgataccatggtgggaatgccctgtggtactcagtctagtggtggaaggcggcgcaaagttaaaagtagccgtgggtcagttctgctggagtgccgcttcctcctaacctccgagcagtttggccctggggtcgcttcgttggtctgacttatttttagagctctgtcctggggcagggcttggctactggcgaggctgctcccacctgtcggctacccttggagttcacaattcgctgctgtggtttcgcggctcgaagccatcgctggagtcaggcccacctgctgccagagctcgttcctggccgtttccgctggattgcagagggaggacagtgttggacctaggcgtgggttccctgggcgtgtcccttggggtcttagctctctgggaggagggttctacttattcgggagagcggtaacaacgtaatcccgtcacctctcctggcgctgagagagcgccccccaaagtaagatcagcgtcaggcccacgccctatttggtgaataaataaaagcaaactaggaattgaaagcactttgtctcactgtgtgttcgaggcactgttacctacacagagagggcacaggaactgctattaacactcccggccaaggagaaggtgaacagccgttatcttatgtccccaactacggaaattttatccattctctgagtgtggcatgtccccaatgttaatttatgccgtggcctgttttggtgttttcctctcctttctcagttctgaggatgcctccagatccacccgggagatcgtgagtaccttgtgcctcacgctccgccttccggaggcttgccagggcggtggctgttagagcccgcctctcttttggttatctccgccctcttaggactgcatattcagctctagggagtttacttctccgcctaggtctccagaccttagttctgtactctacttggctgaaaggagttgccagctgctccggatatttgtgtttacaaggacgcagtgtgtagaatgtaaactgtaaagataactggacggaaggatgagttctcattctctcattttttttgtgagggagtcctccatggtgggctgcctttccttcaaatcctaggatgtggagtctccgctgatgagctccgctccccctcctatctcgggccctggaactccgagcttcagtctctagtgtaaacattccacaaaaggactgctaaggttcagcctcctcgcgcagggtggaattagctccttcctagacgggcgccctggccaatggagggtcctaccagcgccaagatatccaatccgactcttggggcggggcctggcccggcagtgcggtaggcggagcctgtttcacttacagacattttaccccacatcggttacttaccttactggggcggtgggagagccaggggtagccttccaatgcgatgaccagcggaggcgggagccaacttgttaggcctgtggctgagacgctgcagggcgggttatgtggtgtcctccaatgagacaggaagagcttccctgcttcctccaatagtgttggggctcgggggtgggcttcagcagtccgtctccaataggcggggttgagttagggaagctccccgccaataggggcgtggagaaggagagcggctccccctcccctaccagtcgagggggaaggggcgggaaaatcataagacaggcctcggtggttggctgagtctttgacgggcgggtattgcgtcctgtattggaacgaagctgagtcttccctctgcggggcggggtcgggggagtgggcgggatttcccgggtaacagagaagcggccgcggcggtagaggcggcggagacggtttctccatcttcccccctccccttcccccctcggagtttccctccctccctccctccctccttcccagtctgggcaccggagcctgtgaccgcttcgttagtggagaggtagctggcagtccgcttcggcgggcctgtgccccgcgccgttc

SEQ ID NO: 14381 - DNA, 2300 bp, Homo sapien
ggctcagagggaggaagagacttgcctaagactataacaccagttgctgaccatgctaagtgcagaactcagattacctaactagtagcctcaagctctatcaactcttcacacagcaggccacaggctacttctttccctctactacccacactgaatcactcacctactccccttgagtctttctcaaatacaggctctccttcaatattcttctcaccggctgggcgcggtggctcacgcctataatctcagcactttgggaggcagaggcgggtggatcacaaggtcaggagttggagaccaacctggccaacatagtgaaaccccatctgtactaaaaatacaaaaattagccgggtgtggtggcacacgcctgtagcctgtagtcccagctactcgggaggctgaggcgggagaatcgcttgaacctgggaggcggaggttgcagtcagccgagaccatgctattgcactccagcctgggtgagagagtgagactttgtctcaaaaaaaaataaaattcttttcacccactgtcactgttctggtcaatcctcctttcgtgtctcctgaattattgggaaagacttcccaataatttcctaactggcagcaggccctcattctgcccattggatgccaaggtccttcacattctgcacaccccaccttatccacattaacttcctttcctcaatgcctcaacaaacaggtttttttgtttgtttcacattgtgtgctctggctctaggctcagctctctggaatacagacatgtggggtggcttctgtcccctagaaactccttttggttagaagttatgataaataaagcaaatgaggcaaggaaggatctgagtcaaagctttgacttgagggctgctgaaggtggggaaagctttcggattgggtggctttgatagagaaaagaagccttctctttccccagctattccttccacaagaggcacttctgcagtctccaaacgcagtattacaacagcctctgggcctccccttgctgcctataggcacttctctctcagtgcatcgtcagaacccatctttctgccagggtgccaaacatcttacactatagttctgggtctgtgggccttgtgaccgtgctgcctgcacattctgctgcgcacgtccaagaattttactcaactaaaagtcttaaactgtttgttccatctccccacccctccttttttattactacagccacatatgaaggtccttttttgcattcacccctttgtgtcctttgatgaaaatgacctgcccctccaatttgctggatgaaatctttaagacccaacttgaatgccacctccttcatgaaacctttcccaattctccttcagcgaaaaggaatctctcttctctgagctcctatttacatacacattcctattttcatacacattcctgccttgccttagttccttacgtagaatctcctcggctgaatctggagcccttggaggggtagagtaagcatgtcatccagtctgtaattgcacccagcagcaggtacgtatgaatgtctgcctcacccacagtaggtgctcaggcaagtgcctgttgcccgcggacgcagggcttcctgtttgcatcactcatttttagtcgcctaacagagcggaccgaacacggttaggtcacacagccacaggagtctgcccactccagccagtgactagggtgctcctacccttctctcctacctagttccaaatgggttgtgtgtgtgaaggaagttggggccgggtagctccgctggctcgtcctccgcgtccacccagcggatctccgagtcccaggcggcctccccccagtccgaggacctcaagaaactcgagtcggcggcgagggagctatatgggcctctaccacggatgcgtctcccactcgcgtttagtttaattaattaatttatattttttggaaggagggggcgttcaatgaaggggaagaggcggggcgaagggcggaggcgggcccagggtgactgacgtgagcgccggggagccaatagcccgtggggggcgttcccccccattcaggactcctcgcctggctcggaaggtatgttaaacagctgcttttaatttggtccccccaatctcaggcgtttggggggctagtccgccggccgctcggtctggccggcccgacgtggtgtgggccctgcgggccctgggaccgagctgaggggaggctcggagttccgcggccgaggtaggcgagggacaggccaggaaggagagctcttggcgccgcccgctcgcc

SEQ ID NO: 14382 - DNA, 2300 bp, Homo sapien
tacacattcaaagagcttattacagtataaaattattgaggtctgatcagctgccaacctcatcttctgtcacaggggaaggtttaggagttcctgggattttttgggaatgtggagtgctgaggactcttgatttatccctagcacataaggatgagtgggctgggagcaggcagggacaggttgggtgggtaggggacaaacagtgattgcaggggaccacctcactcagccagggggtgaagctttttattgacacagaacccacccagtttgagggtctagcaggctagcaggcaggaagagatgggcatctcggtagacagggccaagctgcataaaggaaccatccagcaaaagaaaaagggccccagctcatcctcccagggaggtattttcttagtggttttttctttctcatacctgggctccccctccttccttctaagattcgtaccgattgcatttggctctggctgctcagtgagttcatctctaccctccgcctcccatccctgggatagtgaaagcaaagagagagtatggaatcacagtggaggtctgttccccaaattggccaagtaaatgtagaaaaatcatcggataagggaaatccatgctgagctaacccagtgtcaccacaaactaatacattcttggctccaacaggtggcaactggaaggagataagtcattacttaaggaaggggccctgtggcaggaacatggaggagatgtgtgtgtgtcctcttccaccactctgtagcctgacaagaggagacatgatcaccaacccaagctagtccaggataaatagtagggtccaagaagcaaggagtcctgaactgcaacacggagccccaggaacttctggaaaggagtatcgtgtgtatatgtatttatagaatacgatcatattatcacatacaatatatattatatacacacgtacatatggacccatacacataagtgcacacacacacacacacagaatgacagaaaggactggaatacacgccctacttataaacgtgcttggcactcaggacgatctctagaatatgtaacttggtcaagctctctggggagaaaggcaaatgctcatcaaacctccccataaaatcctaggaaagggaaggagtgggagacaggagacctcagaaaaagaatggcgggagaaaggaggagggaggttccttccccacttacctcggggaccctagcaaaaatcaatagccacaatttggttttaataaggcacagtttgatagcagatgctaggaattaagaacacattgctactggccctttctagtggcaatttcaccacatttatctagccaaagggaaaggctgccttgcgtgcacacgtgtgctgggagacacaagaaagaagttgatccatggcttcagcgtaactgatggcaacctataggctcagcggtgtccagggtagtttaaggaaggctggccaacaggtaggaggttcgtaggagagttactgactctccacggccagcaggttttggccagaggataccatgccctccttctctgcgaactccaggatggccttgtagcaaaaatagtactgctcaggggtctggatgctgaaggccctctgggtcctcatgcgtgacaccgtctggaacacattaagggtgccaagctcctccagctgtgccaggcagatgtccagtgagcagaaggtacctgaagaaggaaggaagtgatcacatctggtttacctctcttctcttcctccctctaccaaataacccaggcagaactgaatgaatgacttcacaggcaaagtgcctcatggcagaaggccaggtggccttaggcctgaaaggactcaagaaggaggtcacagggagtgttggaggccagagaaatgagaaggcctcttatttctcaggacatacacttggggtaacaggaagtggaaatgggaaggtgacacaggggaacttcctgcttcaatcccagacagacagactgacagcactcccacacctaatttccagagtccacaagtttttcagaggcctaacaaaaacctattctcaactttctcccaaagggacctttgaaatagaaaggccaacatttcctaccatgtacatgcccttaaggcaaaagctgctaactggctccagaatggagaacacagcacagggtggggagtccctccagggagggctggatgggaaggaagcagcagcccagctgagctctctgggatacctgcagtgacagttctaacaggtgacagagtcagcgttatgatgggg

SEQ ID NO: 14383 - DNA, 2300 bp, Homo sapien
caatagtgatgttatccccaggagcagtttggggaggtttagactcttggagcccatggctgcatgacccctaaattgtaatttctaatcttgtagcttaatctgttagtcctgcaaaggcagactggaccccagggaagaagggggtcttttcgggaaagggctattatcaattttgtttcagagtcaaaccatgaactgaattccttcccaaagttagttcggcctatgcccaggaatgaacaaggacagcttaagggttagaaacaagatagagtcagttaggtctgatttctttcactgtcataaaatcatcagttataattttgcaaaggcagtttaccaggagtttgagaccagcctgggcaacatagtaagacccctatctctaccaaaaaaaaaaaaaaaaaaattagccaggtgcagtggtgtgcacctgtagtcccacctactcaggaggctgaggcgggaggattgcttgagcccaggactttgaagctgcagtgagctgtgatcacgccactgcactccagcctgggcaacaaagtgagaccctgtgttaaaacaacaacaacaacaacaacaactttgggaggccgaggtgggcggatcacgaggtcaggagattgagaccatcctggctaacatggtgaaagcccgtctctactaaaaatacaaaaaaataaaaaaaataaaaataaaaattagccgggcgcggtggcgggtgcctgtagtcccagctacttgggagcctgaggcaggagaatggcgtgaacctgggagggggagcttgcagtgagccgagatcgcgccactgcactccagcctgggtgacagagtgagactccgtctcaaaaaaagaaaaacaaaaaagccaggcgcgcggtggctcacgcctgcctgtaatcccagcactttggaagaccgaggcgggcggatcacaaggtcaggagttcgagaccagcctgaccaacatggtgaaaccccgtctctactaaaaatacaaaaattagccgggcgtggtggctcgcacctgtaatcccagctacccaggaggctgaggcaggagaatcgcttgaccccgggaggtggaggttgcagtgagccgagatcgcgccactgcactccagcctgggcgacacagagactccgtctcaaaaaaaaaaataaaaaaaaaatcataggagcatcacaactcacagcaccttcctgttgtctgaaggcccctcctttgggtccctcaggactggctccagggcttcagccttggaactagttgtggactttgggtccctttggaatatttatctttggcttggaataatgcaacaacgtaccagacccagccttgccttctctatgccccattcctccccaaatgactccaagactgtacccctaatcctgaaccctttgctgcacttgccctagtgaaaatcaaaggtctgcaaaggccgcgtcattcctgaatgatgttcggagtctgatgtcgtttctatgggggattaaaattagcgacactggagatgaattacagggtgcagccagtaaggagggagagagagggaggcaggtgcgattccttccacctaagcatcctggcctggcaggcaacctttccagggtctttcaggctgcaagcgacaaatagttgaggattgtgggtttctcacgcgtaggtggcagcggcaagttaaccccaggagaggtgccagtcagcagataatttgcaaacgaacgtattctcctcctcctccgaggatctgagcctcacgaaatactcttttcttcctttttctccctcccgcagtcgagttgccttccgtccagctagggtcccctccccgcccgggtcccctccccctcccggtcccctcccccgcccgggctcctctctgtctccccctcccggactgcgtcctcgctccgccgggccctcctcgccgccagcttgtgaatgagacgctcagtttctcaatggagccgcggggggctcgggcggccgcggggcggccgcagcgttggccgtgagtcaggaggggggcgcgtttccctcgctccctctccactccctccctttcgctgcggccgcccgcgaggagcctggctgaggcagccgcgcaggtcgcagggccagcgtccgcgaggacggcccggctgggcggccccgagctctgtggcgctgtggaggagcgggagcgcggccgaggaagcggggcgccgagggggtcggcggccttcgggaaatttccgccgacccttcgctcccggctctaaaagttcctgatttcctatttcct

SEQ ID NO: 14384 - DNA, 2300 bp, Homo sapien
taatttttttgtatttttttttttttttttagtagagacggggtttcactgtgttagccaggatggtctcgatctcctaacctcaggtgatctgcccgcttcaacctcccaaagtgctgggattacaggcgtgagccaccgcgccaggcccaggacatcagtttcaaaggttgtgtggttcttggcagagcgggagcccacaccaagatagtgcatgataggcctaataaaggtgctttggatttggtcattactttggtgatgaactgaaaacataatgactttttaaaaatttttatcggccgggcgcggtggctcacgcctgtaatcccagcactttgggaggccgaggcgggcggatcacgaggtcaggagatcgagaccatcccggctaaaacggtgaaaccccgtctctactgaaaatacaaaaaattagccgggcgtagtggcgggcgcctgtagtcccagctacttgggaggctgaggcaggagaatggcgtgaacccgggaggcggagcttgcagtgagccgagatcccgccactgcactccagcctgggcgacagagcgagactccgtctcaaaaaaaaaaaaaaaaaaaattttatcatgaaagctttcaaacttacacaaaagtacagaaaagtagagacaatagcatacataccattatggatgatttgaataacataccatatggatcccaagcactcatcatgaggcctcagtcactcaggaatggcaacccttggttgcattgcaaagatattaaggcacacctcaagccgggtgcagtggctcatgcttgtaattccagcactttgggaggctgaggcaggcagatcacttcaggtcaggagtttcagaccagccacgccaacataatgaaacctcttctctactaaaaatacaaaaattagccgagcatggtggtgcatgtctataatcccagctactcaggaggctgaggcaggagagttacttgaacccaggaggtggaggctgcagtgagccgagatcacaccactgtagtccagcctgggagacaaagtgagaccctgtctcaaaaaaaaaaaaaaggccgggcgtggtggctcacacctgtaatcccagcactttgggaggccaaggtgggcagatcaggaggtcgggagatcgagaccatcctggctaacacggtgaaaccccgtctctactaaaaaatacaaaaacaaaattagccgggcgtggtggcgggcgcctgtaatcccagctacgcgggaggctgaggcaggagaatcacttgaacctgggaggcggaggttgtggtgagccaagatcgtgccattgtgctccagcctgggcaacaagagtgaaactctgtctcaaaaaaaaaaaagtttcttttatgtttaaaggttacagaggttcagttattcaagataaaaggagttctggagagttctgcacagcagtgttgaacatacttaactttacagaactgtacacctacaaatggttaagatgatgaatttcatgatatgtgtatttagccacaatttttttttctttttacagacaaggtcttgctatattgcccaggctggcttcgaactcctgggctcaagcatacctcctgcctcagcctccagagtagctgggactaaaggcaagcacaactgcacctggcaaaccacgatttttaagttccttttaaattaaacaaaatctaatgtttcaaatcaagaaaaatatctgacttcacttgtgcaatggaaagtaactcactggccaagtagaggcctatggagttgtatttttcactgtagaggctctggaatgaacctgttgattttgatgctcagagcactggacctggcctgggatggaggttaagcactggaggtgccctctggtttacactagaaccaaagggctgggccagcccagcagtgcaagtcagatttctcccaaatgttcctgttttcttataatctaaggctcacaggcgcttgaatgaagtgtgaattcacctttctccccactcccattctttagggtccacctaaagtgggaagtctgttttcaaaatgacatctactccatgcctgtcttgtttccctaatgtactttatggaagttcttcacactactggagcattgacgttacttgttaagcagccttccacatcctagctcttttccaagtgagtcccacataagtagccctgaaaccttctttctgcccacccaaaaacaaaacacaactagaatatgaggaagtaacaatcagattttttaaaaaataaattataatttaaa

SEQ ID NO: 14385 - DNA, 2300 bp, Homo sapien
gtttttgtttgttttgagacagagtctccaggctgagtgcagtggcaggatcacagctcactgcagccatgacttcctgggctcaagtgatcctcccacctcagccttccaagtagttgggatcatgactcataccactacacctagctaattttttttttgtggagatgggtttttgtcatgttgcccaggctggtctcaaactcatgggctacttccaccttggcctctcaaagtggtgggattacaggcatgagccacagtgcctgacctggttttgttttgttttttcagtgatatgggaagttattcagctaggtgtgagtgaggaactagaacatttctcctggacctccaggcatgaatttgggaacttctttctcagtctcagtctattttcctaaaatgtttaaggtctttattcttttctatgcagcccgaccattagatgtgacctccgtggttgtaagggatggttgtttggacacaaaatacctaatatcctgggtgtcaaaattccctagtgaagtcaggccctggacttctcttttttgtcagtctcataaatcaggcagacatgagcttttatttgtggatgcaccaaataaataccctagtggacagctttgctcagcctggccactgaaagagccacctaaataaaatctcaggtccaggccgggtgcggtggctcacgcctttaatcccagcactttgggaggccgaggcgggcagatcatgaggtcaggagatcgagaccatcctggctaacacagtgaaaccccgtctctactaaaaatacaaaaaaattagccgggcatggtggcaggcgcctgtagtcccagctactcagtaggctgaggcaggagaatggcgtgaacccgggaggcggagcttgcagtgagcggagattgcgccactgcactccagagcctgggcgacagagcgagactccatctcaaaaaaataaaaaaaaatctcacgtccagaaaaattggccttccagggccccagaaccctttttaccagtctagtaatagcctttcatcagcctaatttcctattctttttagtctgaatgtatggtgtaatgtgcataaaatacacaagtccaaattttagcattccgtggacgcaaaatgtgccaaaggtggatactttgcttctgtcatacatcggtagtcaacttccctatacatcaaactttcagcaaattcaaacattttccttgaaagctgtgttactttggccaaattacttaacctctctgagcttcagtgtgtctacttcctcatgtcatgattaagagttaatatctactggcttaaaaaagaaaaaaaaggaaaaaaattaaatgagatgatgggtgtgaagcagggattggctgaatgtaagcattcaataaatattcagttttaaaattgtaatctcagccttcccgccctgcagaggctacaccctggcaggacttaatctcctaaatctctgccgcttaccctagtcttttgcaccaatttaatcattccttcacgcagggtctactgagcgccatcccttgtgctggactctggctacttaaataggaatcaagccaggtccctaccattgctcagcccgcagccgagtgggaaagaagctcgcaaaagcagcaaacaggcagtaatcgaggtatgtatctgcttttgttaagggcaagtgggggagcgaaggtctgtgtctgaaacttgggtgtgaggggttagttggagtaatccaggcaattggcactgcccgtttaagagcacgggcccaagaggggaaggggactccaggtgaagccctaaggcccgggaagatctgcgggaggcggcagggcccagggcgttgaatgcccggccacaagatcagcctcctcccattggcgaaaggagccccgaagagcttgtgttcaggagggaggcctcggcctggtcaagtcatctagcaggaagagtcccggacagtgcaaagcaaatgcaagaagaccccctccctagccgatgggaaatgccccagccgttgaaggcggaaataacggcctgtaggcaacggaactcccagcgttcgcaaaggagggaggagccggaaactcagggcgcgaggcctgtgggcccagcggtgaggcagcagctgggggcggggggagggcggacctagcttcccagggcaggtgattcgtcggccccggtggcggcggcgcgtgcgacggtcacctcggtttgggtgagtccctgggttcgagcccgggccccgccagctgccgagttgcctctcggtgccgg

SEQ ID NO: 14386 - DNA, 2300 bp, Homo sapien
cccaaagtgttcccgatatgctgaccgagggtcagatcccacttgcctcttctcgaagattctctacctgaccacttctctccttgctgccgctggctagcacagaacatccagtccccgctgctgtactaagcaacacggaaccgggtggcacctagacttgttccctgtcgctgcagatgtagagtagtgtctttccctccttccaagctagtcgcccagggcagggtcgccctgtctggctagggtgctgcacccgcagctctcggtatcttaggtcagacgcctggaacgcgcaggccgtttctgttcctccggaaaacaatctctgagctgcgccacgacccgtccctgcggagcaggagtggggaatgggaaggtgggaaggcgagtccgcgactctgctccccaaccccagctggcgcggcggctttccacgcacccccctccccccaccccgatctcccgatcctggctctggcgcggtgctccttgcagccccacgctttgcaaactttcggagttttactccatttgcgtcacggaaaaggcaggaggatgacggagtccaggaagcgaggcagcggcagctggcaagctcccccgccgggcgctccaaccacgggggcgtgaggtgtctcccggcgagggcggacaggcggagggagaggaggggaggtggcggtcccagggaccagccccggaggctctcgggccccctcgttcccgggtcgtttcctccctctcgcctcccggactgagcgccagcgagcgagggcgctggccagctgggaagccgcgcggaggagtaggcgggggctcggctgcagcgccccgggcccgcgggagggcggagctggccgtccctgccccgccgggacgcacggaagtgcagcggagtttgcccgattctccagcctgcttccccctccctcctccctctccccacccctcacctcccctttggcgatcccctccttcctcaggacgccacctcccggaatcgcctttttgttttggagctgccttctcgctggcggagcggagggtctgcgagcgccggggaaggcaggctgggggcgcagcccgccccccactggccgggccccgcagggcggagaggaggacggacggacagacggctggccgcgccatctgctcgccggagctcactctccaaactccaaactgttgagtgtgtgcgtgcacgcgagggtggtgatcgggggtcgtaagtcccgggtgaggaaccggtttctgctggggttacctttggacggggttcctgggattcagagcagggtcagcgtcaggctcagaaactgctgaggaattaggcaaacaaaagagaccactcagcgagtggctagaagtcgcccgacagcctcgtcgcgccccctccttcctccggggttggggctggccacttctggggcggggagagggcgcccgagccggcgggggctccggctgcgcagccggggtcgaagagttggcggcctgttgtgtaagcctcagtccttgttttcccggcctggctcgttgtgaagccggacacatccacccttggactcgattcaggcggctgctgcttttctccttgcccctcttggattttccggatttttgaaaacccagtggcccaggagcaagaggaggaaggaggaaggggcagatctgcagaggaatgtgagagcctcccaaagcgagagccgccaaaagaatctgggagccagagggacagccgagccctgcccgggtttctggaatggtggtttcagagtgagtctcttctattttagaacgttgttccagtggaaagtgtcgaatttttcccctcgcagggcagatttctccaggtcacttgacttttcttctgggagtaggagttaggagagattcccctctaaccccccagaggctgctaagggaggaggagactgtggacatgagccctccctgctcacaagcatatgcccggagacctgatagggcagtttctgggccatggacattgctttgaagagggggagactggacagcatctgtgggtgctgagaccccaccttaggacctgagagattgaactgtgtaagcgccattcagctgcgagtgcattcttggactgccttgtgagcatccccggtctgggcaggaccctctccttcccatctttctataccacccagcccagccatggcactgaaaggccgagccctctatgactttcacagtgagaacaaggaggaaatcagcatccagcaggatgaggacctggtcatctttagcgagacctcact

SEQ ID NO: 14387 - DNA, 2300 bp, Homo sapien
ctcccggactgagcgccagcgagcgagggcgctggccagctgggaagccgcgcggaggagtaggcgggggctcggctgcagcgccccgggcccgcgggagggcggagctggccgtccctgccccgccgggacgcacggaagtgcagcggagtttgcccgattctccagcctgcttccccctccctcctccctctccccacccctcacctcccctttggcgatcccctccttcctcaggacgccacctcccggaatcgcctttttgttttggagctgccttctcgctggcggagcggagggtctgcgagcgccggggaaggcaggctgggggcgcagcccgccccccactggccgggccccgcagggcggagaggaggacggacggacagacggctggccgcgccatctgctcgccggagctcactctccaaactccaaactgttgagtgtgtgcgtgcacgcgagggtggtgatcgggggtcgtaagtcccgggtgaggaaccggtttctgctggggttacctttggacggggttcctgggattcagagcagggtcagcgtcaggctcagaaactgctgaggaattaggcaaacaaaagagaccactcagcgagtggctagaagtcgcccgacagcctcgtcgcgccccctccttcctccggggttggggctggccacttctggggcggggagagggcgcccgagccggcgggggctccggctgcgcagccggggtcgaagagttggcggcctgttgtgtaagcctcagtccttgttttcccggcctggctcgttgtgaagccggacacatccacccttggactcgattcaggcggctgctgcttttctccttgcccctcttggattttccggatttttgaaaacccagtggcccaggagcaagaggaggaaggaggaaggggcagatctgcagaggaatgtgagagcctcccaaagcgagagccgccaaaagaatctgggagccagagggacagccgagccctgcccgggtttctggaatggtggtttcagagtgagtctcttctattttagaacgttgttccagtggaaagtgtcgaatttttcccctcgcagggcagatttctccaggtcacttgacttttcttctgggagtaggagttaggagagattcccctctaaccccccagaggctgctaagggaggaggagactgtggacatgagccctccctgctcacaagcatatgcccggagacctgatagggcagtttctgggccatggacattgctttgaagagggggagactggacagcatctgtgggtgctgagaccccaccttaggacctgagagattgaactgtgtaagcgccattcagctgcgagtgcattcttggactgccttgtgagcatccccggtctgggcaggaccctctccttcccatctttctataccacccagcccagccatggcactgaaaggccgagccctctatgactttcacagtgagaacaaggaggaaatcagcatccagcaggatgaggacctggtcatctttagcgagacctcactggatggctggctgcagggccagaacagccgtggggagacagggctctttcctgcctcttatgtggagatcgtccgttctggcatcagcaccaaccatgctgactactccagcagccctgcaggctctcccggagcccaggtgagcttgtacaacagccccagtgtggccagcccagctaggagtggtgggggcagtggcttcctctcaaaccagggtagctttgaggaggatgatgatgatgactgggatgactgggacgacggatgcacagtggtggaggagccacgggctggtgggctgggcaccaacgggcaccctcccctcaacctctcctaccctggtgcctaccccagccagcacatggccttccggcccaagccaccactggagcggcaggacagcctggcatctgccaagcgaggcagtgtggtgggccgtaacctcaaccgtttctcatgctttgtgcgttctggagtggaggccttcatcctgggtgatgtgcccatgatggccaagatcgctgagacatactccattgaaatgggccctcgtggcccccagtggaaggccaatccccacccatttgcctgctctgtggaggaccccacaaaacagaccaaattcaagggcatcaaaagctacatctcctacaagctcacacccacccatgctgcctcacccgtctaccggcgctacaaacactttgactggctctataaccgcctgctacacaagttcactgtcatct

SEQ ID NO: 14388 - DNA, 2300 bp, Homo sapien
gctcactgtagtctcaacctcctgggcccaagtgatcctcctacttcaacctcccaaagtgctgagattacaagcgtaagccaccgtgcccagcccaacacatttgttaaatgaatgattgagacagagaaataaagacaagttgctccattctatccaggccatccccatctccccagggcccagcagagagccagactcaggacgagtttcctgcctgcactgggccttacctttttgtagatggatgatgtcagggaagttggagagcaggccctggtagagagacagtgtgtccagcatctggaagaggtcattcttgggctgctcagcaaacatctccccgatggcttcataggtacggcccgtgtgagaaatggcactgttgagggcctcagagcaaaagggggggtccatctggaaggaatgactgatggcctggaaggcactgcccagcttctggaattccttgcggaagccccccacatgtttacgcaccagctctgatgccacagtgctgagctgcaggacgctgtcgtccatcttcttactgaaggccttgaaagtgtccacgcgatcttccacgtcctgcaagtcctggtgctcggtggggatctggaaggtgagcaggaagctggcacccaccatctcatccttctccgcccggcgtttgcccatcttccactgcttgtcatccaggcagctgaggaaatgctggaagccttcgtactgggagagcacagggtggctggtcatgtggtccatccagaggatgagtctccgcttccgcttttcgatgaagtcctcctcgaagcggccagtggcctgcttctcaggcaggtggggcaccgagatgacagtgaacttgtgtagcaggcggttatagagccagtcaaagtgtttgtagcgccggtagacgggtgaggcagcatgggtgggtgtgagcttgtaggagatgtagcttttgatgcccttgaatttggtctgttttgtggggtcctccacagagcaggcaaatgggtggggattggccttccactgggggccacgagggcccatttcaatggagtatgtctcagcgatcttggccatcatgggcacatcacccaggatgaaggcctccactccagaacgcacaaagcatgagaaacggttgaggttacggcccaccacactgcctcgcttggcagatgccaggctgtcctgccgctccagtggtggcttgggccggaaggccatgtgctggctggggtaggcaccagggtaggagaggttgaggggagggtgcccgttggtgcccagcccaccagcccgtggctcctccaccactgtgcatccgtcgtcccagtcatcccagtcatcatcatcatcctcctcaaagctaccctggtttgagaggaagccactgcccccaccactcctagctgggctggccacactggggctgttgtacaagctcacctgggctccgggagagcctgcagggctgctggagtagtcagcatggttggtgctgatgccagaacggacgatctccacataagaggcaggaaagagccctgtctccccacggctgttctggccctgcagccagccatccagtgaggtctcgctaaagatgaccaggtcctcatcctgctggatgctgatttcctccttgttctcactgtgaaagtcatagagggctcggcctttcagtgccatggctgggctgggtggtatagaaagatgggaaggagagggtcctgcccagaccggggatgctcacaaggcagtccaagaatgcactcgcagctgaatggcgcttacacagttcaatctctcaggtcctaaggtggggtctcagcacccacagatgctgtccagtctccccctcttcaaagcaatgtccatggcccagaaactgccctatcaggtctccgggcatatgcttgtgagcagggagggctcatgtccacagtctcctcctcccttagcagcctctggggggttagaggggaatctctcctaactcctactcccagaagaaaagtcaagtgacctggagaaatctgccctgcgaggggaaaaattcgacactttccactggaacaacgttctaaaatagaagagactcactctgaaaccaccattccagaaacccgggcagggctcggctgtccctctggctcccagattcttttggcggctctcgctttgggaggctctcacattcctctgcagatctgccccttcctccttcctcctcttgctcctgggccactgggttttcaaaaatccggaaaatccaagaggggcaa

SEQ ID NO: 14389 - DNA, 2300 bp, Homo sapien
ggtcaggagttcaagaccagcctggtcaacatggtgaaaccccatctctactaaaaatacaaaaattagccaggcatggtggtgcacacctgcaatcccagctactcaggaggctgaggcaggagaatcgcttgaacccgggaggcagaggttgcagtgagccgagatcgcgccattacactccagcctgggcaacagagcgagactctgtctcaaaaaaaaaaaaaaaaaaaacaagggacaaattgtggaatcaatgcctttaccgccactgaggccagcctagcacagcctccatcccaggcctcctagggcacctggatggaagctcttaggtttgccaaaatccctacagaacagcagcaattggtttcttagtcaactacagcaggcatttattgtacacctactgtatgcagcagcctctggaggagaaagttcaagctttacaacaagggaggtgatatgtgtaaagctgtatgtaaaccatgaatcacagggaatgtgcaggatgacagagacggaggagaaaggataagcatttattgagcacctaccgtatgccaggccctgggctagggacttgaggtacattaaagcatttaatcctcattaacccaattttacaaatgaggaaactgccacagagaggtgaggggacttgttcaaggtttgacaaccaagtaagggagctgggatttgaacccaggtctctctggtttcaagaccaatactcataacccccacatggaccaggcaccatcacacctgagcactgcacttagggtcaaagacctggccccacatctcagcagctatgtagactagctccagtcccttaatctctctcagcctcagtttcttcatctgcaaaacaggtctcagtttcgttgcaaagtatgaagtgctgggctgttactggtcaaagggaagagctgggaagagggtgcaaggtggggttgggctggagatgggctggagcagatagatggagggacctgaatggaggaagtaaaccaaggcccggtaacattgggactggacagagaacacgcagatcctctaggcaccggaagctaagtaacattgccctttctcctcctgtttgggactaggctgatgttgctgcctggaagggagccagcagaagggccccagcctgaagctgttaggtagaagccaaatccagggccagatttccaggaggcagcctcgggaagttgaaacacccggattcaggggtcaggaggcctgggcttctggcaccaaacggccagggacctactttccacctggagtcttgtaagagccactttcagcttgagctgcactttcgtcctccatgaaatgggggaggggatgctcctcacccaccttgcaaggttattttgaggcaaatgtcatggcgggactgagaattcttctgccctgcgaggaaatccagacatctctcccttacagacagggagactgaggtgaggcccttccaggcagagaaggtcactgttgcagccatgggcagtgccccacaggacctcgggtggtgcctctggagtctggagaagttcctaggggacctccgaggcaaagcagcccaaaagccgcctgtgagggtggctggtgtctgtccttcctcctaaggctggagtgtgcctgtggaggggtctcctgaactcccgcaaaggcagaaaggagggaagtaggggctgggacagttcatgcctcctccctgagggggtctcccgggctcggctcttggggccagagttcagggtgtctgggcctctctatgactttgttctaagtctttagggtggggctggggtctggcccagctgcaagggccccctcacccctgccccagagaggaacagccccgcacgggccctttaagaaggttgagggtgggggcaggtgggggagtccaagcctgaaacccgagcgggcgcgcgggtctgcgcctgccccgcccccggagttaagtgcgcggacacccggagccggcccgcgcccaggagcagagccgcgctcgctccactcagctcccagctcccaggactccgctggctcctcgcaagtcctgccgcccagcccgccgggatgcagtccgggccgcggcccccacttccagcccccggcctggccttggctttgaccctgactatgttggccagacttgcatccgcgggtgagtgaggggcctgagaccccgacccagcctggcggaactagaggggttcctccgggagggaaaagggacaggaggagccagaagtggcccccagatcgggagtcaagca

SEQ ID NO: 14390 - DNA, 2300 bp, Homo sapien
gaggagggtggtgaaagctggaggggcctgaaggatgacgcagaagtgcagggagtgcagggtcagcactggggtctcagagatggggggcaggggatggcctcccagagagactggctgtcagtgctgtgggaggtggtgagaagcccaggattgcagtgggggaccggcctgtgagggagtggagtggaggtgtttgcacatgaggaggtctgggaacggggaggccagggcattggtggtggtccctggggaggcctgagctatcagggtcatggcaggagttggggtggggtggaggtggcctcgagccacggctgctaggtttatgagtagggacccagggcagccctgaggagctgaagggggacacacctggatgccagtgccccagaggaatggggcatttgatggggagggcacagtctggggaccaaggcagccagagacccacggcactgtggactctgaggcatgagggatgtgaatgtcggagcagccagctttggacagggccgagggccacctccaggggtgagctgggtctccatcagagctggaggaaaggaagcatttggaacaaattggagtggcttgtgacctgctggggtgcggggtggcctagtttcctgaagagctgtgcaccaggatgatggggcagaagcagtgagggaggaaggcaggaggctccccgggcctgaaatacttggagactgcccgctcaccaggaaggtgggggtcccagccccagatccggcccctctcagcactgggataccatcagggctcgcagcttcctacaggaaaagctgacgcggatggggctgaggacatagcattggccctggcctgaggccagtgaggctgggtcaccccccagcctggctcagccctcccttacccagaaatcagaggtttacttgccccatgggcatatgggggcacacagggtctgctgctggggggactgggcccctgtcctctgttctgaggcctgtggtccctcaggggcttctggacaccctgcatgcctgtcctacctgctgctctgagccctcgctgtgcctgctgactggaatgcgttcagagcatggcttggtttctattcaatcagagactatgatccaaggagagccctgggttttgtgtcctggttccatctctgctattttgatgtagtaggagactttgggcaagtccttgttcctttccgggcctcagttttcttaactgtgtactggggtggtgacagacacccctgtctaaagccagcagtcatctggttcctgagatggacaccgctgacccggttcaggtcaaatccctagtctgttacgaacagtggaggtgacaggccccaggcccccaaaagcctcctgggttcttaggaatgaagaggttcccagcatgttttcaggcctggggctcatccatccgtcagatggggctggctgccttccctccccttctatgtgtcctctcataccgccctccaactccaactgctcccctgccaagggagtgctcttggtcacaggcacaggaagcagccccttgaaggctcagcaccacccctctgtcctcctttatttgcttcccactcctttttgtatccattgagctagacatggatctctaaagataccacaccctgggataggattctggggaggagctatcagacagtcacaccttagtgataattgacttgatattttgccaggggaaaaatagacttgacagaagagagggcatgtccagagcctgggaggtaggtgggagaggcagggggtagagagcccccagggggctgtgtgtgctgcacaaacccttcacccgtgacccaccaaccctttccattcctttccccaaccttagggcacccactgggagtgaagcgctagctgatacgtaacaccatctctccatttcccttccctgacccagggtcctggggacccccaggccacttggcctggttggtgatgggggacagtgggatagtcagggttccataactaagctcccagcatagaatttccacgccgcagttcaggcgccatggcaaccaggggaaataaacactacgagtttcacagtccaagctctgccgtgacgtcatctccagctccagcctgctggggcctgtgctgactgtgccccagacagccttagctgctcaagctggagaactgtcttccttcccagcttcctccgtgtctggggtgggggatgggggggtctcaggcagggatactctagccccttgactgctgtttagaccctgctgtagctgctgc

SEQ ID NO: 14391 - DNA, 2300 bp, Homo sapien
tctggtcctcccatccttctccagtggcagttttgtgtctccgtctctgccacagatggcatttcttgcatgccctttctatgatggtggtttcctgtgactgccttctcttttctcccctatttcactgtggcaatgtctagaggagacttagagttggggtgcagtgtcccaggttcactcaacctctccccttttcctctctgtgtgtgtctactttggctgtgctccctggtgccagcagtggtggcagtgttggtgtgtgggcctcccaggacaagaagaaagtgagtgtgaccctctcttgcttcctgccaggcgtctgcagcctggcaccagctctggccaggtctttaagcaaaggatctgcagatgtttttttctcatttctggtttggaaaattgaggcaaattctgggcagtagagtcagaaccaagatgaggctgaatcaggggagtctggggtcctaagagatacagggatgggcagagacctgaaaccttttagagcatgtggagagctgggtgtctgtttaggccagttgcttctctctgtgcatcaatgtgccaggtacccttgcaggggatgcctggagcctggctacatggcctggccaccctgatgcccttgtgttcttcatgacaggccagcaagactgaggggaatggctccgacagcttcatgctctccatggaccacagctggagtggcaagtggagaccattcagaacctggtggactcgtacatggccattgtcaacaagaacatgcaggacctcatgcccaagaccatcatccacctcatgatcaacaacgtgcatgcgtcgcctcatgggggtagaggggacccaggtggccatgttggcctaggggagatgcagaccagccttatgggaccagcctcaggaagggaggcacagtccagaccagagttgtccaatagaaatataatgtgggattatagtggttcatgcttgtaatcccagcactttgggaggccaaggtaggaggacggcttgagcccaggagttcaagaccagcctgggcaacataatgagacctcatctcaacacaaaaattttaaaaaatagctgggcttggtggtggcaagtacatgtagtcctagctgctccacaggctgacgttggaggatcactttgagcccaggaggttgaggcttcagtgagcagtgatctcgcccactgtactccagcctggcgacaaagcgagatcctatctccaaaaattaaaaactgagtagacaggtgtcctggtggcatgataggtcctcagtcccctcccagaactgtgaccttggacaggtgacttttcctctggacctcagtgtcctcatctgagtgagaaaagggcggtggggaggcggatcttcgagtctaagcggtgtagaagccgcgtctgaaaagccatactcgcggctccaagtccagcgcacagtcccaacagggcccggcggggcagctatggcggccagggcagcacaagcatcaatcaggtcccagtctccttccctctttgcccgctctcagaccaaggagttcatcttctcggagctgctggccaacttgtactcgcgtggggaacagaacacgctgatgggggagtcggcagagcaggcacaggggcgcaacgagatgcggcgcatgcaccacgtgctgagggaggcgcccagcatcatcggtgacatcaagacgaccatcgtcagcacacccacggggtcctgtggatgactcctggctgcaggtgcagagcgtcccggtcggacgcaggtaccagggtcggcccccacggccccaaagccccccagcctgggccgcggaagaagtgccggaccaggcagggcgcgcccccatcccggggtggcgcctacttgaagcgagaggcggagcttagagagggcggggcttgccgtggagcgcgggctgcggggcggggtggatctgggaggttggcgccgctggcggcggggcttaagctccggtgaccgcctcgggccttcaggaaggggcttgcatgcatgggagtggctggcactgggctggggcggggccttagggtgggcggggccgctcatcgctcctctttctgttcctggctccctttcgcccgcaggtcgcccaagtccagccccacgacgcagtgccgactccccgccgtgcccccagcccggcccgggttgcggagccctgctcctgggcctctgcctgctgcgtccaccctgggggaagcgcccgtcgtaccctccacaccgggggcttcccctgaccccttaggccctccc

SEQ ID NO: 14392 - DNA, 2300 bp, Homo sapien
atctttctagccctcttacagcttggcatgcagcagatggatgctcaaaaagcgactgtgaaattaatatttgtatatatttctgggatacaactagtaaaaacacttgcaatttaaaaagctctattttctcacagcaatctagaggtaacaaaataaagcttagacagattaaatagcttgtttagggaattttgtttctcgaagtcataccaacttctcaagagtttgttgctctttgtctcaaatccttatctgggaatgccatgcctgttagggtcccaagaaactggggactgaaggaaaaataaagtggcaagccacttctgtgcttaacccagcaataatgctaatacagtagcctagttgtttctggctcagaacccaggcctggaaccccttcttctcccagtcccagtgtatagtgtggtagctctagtgctggggtcatgaatccccataagtacaaaattttagatgcagaagtattttcctgggaagatggatcatagcttttattagattctcaaaggggtctgtgagaatcttagtcttcttaaaggctagatagaagttggggtagaagatggtagaagttggggcatggccaggaaaagttagggctggtttgaatgataagagactgaatttgtaggctgtggggagctactaacttactgaggtaaattggaaaagtttatttgtcttcttaaaggctaaggactataacatgatacaaaatctcagaagtagatggaaataaaaactttcagtagacttaatgtgtccctgtgttgttctgtattttgtcatctaaggggaccagtagcccagggatctcttgtagattaggaagaaagagacaggtgtcagggttgggtaactctaggtaagactggaaaaggaaaatgcggagcccctttctgaaaaattacgaatttcaaaatggcgacaccagaatattaaaccaagctcgaagcccttctaagctgggagcactgtgcaactacataggttggacgcatatgcagctggtcctgcctcttgcacttacgattgcacacactattgtctgccaaattgggatgtattcctttggactgctatccagacctttattcattttttgagcacctacaatgtgccaggaattgtgctagtggtggggattccagataagagcgagcattcaattcaatcatatcgggtttctactatataacaggtcttgttctaggtcctggggatacagctctgaacacattaacacggggcagagacaaggaataaatgggttaaagatcagatagtgacaggtgcccaacaaaaacttagcacaggacgatgtgacacagggtgactatttgaaatgggttgtggtggggggtgccggagatgatatttgagctatgagtttagtgaaaatagtgggcagccctagctccatgggggtgtgggtggggagggttatcttaagcttgggaaacaaggcaaaataaggaaaggggggagagagagactatatacggcagagtgaacacaggtggtagctaagggaagggatgaaatcatgggacacctccaggcaacagcctccaggggctaaaccatcgtcttgggtaaatggatggtttgagagcaaaggcgggagcagcgagtccggtgagaaggtcctcacaggaacccaggctggtgagaaggtcctcacaggaacccaggctagcgaagcggtggctcggactagggtgaaagtagcggaggtaacgctgggtgagccgcacccgcgtctcccacgaggtccccccagtgaggttagcgggtgccgcgccgagcgccaagctgaggagccgcccccaggggctggcgctagtctgcagcggcgccgacgtggccggcgcgatccgccacgcacgtgtccggctccaggccgggggcgggggcgcgcgggggtctccggctcctccccgacttctggggcccgggcgccagctggccccgagcctccagtccgcgggtgcgaagaacggagcagatgggtcgggaacaagggagctgggtcaaggcgaggagggggcggccgggcgcgcgcgctctggcctcgtgcacgcgctgaaaccggagcgcgcagggcgcgccagggtgagggggacgggggcggggtgggggcagccctttcccaggcggtagcgggggcggcgtcgctgttgcccttttaagccgcggggccgccgcctcctgccgctggagtcggttacaaaggaagcgccacccaggccgccacacgccgaggcttccgcgcc

SEQ ID NO: 14393 - DNA, 2300 bp, Homo sapien
aaatattgtgtataattggcccctttagtatataatgtaaaaaaaatctatatgcttgtttatacttttttctttcctggtgggtacaggaaactgtcaatagtagaacacaattaagaaaaattggcttctgtgtcaggctctgtgataattgagtataaaagacaaggcatgtccctgtcctctgggaactgataatctaatggaacttccatctgattactgtcttgttttgatcttatcaccctgccttggtctcctctgatctcttctcccttggcctacttcttctcttctcattctgtgctttctctgagtaatattttactcccattactttagtcatgatctctgttctagggattcctaaatctgtattcatctccagagtttcaaacccatatatctgtctgtaaatcatatatgttagggaatctcacttacagtgccatggatattcaaaatgatgacgtttaaatttgcgtttacccacctcctagcactctatcagccccgtgttttttctcagtaattcttgtgattgtgagtgggacaaaatgaaataatcaaactagtcacccatacccaaacctgggaactgtcttagcgttcttttatatactactgttctctgacccccgccccccgcaaactagtaattttctaagacctgtccttctgaatgtctcttactattttccctgtgatctcagtttcttcctcccatccctcaaatgcttttttggtgtgtgggggaagggaggaaaattgaaattcgtggagagtgtactaccctgtctttcttgttgcttggtatgactccactaccctgctgcctctctccccagcactcctggagccccttccgtgccagaggccagagtgtctaggtctgtgtccggattgctctgcctcatcttcattatgcacttagcacgcaatagagtgtattgggtggatatcaaatccacactggagcttggtttccgtttaagcatgaagatttttgttggatcgtaatttaccgttcaaccttcctcattttcatttgctccgttgtccactttgggaaagcttattctttgcttcgttaacccattctaatcctatgtcttctttctttgtcctttgtaaacctgcttctttctcttcatctcttttcttggtcagagccacctaggaaactgttcctgaccgagttaagtgagttgccttattagatcccatttgagtcacgttatacattgaaaaacattttaaacaatgaacaccatacttgtgcacatgatttaccttgcttacttgttgaaagcaaatatgcttagaaaacaatctggacttaaacatggaaatttacagttattctttgcagttttcctagtgaattattgttattttttatacagacacttaagagcctactaaatatcaagtgttacaggtttcatttaatctttaccattctgggaaagttttcatttctttgttttacagatgggtagactcatactcagggaattagataggatatccaaggtcatctagattgccaggctctgtctactagatatttgcttctgtatttttaaatgaatatgactggaatatataattttgtaatccatctgtaacaacactgcctgtgtgtgtctgggttattttttctgttattttttgtttttatttttttggtagcctcattaatgcattaatgttctcttgtctgaagttgtaagtttctcagaaaacgggttagcagtgagaaattggacaatgtctggaacttccttcctctgcccttattgttgtcattctgctaggtatcagttgtagtgattataccccaagccatagtaactttcttacactagagggtcctgaaaatattttaaagactattttttaaatctgtaagctgcagttgagcagtaacaaactttttcatttcctactggattgattacagtagtcataacattattgatgtcttctaagggctctttaacataatgcttatttactgaaatgtgttttgtagcttcgtcagcaattgaagtggttgatatgtgaactctgcagtttatataaccttcctaagcacctggatgttgagatgctagatcaaccactacccacgggtcaggtaaagtaaaaattctctagtgttcaagagctaaataaattgtctcaagcaaaagtcaaactaggatgatttttctttttattgttcaacttatttagaagttagtttcatttttgttcctattgaattgttttgtttgttctgttttaggtactaa

SEQ ID NO: 14394 - DNA, 2300 bp, Homo sapien
tgtgtgcccctcccttgtcacttcctctttgagaggtatctttacgggaatatgaaatattggccaggaaactggaggatttgtgactataggtagtgttttcattattttttcctgctctaggtagaacttcagggaggggacgatctgggaggtaaatggctgaatttctgttggatttgtgtttctggaccatggctcctgataccacaaagaagggccttttctggggttggagtatttcttgagaggcctaggaagaatgtgattgccttgagctaactgaccttatgaagaggaccttaaactgaattgccaagttattagtatcgggattcacagactttggaggatagcaggtatgactcagaaagatttgcaggaaagagccagaacagtatatatttatggcctctgatgtccacggtgacaacttgaataataagaaaaatggaacttgagataaagcataacacaaagatgggagttggggcaggagggaatgtgaccttgttggtaaatccaacttgctatatttttaaggaagtcactttttggtgtttcgggcagcatctgaattactgaattgaattctgaggtagtactttaagaagggtctatttagataaacttaggttcatttagagaataatagccaggattgggaagagattgattgtattccgtgtcctaggatagctggtgaaattgtggatttggagaggagaacatgagggttgatgttatcttgtcttcagctatttgaaggactgtgtatatggaagcattagtttttatttgcttttggtgaatgcagggcatgaaactagtaagtcaaattacaaagaggtgattttcaactcaatgtgaggaagcgatttgtaactatttagagccatttggtgatgtagtctttaaaatgttcctcttccttaataacttagatggctaagatgttaagatctcagataactttctgagatcctttatagagtctgagagtctgtttctgagttaatatgtactaaggtaactgaaacttcattttaacagtcatcctcaacctttttttcctccctgaggaactttttatttctgtaaaatctggattcctgagttccagggtatagactttatggaatagagcccgcagattttgatgtagaagagttattctgaactgtttaaaatgaattaaatcatacataatgaagaggttttgtagtcactcattagggattcacatgtttaaagatctaaataataggaggttaaatgaaattgtactttaccaagcttacatcaacctctatacctttcattatgtctgttaaatatagatgaaaggtgagctactttatttgaaagtagattataataactgttgttaagttggtatcttgtgtcattaagttggtatcttgtggataatcttacatttctattgcaagttagaaaatgcaaatcaaaattaattagaatttgcttaaaaaatgagatgattaaagctggctgtcattccctgtcagggcaatttgcagtttgttcttcagggtcccaacctaaggagccggagacttagcagggcctgtcctcggtggacgctgagctccagtatttatctccctgtgagctctgtgagtctgtgagttctagctcagcttgtgaacctcttctttttctcttctgtaattggaagaaaacctaagggggaaaaaaagatcctgctctctggtgttcccttttcttagccttgaaattattatgttttgttcacctttctagttctcagtcagaagatttatctaagttacctagtctatcattattggaatggttcctttatatagttctagtgaagtggaaccccttcatgtgtttcatcagtttaccataatgctgttctgtttgggcctgattttaacttcatttttatttgctttggttttcattttggttttgggtactaattttatgactcttacccattatctgataataaatgtacacattctttatagtatcttttaaaatcttctaaatagtataacactaaggatgttctttaaattaattaaacttgcttatttgctttttaggataactttccatttgatcctccatttgttcgagtggtgttacctgttctctcaggagggtaagtttaagtgactacttaaaaagaaatttttttcagttaaaaaaaatttttttttatagggacgagatctcactatgttgccctggctggtcttgaattcctgggctcaagtgatcctcccaccttggcctcccaaagt

SEQ ID NO: 14395 - DNA, 2300 bp, Homo sapien
cccatctacattttttaatttctgtaagttctatttcatccattttcttttcaggtcttcttcatcattcctggtggtcttgctgcttgctcaattttatgattccatctttttttctttatattagatttcacatataactattttctcacaattctaatatctgaagtctgtgttctgtatctgataattccaaaacctactgtccttgggaaacatatctattatttattatttctgacaattctcaaatatgttgggttgactatttgaatgctatgatttgagtgaattcttttaatctttgggaatcctacaggcttaaattagagatgctttcctacaaaaagtatctgtgtctgcttctgatgacagctgtggatacaactaacatgagaccactttaccatcttgcacaatcctgagattctccaagagatctggctccccacccttgctcatttatacacagaagactagactgcttagtataggtagtgactcacttcctcctaccctggaaaaaacaaaacagatctctcttctgaatgtgatcacagtctaggggattctgtgggagaataagtggaggttatgggcagcagggaaagacagatgcctttcctgatcatagaaataggtcagaagctgccctaaagactgtgtgctccaggatttcactatttaactcaactaccattccctccatagtgaatggaagcttcataaagcaccatcttgcctttaaaccacaaattcttgctaaaagtcatggtaacaaacctccggctttggaaggctgtctcactaatgtcctaaaattaacattacagcctatgcttcaggttaactgaaaagaaaaccagcctgaacaacatccttatgtcccatggcttgctctcagctcctcttggttgggcctagggcagccagactgtctagttccaatccttgttctgccacttgtcacctcagacaagttatctaactaacttctgtatgcttcagttacctcatctacaaaatgcagataataatagcacctattttttaagttattaagaggattgagttaataaaaagatttaaaaaaaaaaaacttggtaagcataggcacagagaaaaaaaaaagtaaaaataaatgaaaagactagagcctagcacataaaagcttaccaggaattagttctataacatgaactcaattttttaaaacttcaaagtacatataatttttaatttactacactatacatactaataataagtttacaactgtaaacatctgtttacaaataagtttttgtttacaactgtaaacttataatgtttatctacagcaaatataacagactaaaaacagatacgaaatcattaagtgattatcaattagtatctttaattttcttataattccatattttctatagatcacttttgtaacaagaagaaaacaaaccaaatgaaaatgaaactatctcaaaaaagaattaagtcaagacaggaagaaagcttataaagtaatataaaatgtatcttatggtttatgtaaaattcttaacagaagtaccttatttgctccaaactgcactctggctttgcctttgactaaggtggcatttatttgcatgatgaccgattctattgagtaggcactgctccagccctacagaagaacaaagtatctctaaaatacagtagtatttctgattcccacttgggaaggcctaacaaaatggtatataactcaacagcagcaaatcagtgttaaaaagactgtagtcaaggggaaaaagtaaaattggaacatttccagaatctcacaaaaaaaaacaacaaaccaatgttctaagtgcccaacatgagcaaattagaaccttaaataaaggtcactcttaatgcctatcctagcatagattcagcaccaagtacaatgtcattttattggtttacctttttcattcttgaaagtagacgctattttaaaaataaactaaaatttaagagtaggagctattaaagaattttctacttacaatctaatttacatgatcaaaacactaaattgtgggtgaaaatggagtatcgtaagaaaagtcacctgttttgtgagaagttccatacataatgctcctccacccaatacataccttaaaaagaaaaaaggagtcatacaaaattctcgagaattattcctccttaaacaatttctaagtgccattaccaagaaaatatgcacacaagtaaggatgagaaaataacatgcaaacatgacaacagttgttagggatacaggacta

SEQ ID NO: 14396 - DNA, 2300 bp, Homo sapien
ctgagaccatttcaagaggttttaaaagactattttcataatattaaaacatttgccattttcactcattcttccatgtgtacaatggaattttccagaggctacatgatgtgattttgcaacagattgaattcagaagcaaatatgagaatctatttgtcttctattaagacaaattaaatatttgcaaaaatgtagtgatgccgtcactggtaaactgtcctctttccctactttatatcagccacaaagaaagaacgcccactttgaaaggcagtcaggtttcattcagtagccagagaatggagaaggggagctcatactctaaaggcaccttctcccagagggatgggaggctggggagtttaaagagttagctgaggggcgggggaggtatgaacggcatgcacagactggagttccagacaagcaggcatagtccctgaacatgctgcttcatacatccatgttcgtaagatgccagtgagctttctttagggagaggattttagcattatgttaattatctaaaggtaactggagggcgcctgtttatcttcctctggtattccgcaaggggtcaggaagctctggtgacatctgggccatctggcttccttaagcagctgcgcctataaatagactatgggaaaaaactggctgggcttggtggctcatacctgtaatctcaacgctttgggaggcggaggcagagggatgtcttgaggccaggagtttgagaccagcctgggcaacatagaccctgggtctaccaaaaaaaagaaaaaaaccacagctactcaggaggcttatgccactgacaatgtcatactatccaccagtgggggaaggaggatttgggaaataattgttttccataaaaatatttcgttaatgtataacatcggttttttaaaaagagttaagcattaagatgttctgatttaatttttaatatggtaaatattgatagtcataacacacataaactattggtcgtgtcaatattttagggtgtaaagggtcctgaggccataatgagaactgctaatttagaccaagtttctgcccaagatctggcgatcaaatcagggctcccttaggaaggaattggcgggaggaatggatgttaggtggggacaaacctgtgtctgctgtgcttccatttcttggtggttctcagtttgagcatgcatcagaatcgtcataaagtgtgttaaaacagattgctgggcctcacccccagtgtctgattcaggaggtctgggataaggaccgggaatgtgctaaaacttagtagtttccaggtgaatctgatgtccctggcggggaactggtgcacagcttggggcgtgcttcacagcaatcatctcactcagctaccttagaatggcaggtgctatttatgccattttactcattcgaaactttaaacctgaagattacaacgagttaactaagtttacaaggaataaaggcagtgattttcacacactaagacaattttttaaaagcaaacgtccgtttataaatcgagcttatgctatttaaacaggcattgggactacgaagagcaataagtactacctagtccctgcaaggaatttgtgaattagagaaagatgtaaactcagaaatatggcggtgccagggcagtgagaggcacaggcacagaagaagaatttattttcactgcaggaggcctcctagaaagttgccaggagcggtggcttatgtctgtaattccagcaccttgggaggcccaggcgggagtatcgcttgagccctggagtttcagaccagcctggaaacccgtctctacaaaaaatacaaaaattagctgggcgtggtggcgggagcttgtagttaaagctacgagggaggctgaggcgggaggatcgcttgagcctgggaggtagaagctgcagtgagcagaggccgcgccactccactcccgcctggccacagcattagacccaatctcaaaaatgaagaaaacagttccgagcgtattacggaacggagtacacctcggagtacgggctccagacgagggaacgcaccggcgttgccacgcccaccttccccgtccagccggaagtggcgcggacgcctgctcagtgcgcgccggccgggcaaccctatgctggcgtaatcgggttcctccgagccgccgtaggactggttccggcgggctggtgaggaatggagccggtaggctgctgcggcgagtgccgcggctcctccgtagacccgcggagcaccttcgtgttgagtaacctggcggaggtggtggagcg

SEQ ID NO: 14397 - DNA, 2300 bp, Homo sapien
aagtgagtgaaggatatgaacagacagtcttcaaaataagacatttatgtggccaacaaacgtatgaaaaaaagctcatcatcactggtcattagagaaatgcaaatcaaaaagcacaatgagataccatctcatgccagttagaatggcgatcattaaaaagtcaggaaacaacagtgctggagaggatgtgaagaaataagaatgcttttacactattggtgggagtgtaaattagttcaaccattgtggaagacagtgtggtgattccccaaggatctagaactagaaataccatttgacccagcaatccaattactgggtatatacccaaaggattataaatcatgctactataaagacacatgcacacatatgtttattgcggcactgttcacaatagcaaagacttggaaccaacccaaattcccctcaatgatagactggataaagaaaatgtggcacatatataccgtggaatactatgcagccataagaaaggatgagctcatgtcctttgcagggccatggatgaagctggaaaccatcattctcagcaaactaacacaagaacagaaaaccaaacaccgcatgttctcataggtggaaattgaacaatgagaatacatggacacagggaggagaacatcacacactagggcctgtcggggtggggggctaagggagggataacattaggagaaatacctaatgtaaatgacaggttggtgggtgcaggaaaccagcatggcacttgtatacctatgtaacaaacctgcatattctgcacatgtatcccagaacttaaagtataattttaaaaatgtaataatgaacatttttttttttttgagacggagtctcactctgttgcccaggctggagtgcagtggtgcaatctcagctcactgcaagctccgcctcccgggttcacaccattctcctaatgaacagattgtttttagagtatttgattttgagtttattttaatattttcttaaaacaacaaaacaaacttattagtttgggctttacatcagtcaagtaataatgtctgaattgtcgttttagaaaagataaccatctaaatgtttggcatattttagataattatatgatgaagaactctatattcatttaaacaaaattacagttttagtcaatattttaaaattgtttatgatttttaaaacttaactttcctcactgtatatttaacaactttgccatagcattcaggcattacactgtcattggtattagtcaagttcagtgattttattcatttcaaattgaacttggtgttacaagttttattatagctattaccttcttttagctttataagttcttcaggtcattatttatataaattttatctggcttgtaaggtaacacaaacctcataaaacataaatttaaaaaaatgtttttttaatttgtgaaacacttatctattagctccacattaaaatttcttttctcccaaacttacactacgtcttgaattattcagacaagcaaagataagtaaggagtctaaggaatgtggtttggtttttacctttaaaacgtggacagtaatttggaagtgcagcttagttcaactccttttctaaataaaattctgctccatttgcaactctgaacacgtaaattgaaggggtggctcccgtggccagtgcctgacctctgtgcacaccttggtctggcgtgacctcgcccacactgcacactgcagccatataaatcagatttttgacatgttataaaatgcaagtcacagctgctgttgtctgcggtattcaaaaacttttgaaacactgcatgtccaacaaaatttattttttgtgtgaatgtaagtttttattgagggtaagtcctgtttgtttggaaaaaagaaacagtatgagtcagtgctttttaaaaatcaaatagatttaatgttctccttcctgcctgttctcgctcgtgtgtgtttctctcgattgcttgctcgctttctctgcctctctgcttgtctaagaaagagctgttggctttgagagaagaccttggtattacaactgtgttagtagattgagatttctgttagagtctttctgtttaggtcagaagtgttctttatagaacagaactgggagcttgtaatcataatgtaagtataaatgcttcacctcttcaaatatatgtttgaattcttttgtttctgttatagcaggaaacttcatatgtaagaatgtcttattagctacattgctttgccagatgccagacatttttgtgtgtgtgtggggtt

SEQ ID NO: 14398 - DNA, 2300 bp, Homo sapien
actggaccccttccttacacctcatataaaaattaattcaagatggattaaagacatacacctaaaacgtaaagccataaaaaccctagaaagaaacctaggcaataccattcaggacacagatatgggcaaagacttcgtgactaaaacaccaaaagcaatggcaacaaaagccaaaactgacaaatgggatctaattaaaccaaagagcttctgcacagcaaaagaaactctcgtcagagtaaacaggcaacctacagaatgggagaaaatttttgcaatctattcatctgagaaagggctaatatccagaatctacaaggaacttaaacaaatttacaagaaaaaaaccaacaaccccatcaaaaagtgagtgaaggatatgaacagacagtcttcaaaataagacatttatgtggccaacaaacgtatgaaaaaaagctcatcatcactggtcattagagaaatgcaaatcaaaaagcacaatgagataccatctcatgccagttagaatggcgatcattaaaaagtcaggaaacaacagtgctggagaggatgtgaagaaataagaatgcttttacactattggtgggagtgtaaattagttcaaccattgtggaagacagtgtggtgattccccaaggatctagaactagaaataccatttgacccagcaatccaattactgggtatatacccaaaggattataaatcatgctactataaagacacatgcacacatatgtttattgcggcactgttcacaatagcaaagacttggaaccaacccaaattcccctcaatgatagactggataaagaaaatgtggcacatatataccgtggaatactatgcagccataagaaaggatgagctcatgtcctttgcagggccatggatgaagctggaaaccatcattctcagcaaactaacacaagaacagaaaaccaaacaccgcatgttctcataggtggaaattgaacaatgagaatacatggacacagggaggagaacatcacacactagggcctgtcggggtggggggctaagggagggataacattaggagaaatacctaatgtaaatgacaggttggtgggtgcaggaaaccagcatggcacttgtatacctatgtaacaaacctgcatattctgcacatgtatcccagaacttaaagtataattttaaaaatgtaataatgaacatttttttttttttgagacggagtctcactctgttgcccaggctggagtgcagtggtgcaatctcagctcactgcaagctccgcctcccgggttcacaccattctcctaatgaacagattgtttttagagtatttgattttgagtttattttaatattttcttaaaacaacaaaacaaacttattagtttgggctttacatcagtcaagtaataatgtctgaattgtcgttttagaaaagataaccatctaaatgtttggcatattttagataattatatgatgaagaactctatattcatttaaacaaaattacagttttagtcaatattttaaaattgtttatgatttttaaaacttaactttcctcactgtatatttaacaactttgccatagcattcaggcattacactgtcattggtattagtcaagttcagtgattttattcatttcaaattgaacttggtgttacaagttttattatagctattaccttcttttagctttataagttcttcaggtcattatttatataaattttatctggcttgtaaggtaacacaaacctcataaaacataaatttaaaaaaatgtttttttaatttgtgaaacacttatctattagctccacattaaaatttcttttctcccaaacttacactacgtcttgaattattcagacaagcaaagataagtaaggagtctaaggaatgtggtttggtttttacctttaaaacgtggacagtaatttggaagtgcagcttagttcaactccttttctaaataaaattctgctccatttgcaactctgaacacgtaaattgaaggggtggctcccgtggccagtgcctgacctctgtgcacaccttggtctggcgtgacctcgcccacactgcacactgcagccatataaatcagatttttgacatgttataaaatgcaagtcacagctgctgttgtctgcggtattcaaaaacttttgaaacactgcatgtccaacaaaatttattttttgtgtgaatgtaagtttttattgagggtaagtcctgtttgtttggaaaaaagaaacagtatgagtcagtgctttttaaaaatc

SEQ ID NO: 14399 - DNA, 2300 bp, Homo sapien
ggctattatactataaatagccattgtagaaaaaaatgttcccttgaagtcgcatgaacccgaattcaaaaaaattttattaggatacaaagattcctggtagaaatttgaagtggtcttcaaatttctctcagcaagtttcaaaatacttgtcgtactctgagagttaattagcgttataactggatgcttctcaatagtttcaatcaaatcttaagtagagttctactaaggtggaaaatggagtggataacaatctgggcaagctatgccaaagctttttctaaagaaagtgtacctagttaaaatgctgtcactgactgtcagaaaactatagctcccctcccgtgcatcctccattaatttttcttaacccatctccactttctctattctagtccacatttcttccgtctagaaatgtagaaaaatcctttggcaacccaggtagcttccacaagtatcatctccaagtgtttcttcctctgaaattccaccattagagattagagatgagtaggaaatgctgaaaggcgaaggaggatctgaagaaattttacatttttttctcagtttgccaaaagtagatactccctgtatagatattcccgtataatccagggaaggtagtccaagaccgtggggcaattccaagaggtggttttgaagtccttcaactctaccattttcattttatccatactaaaaaagctacggcaggaagaaaagacaaaggacattcctgggaggccaactggacctaatcaaataaaaacactttagaagaggtacaagaatcagaaatcaaacctatctgcagagccaaaagccattctgaaactccgtgtcctagaaacaagggtttcccatcttttcaaatattttaagataaaaatcgcaacaccctataggaaaatggctatatttttagcaagaattggtggagaagacaaacgataataagctactatgaatccagaagctgcttaaatggccgtattcacagcagcccttgcaaacattaattagagtagtacccattatgggtgaggactttttttttaaccacagagaatatctgtgggtgcatccagattgctcagtggttccgtttaacccacccggtaactggcaatcatggccctaggacaggcttctccaccggggcgatgctgcctccaaggggcgcaatgttactttttatgcatcaagcacggataacacatacagcacataagcaggtcgacagtgtatctgcggtactgggatttcacggggaaaggagatggggacgtgtaaaaagcctttttaagagtcagataacgaaaaacggaaaaagaggagaaacacggtcctacaagggtcctgagctgaggccatcaaatgaatgtactgacaggtatttttctcccaggcagccaactgagagtcaaggcactctgaccgtgctatgactccggccacacagaaagaggtgttttcccctcggtggcctccaagcgcagcgggcactgcgtgccatccgctccctcaccgggcgccccgcgcggatgaaacggagcaactgggaaagagctctggaaactgcaaagcgctgcgccaaagcgacgggaggttcccattctcagctgtacgaaatcccgcgggggtcctccgcttccccgagcgacgccctcggcctccgcacttgttgcttctgcgccccgcctgcgtccccgtcaaacccacccttcgcggccccctcgcctctccacacgctcgcactcaggccccgaccctgccccgcgaccccctcacccacgccacgaagcccgctctgcgtggcagccccggagacagccgagcccccgcctccgccccctgcccagctcaggccgccagcccctgccagccgacgccgcggtttcctagacagccgcgccgccgttccgcagcctcgggggcgcgcgcgcgcggccggcgggaggcgagggcgcaggcgcgggctcggccaagccgccggcgcgaggcctcgcgcgcgcccccgagcgcggtgggcggaggggcggagggagcggcggggccgcgagggggcgggggggcggagaggggagccccgggagcgcgagccgcggccggcgccgctgcagagccgagcgaatcccgagcccgggcagcaggtatgtgtcctcgcagccggccgcggccagagcttcccctgcctcactgcccgagtcttgtggtcggggcggggggtggggggaccggtcaaggtttgcaggatgcgtgctcggaagggctgggatcttgccgctgacctt

SEQ ID NO: 14400 - DNA, 2300 bp, Homo sapien
ctggtgcccctagttggtactgtgcaactgactcttgccaataaaacgggggcagagcaatatcaccattttcagtcctggccaataaaaacctgctgtgcccaattccccagcctcactttcctatccactgactggagaagactccgaggacttggaggaagaaggatcggccgggcttggtggctcccacctgtaatccctgcactttgggaggccgaggtgggtggatcacttgaggtcaggagttcgagaccagcctggccaacatggtgaaaccccatctctactaaaaatacaaaaattagccaggggtggtgacacatgcctgtaatcccagctactcgggaggttgaggcaggagaatcgcttgaacccaggaggcagaggttgcagtgagccgagatcatgtcactgcactccagcctgggccacagagcgagactccatctcaaaaaaaaaaaaaaaaaaaaaaaaaaaaaagccacaaaatggaagcagcctggaggcctgagtgacttgtgtggaacagagggtccctccaccctgccccattgcaacctgcattggagtatgatgagagtgacaaatgtactcctcctgtgtcaggactcagatttctggatttgctggatgcaacaactggtgttactcaccctaactatcagtgactcaggcagatgcctctttctggcgcagggaaatggacactgaagccctgggtttctttcctagtccctccatgaaaaactacaggatctggccaaagaatagcctctctgagcctcagtctttccatgtgaagggattaatagtacccagcctgccaactttcaccagcaaaggaaaaatgagctaaaacatgacagtgcatttgtgaatgagcaaccatcatatagatacatttagtagttttttttgttttgttttgttttgtttttttgtgactgagtctcgctctgtcacccaggctggagtgcagtggcatgatctcggctcactttaagctctgcctcccaggttcatgccattctcctgcctcagcctcctgagtagctgggaccacaggcacccgccaccacaccgggctaattttttatatatatttttttttagtagagacggggtttcaccgtgttagccaggatggtctcgacctcctgacctcgtgatctgcccgcctcggcctcccaaagtgctaggattacaggtgtgagccaccgcacccgacctctctcttttttttaacccttactgaaagcctccagcaggccagatttaatttgatgcatatggcatccacacgatgtaggccttgttacctccaatttccccaatgagaagctgaggctcaggggttaaagggaagatgactggtcactggtggggctgaggtttgaatctggcttgctggctccccgaataagaggattctttccactcctccaagctccccgacaagggactcacctttcccaaggtctaaggatgtcctaaggggctcacaggtcccactggtctccttggaggctggaccttgagtcaccccggattgagcctcatatccctcagtattttgccaatgatctcagggtgaatggtgctgaggaagcagaacgtcagagaagagaaactaacttccacagtgggccaggtcagatcatactattttgtaccaaaagctgttaccaggcttaaacatgaaagagcgggtgtaacggagacttcagaatgtgtttcggaactagagcgagatcccacgcatggaggtacataaaacctcagaggtggtttcgtgagatgagtcagaagagtatatcgttgcattgatttaactgctgcatctaaaatggctttggtttctgaagcagccaagacagagagagagacaaggcatccacaccgtctctctgaagggcagcctctagcatcgtgactttggactccatctgtgtaccagcgagcctaactcgtcatgaaattctggccaagatccacccctcaccaaaaacaaacaaacaaacaaaaagaatggaaaagaacttccacctaaggaattgaggaattgctgaattcaggggtcagaagccatgtgcttctatcacagcagcggggagtctggaagggactgcagaaggcatggccagggctttggaatggtatgactgaccagcagagagacctcctcccctcccgggatcctctaggcacccctccccaagtaggaatctgttaagcatgaggtgtgtccacaaccagaagagatcataggaatgagggaagcagtgaagcctgtttcc

SEQ ID NO: 14401 - DNA, 2300 bp, Homo sapien
gaaggaaggaaggaaagaaggagggaaggaaggaaggcctctttaagtcttgtccatcaggacaaagaggaaagaggttttagtgaattgcggggaaatgaagactagacaagaaagtggcaactgattgaacagagtggggcatgtgtcactaaagtgctcacagaggaggacagtgagggaaatggggtacttttcccctcggaacccctgagagtctgggaggaagggggtgtagtgtgaagctgacactgggtgggggtggctaaaggtctgcatgcataatatttgagatcccaagacaccctcccaaatcctgcatggccaggagactgagctcccccaccctgcaagagtcaaggggtttgtccttgggagaaaatgaaccagggggctctgcatgtgggcactgggttaggcagggacctggggaaaggtggagggctgaaaatgaggattaaatgaaaatctttccccctaaaagtgggaccctctgccctattcccctgccctactcccagcacagaggcaaccaaaattatagcctcaggcaggaagctgaaaacctgcagtcccagagaccgaacctatagacactgacattgggaggctgtccagtgccaggttgctgcctggccaccctgttgttggtgaatgcttttagttgtatgtgttttacgttcataaaagtaaaatcaacaaaatattaaaataaatacacaataatatcagaaggtgataagttcaatgcagagaattcagataggctgatgcaactgagtgcctggggggctgccctaggtggtgggtcagggaaggcccctctgaggggggccaccgtgtgatctgggacagaggaagcagctgagaacgcggccctgagaccagcgcatgcttggtatctttacagaaccagaagaaggattgcgtcttggggtcaggtcacgggagagaggatgagacaagttggtcaggtgggcagggccagatggtgcacgtgctttgtaagccaaagctaaggagctcgggctgtctcccaggtggggtggcgaaccatcgaggtttatggacaggagtgtcatgatctgacctgggtgtgggagagtccccctgagtcctgttggagtgatggcagagggacacagaagccacggctgtaggggccagagctggcagtggaggtggagggaggcgggacagctgctggacttgggggatggatgggatgttggggtgggggaaagggaggaagcaaggaaggtgattgcatttttggctccagctaaaatgagataaaaacacttgaggaacaggtttggagagacagtgaggagtcctgctttgaccagattgattttgcaactcctgtgaaagtgatactgtcgtggaggcattggcgatgagagtctgacaccccagtttgaggggtcagggctggcgaggtgcatttgcgcggcattggtaagtaggtgacctcttaggcagggcgcccgggcgtggtatttctctgtccgccctcccgactcgctccgtttagaagcggtgcgaggcgtgcggggaacactaggtggcggtgaaggctctccttcccgcgagcccgcggccgggacctgcagtgtcagacctaaactcctcgttggcccagatgtcccatgaaggccttggcgcgtgaacagccatctcacccacaaacccaagaggtatctggaagcctttccaagaagctttccccaacagaaagtaaaacaaaattaaaatgtgtgcagcttttacaaggccaggttgctgcctggccaccctattgttcatgaatgctttcagctgtgagtgtgctttaccttcgtaaaagtaaaatcaacaaaacattaaatacacaataatatcagaaggtgataagtgcaatgcaggaaattcaaataggctgccacgccatctgggagaaagcccttaagaggaagcaacccaagtcctcaaagaggtgaaaaccccattttacagaaaaggaaacttaggctggagaggtgacgggacttgctcaaggccacagggccaggaagccacacggcttggactgaatcggtctggtcctgggtgcctcctcgtggagaaaacgagccagtgttcagaccagcgggcagtgacgccaggatggggtcccccaggctgggacgggggccctgggtgtcctgaggtttcctgttctgaaagaggctttcatgttgtcgagcaccccttggggtcacacatctgggcgaagagctagaactgaatttgcacccagggctcctgactccccgtcc

SEQ ID NO: 14402 - DNA, 2300 bp, Homo sapien
attatagcctcaggcaggaagctgaaaacctgcagtcccagagaccgaacctatagacactgacattgggaggctgtccagtgccaggttgctgcctggccaccctgttgttggtgaatgcttttagttgtatgtgttttacgttcataaaagtaaaatcaacaaaatattaaaataaatacacaataatatcagaaggtgataagttcaatgcagagaattcagataggctgatgcaactgagtgcctggggggctgccctaggtggtgggtcagggaaggcccctctgaggggggccaccgtgtgatctgggacagaggaagcagctgagaacgcggccctgagaccagcgcatgcttggtatctttacagaaccagaagaaggattgcgtcttggggtcaggtcacgggagagaggatgagacaagttggtcaggtgggcagggccagatggtgcacgtgctttgtaagccaaagctaaggagctcgggctgtctcccaggtggggtggcgaaccatcgaggtttatggacaggagtgtcatgatctgacctgggtgtgggagagtccccctgagtcctgttggagtgatggcagagggacacagaagccacggctgtaggggccagagctggcagtggaggtggagggaggcgggacagctgctggacttgggggatggatgggatgttggggtgggggaaagggaggaagcaaggaaggtgattgcatttttggctccagctaaaatgagataaaaacacttgaggaacaggtttggagagacagtgaggagtcctgctttgaccagattgattttgcaactcctgtgaaagtgatactgtcgtggaggcattggcgatgagagtctgacaccccagtttgaggggtcagggctggcgaggtgcatttgcgcggcattggtaagtaggtgacctcttaggcagggcgcccgggcgtggtatttctctgtccgccctcccgactcgctccgtttagaagcggtgcgaggcgtgcggggaacactaggtggcggtgaaggctctccttcccgcgagcccgcggccgggacctgcagtgtcagacctaaactcctcgttggcccagatgtcccatgaaggccttggcgcgtgaacagccatctcacccacaaacccaagaggtatctggaagcctttccaagaagctttccccaacagaaagtaaaacaaaattaaaatgtgtgcagcttttacaaggccaggttgctgcctggccaccctattgttcatgaatgctttcagctgtgagtgtgctttaccttcgtaaaagtaaaatcaacaaaacattaaatacacaataatatcagaaggtgataagtgcaatgcaggaaattcaaataggctgccacgccatctgggagaaagcccttaagaggaagcaacccaagtcctcaaagaggtgaaaaccccattttacagaaaaggaaacttaggctggagaggtgacgggacttgctcaaggccacagggccaggaagccacacggcttggactgaatcggtctggtcctgggtgcctcctcgtggagaaaacgagccagtgttcagaccagcgggcagtgacgccaggatggggtcccccaggctgggacgggggccctgggtgtcctgaggtttcctgttctgaaagaggctttcatgttgtcgagcaccccttggggtcacacatctgggcgaagagctagaactgaatttgcacccagggctcctgactccccgtccagtggcctttccacaaaggaaacacgttgtgtttcctctcccgggcatccgtgagatgggggccagactgcaaggcacctgagacgcaggatcgcacaggttggaaaaggctccgcaaccgtaagaagctcttgcgaaccgcgatgctgggagattcctaaggaatcatccagctgcgggaggctcagcccagtcctccccaccccgcccccatgcaggagcaaagcgcccagaggtcaggctggaggcccccgccggcccctcgccgctgattcagccttgcccgtctccctccgcagtttgagatccggcagctgcgcgcgcacctggcgcagcaggacctggacctggctgccgagcgcgaagcggcgctccaggccccgcacgtgctcagccagccgcgcagccgcttcaaagtgttggaggccggcacgtgggacgaggagacggcggccgagagcgtcgtggaggagctgcagccctcgcaaggtaagcccgggtctccacccggccccagagtgtcacggccggggatcc

SEQ ID NO: 14403 - DNA, 2300 bp, Homo sapien
agagttttgattatatattggatgatttaaataatttcatgagccttgagtttccttctatgatgacagttcacctaacagagtgttagaccatgaaagggtgtttgtcattagctagattttagtactctggccatgattgctatgttgtaacagatgggagttttgagaataagggtcacataatagtagctggtcgtgcggcctgtaaatgggtttggaatgagaaacgtctatcagaagaagccaaacaatttgctgtatgatagtccttcaccagctgtggttttgagataacacacttttatacttgtctgctagaattttaaaatatgtcattttttatgcacaaaaagaactcaattattgcttcttcttcccagaaaccatgcaggcagcttgttggatgggatatatttttaataggatagatatctgtgtaccatccaccctcatgatgtttagatagaagaccagatccaggaaaacatacttttaagtaccatggtaaaatttcttgaagatatgttaaacaagggataatgaaaatacaaaagacattaaattttgagcaatttagaaagttctaaaacttttaaaagaggcaaagtctgtataacataaaatttgtaagataatctgttcagccaagtaactattccagtaataattcctgaacagttaaagaaggtggttcaggaggaggattacttactgaagctagctttaaatactgacaaatctggtttttaaaccagattaagtaggtgcttcagaatgggcatggtggctcatgtctgtaatcccagcactttggggtgccaaggcaggaggatcagctgaggccaggaattcgagaccagcctggacaacaacgcaagaccccgcttctacagaaaaaaacaaaacataaaccaaaaaatgagctggacgcagtagcgtgcgcctgtagtcccagctactcaggaggccaaggcagaataatctcttgagcccaggagttcaaggttacagtgagctatgatcacaccactgcaagttcagcctgggtaacagaatgagaccctgtttccaaaaaaaaaaaaaaagaagaagaagaagaagaattaactgagacttggggaactgtgactttcccaaggattcctgctgctgaggacaaagttagcacatgcatctatttcagtacaagcacaagaacacacctttattttatttttgttgctttttaaatatgtactacacaggctgttcttcaggttagtgttattcttttccttttttttttttttcttttgaggcagagtctcgctctgtcaccaaggctggagtgtggtggtactatctcagctcactgcaacctccgcctcccaggttcaagcaattctcattctcatgcctcagcctcctgagtagctgggactacaggcatacaccaccatccccggctaattttttgtatttttagtagagatggtgtttcaccatgttggccacattggtctcaaactcctggcctcaggtgatcctcagcctcccaaagtgctgggattacaggtgtcagccactgtacctggccttactcttttttttatacaatatcaatttaaacaaaaggtgaaatgtctgctgtgaatttttttcttttatatacattaagtaaatgtatacaagcataatctttttcagtatttgagaattttaccacccttctaaatttgttctatcttttcttatctaaattcaataatccacaactgtcacacttggtaattgatgtttattaaatttcatatctcatagttcaatatattgcattaaggtggcttaatactgtaaaactcatgaaactcttaatgtagttagagtaatggtaagtactcaatctcaaaggctatttaaaaagctgtgcttgaagttgtgtatccaaaggtgcacacgaaatataaaatatttgaattaaaatttctacagaatatgcatttagaatatgtcattactgatcatttatagtcttccatcactatgtatgtgtgttaactcactgcttattttgcttttagaaccttttgcccagagtagcagccaaacttgaggttgccccgatttctgacatcattgcaatcaagtcacctgacacatttgtgagaactatttatgcaggtgagtactcaaggaagataattaatcaacatgttaaattttagtgaaaagcataaattaatcttgaagatagaattttaaatcaaaccatacaattgctttaagtggaccatcttaaaggtttctgaggaaaattt

SEQ ID NO: 14404 - DNA, 2300 bp, Homo sapien
gtttaagatgggtcctcacctccttgttcatagagctacaagagtgaagaagaggaaaggattaattcatcctgcagaattgagaaagagcttacaaaagaaatgtcacttgggccaggcgtggtggctcatgtctgtaatcccagtactttgagaggccaaggtgggaagatcacttgaggccaggagttcgagaccagccctgggtaaccctgcccctacaaaaaaaaatagctgggcatggtggcacatgactgtagtcccagctacttgggaggctgaggcaggaagattgcttgatcccaggagttcgagactgcagtgagctgtgatggcaccaccgcactccagcctgggaaacagagtgagaccttgtcttaaacagaacaaaagaattgtcacttgatctgggttttaaagagggctgtcagatggggaagggaatttcagacagagggaagagcaaaagcgcaaggcccttagagtgcttgttagttcagacaaagctcttgcttcagggaatttacactccaatgcagtgagatcagcaataaacaaacatgtgcatcctgttaggcagtgataaatgccaagaaaaaaaatcaaacaaggtgatagggcgtctgggagtggcatgggtgctattttaggtggagaggctaaggccggcctttctgcaaatgtgttttttgagcagagacctgaatgaagtgaggaagtacgccacgcgggtaacaagagaaggccatttcaggcagagggaagagccagagtgcaaaactctgagaggagcaggcttgtgtgctcaagaaggcctatgtatctggggaacagtgagagaagagggcagtgggaggagagggagccaccatagggctttgagcagaggtcatgatcagtccatcagtttggagaagaggcttctggaaacatgggcagaaacagaaagaccagttaggaggctttgcaatgatccaggcgagagaggacagggtcctgagtgaaggtgataccagcagaggagcaaaggggtgttggaggatattgctggattctggttatcttttgaaggtagagtcaacgggatttgttgatagactagataacattggaaaggtaggttgttgctgaattgggaattgagacaatttctgaacataccacttccctcttaaaaatttcgtgttaaagtccagactcattagcagtcatttattcatttgcttattcattcaacacatactgattgaatgcctagtatggaccaggcattgtgctaggtgttgcaggtagacacaaaatttaaaagtagggcatactggccgggcgcggtggctcacgcctgtaatcccagcactttgggagtccgaggcgggcggatcacgaggtcaggagatcgagaccatcctgcctaacactgtgaaaccccgtctctactaaaaatacaaaaaaattagctgggcgtggtggcgggcgcctgtagtcccagctactcgggaggctgaggcagaagaatggagtgaacccgggaggcggagctttcagtgagctgagctcgcgccactgcactccagccagggtgacagagggagactctctctctctcaaaaaaaaaaaaaaaaaaaagggcatactttctgcccttacagatcttcagtcagatgggtgacacagacaagtacttaggttattacaacccatgtgacaattgctaccatggggaaatacagggggaaataggggcatataggaaaggtatctaattggaattggcaaggctccactcgtaccttaccccgaggtcagctcagttttgaagttcactctagcagtgctgaccattgcggggctgtgagacagtacagtctgagctcggtcatcagcgggtggccagctttgtctctgccgctccgcggcccgggcttactcgaaggtccccggggaatagcctcacctttgccccacttcccagtctagcccctaacttcccgccgtctattggctgcgcagccgcccaatgggcaggcggaaaccgcgggctcgtgctcccggcctagggcgtcttatctcgttcgcgcgtctcgcgagcattaggtgactggctgaggcggcgccagttggccgggcacggggctgctgtaaggccgaggttgcggcggaagcggagaccatgttccgagcggcggctccggggcagctccggcgggcggtgagtccggactgggaaggcgaacccagggacggccccccgtcaacccgccgtccctatggggtcttgcaaagatcactggccccctcag

SEQ ID NO: 14405 - DNA, 2300 bp, Homo sapien
cccctcgctcttgtcccccatttacataaacacattcattcaaacgcagcatcccccaacccctgacctgcccgcacacactcagggtgagcgctctttgggggactgttgactaaagacgcaagaaatggcctattggccaacgggtggtaaactgtaacaagagccggtccggtggcccggcgcggtggctcacgcctgtaatcccagcactgtgggaagccgaggtgggcggatcacgaggtcaggagttcgagaccagcctgacaaacatggtgaaacccggtttctactaaaaatacaaaaattagcggggcgtggtggcgctcgcctgcaatctcagctactcaggaggctgaggcaggagaatcgcttgaacccgggaggcggaggttgcagtgagccgagatcgcaccattacactccagcctgggcggcacagcaagagtctatctcaaaaaaaaaaaaaaaaaaaaaaaaaaaaaagccggaccggtgagaagactagacctcctaaaggtggaggcggagctcaaaagccggacgctactggacgaggcttaaagcgctcgccccagcgcggggccggtgaggaacgttcaccgtggaccatggtcgaataatgttagcgtgcactcggggcctcgccctagccttctgcaaagcctcggcctgcgccctcggctgcatccgtttcgacgccaaccaacctcatgctcttagtagaacggcagtagcgaccgcgccctcaggcccacaagcccgaaggtctgggcagggtctggaatggcggtggagacactttatccgcaggcgtttcacctcgcgccccacccaggcgcacaccaagttcttggtactccttttaatgggaaaacaagaacagacaccatggttggataaatgttatttataattcatgggccggtctttgaaccctttcaaacaaaacccacagcgatttctttgaaagaatgcctggactgtgctcagagctctcagattttctcaggaccaacgagccgccgcctcgcagataccactgtaaattacccagcgccttacgttcgtttctgattatttgcattgcagtgggtttgttaatgaaggacaagagtttagaaaaatcttttattttggaagttggacacgcaatcgaccccagcagtgttcctaaaaggagctatgccatttggatgggggaaaaatgagggggcggggaagtccatgttacatttaaaacaacaacagcaacaaattaaaagcaaaacaaaacaacaaaaaaaaggaagtggagcaggaggaggaggtggtggtggaggagagggaggaggggcagcagcagcggcagcagcagcaaggatggagtcaggacccgtcccagtcccgggtgagcgcttttggatctgggttctggctcaacccacgtaatgccccaatctaaagttttctacgtgtgtgtggataggaaagtctaaatagagtttatcagaacccaggtggtcattctctacactctctctagcttggacccgaagaacaaaggcacatgagaggagaaaggtgaccagctggacgatgacggtcacgtccaaacggatcccccttgtcctcggctctctcgtcctgagagtgggtttaatttttttttttttaatttatataagaagggagctcttaaaggagagccatctccaccctcaggtatccatcacccagctccagcgcgcctgggaaaaccgccccgaaagtccaagaggaagctcagagttgtaacggccgcggagccagctcggcggtgacgcaaggtccagtccagattgccaggcccggggcatgagagaggatccttgtaggtttcggaggtgggggggctgcactccattgttcactccgggccaatcagggttggcccacttcctcccagccaatctcccttcacccccagcctccaacccaacccaccccgcccatcagcccctggatccccatcacctcccccgcatccccggcagttctggggaagcttcgtgacgccacaggtcccgcccccagctccggcccggggctagtgcgtgttgacgtcatgctgcgtgcgggccggtgcggaatcgctccttcaactccgcggggcagtaggagttagttagcaaagagccgaggccgggcgcgcgaccctcgtccttctgcccctggccgcacactttgcgcacatctctttttctgcatggtggatattatttttcattatccttttctgggtgctatgggtgatcattccaagagtaagtatttctgtg

SEQ ID NO: 14406 - DNA, 2300 bp, Homo sapien
agcccctttatgtttgtgttggccttgtgcactctgaaagatgaggcaggtggctggccaggctcacagtggtgcctgccttaggacttatgggcagccctttgtctggacaaaggtgacagaccaacagttattgacttagtaagagctccatcagtaaggcaaatggagagaacaccatagtgtaaatctgagatgtctcttaattatgcgtattttgttcattgagcaagactctcatattccatgatgactccactgactttggaaagctcaagcagtccaagtgacattttaccacctaaggcctaagagtgaatggtgggatgaaataaaactgagccctactctcatctccacatctttcaaaaagcccctcagacaaccctctcaagacaaccctactcaaaaccctgatcattaaggtcaggctgtttgcatttccagccctgccccctgccccaaagggtagtgcttagtccaattcagctgacggttcatctgtgctcatgacatcagactgccaccctctatgccacaagcccacctgaattagcccactgagtgttagtgctgtgggctggccccttcctgaacctcctgatcctgtctccacaatgtctaaaatgtggttggaaagacagcatagactagatgtcccattctggctcataaccaagccatggggtggtagggttgggggttctcatcagtcgtagtagactccttacctgtagcctggttaagtcctgtcatacgtggtccaatgggtaaagctccttagaactccaatggtaaccaaactgcctacatccatttgcatcttctgcaatccagggatttaaaagtaatggcttctggcaagtcatctcactacactgctggtcatctctgtaaactcgctctgtaaacggcagctgataactagctctgttccttgagggaaccaacaggtccctaaggggctctgcctcactccagtgaggttcaggagcccaaatggagtaagttccagttaagctcttcatgttctgtgctgatatgccaggcaccaggagttgtctttaacattgtacctgcaccagccaggctggccagtgtaatatttttcaattagcaaatcttccaataatagcgttttaacaatgaagatctaaagaaaaaacttgttcttaatttttgtccaaggaggggaaaaaaaaaaagaagacttctaataatcatatcatcataaattctaatgtggggaacatttggctgtgttacaaaatttgcagctaatagttaaaataaagatttaagtaaatgcctttatcaataaagtaaatgatagggcatattcttctcagccagagtcagaaatggcagcacatagccatgtgctgaattgtcacacagtgcaagtctttaaaattccttctggatttgaaggtattaacaagtccctatcaacagtctctaaaggcttttgatgtcattttagctattgaacgaaaatatgtgaactattactttgttgattttgttcttaaactaaactgcattatcatctgagagtgtgttcttaaagtattgttaaaagtactttgaaaacttgtaaatccctgtaatttatgttactcctgcctctgctgtttcattctttccttctggttttaatttgaatgtagtcctgtctgggtgtgtacctgtaaaattgtgtttttccaagtacaatttacagttctgaccttaggtttacagtgttcccaaccatctaggagcttcctcctataccacgaagtgggctttgggtcacccagctctttcatattagaactgtctaatcaaggttacttgaaacagatctaattttgacatttcttagtttatcatggaggcctagggagtaaattaagagggcttccctgcaagcccattcgttgcattgccctatttctttaaatgtacacagttgtaaacttaagactgcttcaagacaacagtctcatttatctaaacagttctccttttagactcagtggcactgatggaaacaaagataagaagtatagattggaggaaaggtcttttggagcctataactttttttgaaactgttcccattttccttagaattaccttttctttcttggacctgcctgcatacagaatagatctgtctgcattgagtgtattcagtgagctaagctaagggaagactgcagtgggcagggccttactttcttgtgagtgaactctttgcaggttttaaggaatatgactactctgctttaagggggtgtggggagcactttgtt

SEQ ID NO: 14407 - DNA, 2300 bp, Homo sapien
acattaactttccagtcccttttacaatattatgatgtctccttccatcttaaaccagttatgctgaatgtattatgtattttttgatgccttcagaaatgagttcctactacgatgttaaggcacattactattattaggtatgtggaagcagatttttaaagtgtagcatactaagtaaggataattggttataattaataagatattttactacaatacagtaatgctctctcaagaccaactgaaaagggttgagatacttttacaccaaatgattctaggcaactttttgaattctcatgtctgcttaaaataattttaattctcacgccttcacttactaatgtcagctggtgcttcttcctcttgtcaatttatttaaaccagcagtgtcttttctaattgctgatttcagtctactctaggccagaaagcccacttttattagacttgcttctgaaatgtgacttggtagattgagttggagcttggaagactttcttgtaagtaactggtgtggattttgtggaaaaactgggcactcggtgaaggcaagaatgtctctgatttgttcagtattccattcccagtgcctaacaccatgcttggctagagtagatgctcagcaaatatttgatgaatggactcatctctctgctgaaaggcccgcttgcttcttttcacgttcttgactgaattccatgtggtcacagttggaggaaaggtccctctgggtgagggaatcaggctgttttacatttatacaacgtgatagactctccatgggccctcctagccactccttggaattttatggagtgaatttgacagttgtcattttacaaatgtgaaatctgcaaactctctccaggagaatttgcatttttaatccagattcgtgatcactcactatcccacctccactttcctttttttttttttttaatttaaattttgggtaacaccaagtattaatattacaaatatatttgacataatagcatttctttcaaaaatataagaccagttttgcaaggcactcaaaacctgtcaaggctgctccagaaggcatccaaataaatggccatcctaagacagtactaatttagagtcatgtgttccaacagttcactcctgagaatctagtcccatcaccaacccttcctctctttcaagttcttacatctgataatttgagacaaacccttggcacagccagcacataaccaagaactggttatttgataccaagccaagaagagtataggtttttgaaaaaaagtcttttgtgttagtttaatctatgtcagttggtttgtttatttgaatggcagtatgtcatcctcatcttcatccgggctggcagagccatgcaagaagctggctggcagccagtcatggaagtgagttcaggcctagtgacagacagcccttctgcccaggaaggaatgggctcatgagtccagtgaccgtagatgggcctttgaggtgaggaagaatctagcatttggaataataagagattgctaagcccagctctaccaatgacgagctggaggacccaggacaagctctcttgaactttctgagcattagtttccccattgtaagagtatagtcatccctgtctgcccatttcagagtttagagacttggataatgtaggtagaggggctttatagcctactgagtaccatctctgccagtaacaggttttctgctgtgttaactgaggttttggcaaagcattgtcctagaaggccttgaattccttcataccaagtgaaacaccagttttgcccatacctgcaaaaggaggaggcttttccagaactcttataaccagaccagggatccctgagttggtgcccaggatcctgaggattgtaatcctaatttccttctagggtaagagacagcttatcacaaaatctattcttcaaggacttaatgtgcagacctaaggtgatgtagacaccattgaagccttcaatccaaaatctgccatctgtatttcatgagacaagatgtggtatgattctaccccaagtcaaggcaccaattagtttgttaactaggggccccctgtcactttatttcattcattccagtaactttgaggccctccttcagtgcctagcccccagcagagcaatggaggattcaataccaaaaacatagttcctgcccttctgtaacttgggattcagctacatatacttagttatgtgatagttgctgccatgtctttgggttgaacaagaaaggctgcctttggctgttctgcctgggaagac

SEQ ID NO: 14408 - DNA, 2300 bp, Homo sapien
ttttccaaattagaagctcagtctaggttcaaaatccatcagaaggccggctgcagtggctcacacctgcagtctcagcacttggggaggccaaggtggacagatcacctgaagtcgggaattcaagactagcctggccaacatggtgaaaccctgtctctaatgaaaatacaaaaattagccaggtgtaatgacgcacacctgtaatcccagctactcaggaggctgaggcaggagaattgcttgaacccaagaggcagaggttgcagagagctgagatcgtgccactgcactccagtctggatgacagagtgagactctgtctccaaaaaaaacaaaacaaaacaaaaaatccaacaaagaaaatgaatgggaggaaattagcaaagaaataatgcaagaaattttcccagaaatgaaacataaaactttcaagttgaaaagaccactgagttttcacacaataaataaaagaaaatctataccaaggtacaggaaatcagccataagaagattctaagtttctggagtttcaaagttctacagggcgtgcactgaagtattaggaattagagacttctaaacagccatgcttgaagtggaaaacaatggagcaatccttcaaaacttaaaggatatgggttccaaccaagaatcctatatccagccaaactatcgataaaatgtaaggataataaaagatatttttaaacatgcagaatctcaaaatgtttcttcccatgcactctttcttaggaagttggtggagtagaccctacaccaaaatgagagaactgtatggaaagaaaaggaagacatgtgatccaagaaataagggcatctaacctagagctgtgtagtaggcctagagagctaccagtctaggttagagaaagagggtggctgatttcaggaagaatgtctcctttggagaaggaaaaagaatcaggaatcactgatgtatatgaacttgacaggaaatttcattttgacaaaaaagatagacaattagtgatacataaataggaaattcaacatatagggaaaaatgattatctcagtgaaaccaaaaattttggacaaaagggtaaatattaagtagattagctgtgaatatttgcatagtcataatagaaaaaacaataactattactatgcagtcgatagtgctgtttaacagatgttctgattctttctctctttccaagtacatgataggatgacatttcctggctccctttgtggttgggtggactgtgtgactagttctggccaataagttgcttgtttttgctaaagatcccccttttggatccaagtgatcatttattcctctatctttggtagaactgatacagataaacagtgaaaatgaggcaaaggctggttgtcaccaagtaagtacatttgtggaatttaatattttaccaaatattgtcccattcatcttcttagttgaacttcagagttgtcctgggagctagggagatacagaaagcaaggaacttgtctcagatcatacactgcagagccatggtccaagctccaacgtttaataaccacgttacttgtaaactatacacaaagagagctgagtgtggcattatgtactagggaaagaactattttgccattttgtagtaggaaatgcaaatttcatcctgatagaggaattcaggttagatttttttaatacactgtaataagaaacagtgctgtcattttatctattttctgagttcatttaaatttttaatataatttattaagtattgaatacttacagcatgcctgtgcatgttctaagcattttatatgtatcagctcatttaataatcacaaaaattctatgatacaggtactctcattatccttgttttatagatgagaaattggaattttgaaatagtaaccttatccagggacatcaggtactgagggtaaagctcagatttgaacttgcagtctgatttcagagccaacactcttgaacattttagattgtcaaaattacttatgattccagaaatgttctaaactgtctctgcccatttttggtggttttattgaaacatatttactgtacttttttttcatctaggtttatgttccagatgaaaataatactattttggggagaaatacaaataaacaagtttttgaaggcttgacaactggacttctcaaagtcagtgctgtggttttgggctgcctgattgccaatcgaccagatggaaactgccagccagctaccccaaaaataccaacacaggaaatgaaaaacaaaccctcacaaggtg

SEQ ID NO: 14409 - DNA, 2300 bp, Homo sapien
gtctgatggctccctgaaggactgggtcaggtgatttgtttttatttttacctaactcagaattctcctagggctgaggaggccacctgagagatttttttttttttttaatttaaaggtaaatgtacttagtcactatttcccagggaaagggagaacagttggggtcaacagtagactaaccaaaaagcttagagagaaaggccagaaatagagatctctagggaataagggctttgtgaaagcaaaagagaagtaaagcttcacatataagggatccttagtatggttaactgctgatttctcactggagatgatggaggccacttggcaatgagatgacacactcagtgtgctgaaagaatttttttcagccctgttaaccaagaattctatatttggcaaagctttccttcacaaaagaaggagaaattactacattccctgataaacagtaactgaattgtttgtcactagtagacctgccctaactcattttacaaaatcagcataacactgctactaatgccacataaagacaacacaagaaataaaatcttcagaccaatgtcccttatgaatataggtgcagtattcctcaagaaaatattttaggaatgcagcagcatatttaaagattatatatcatcaccaaatgggatttattccaagaattcaggggtagttgacatagaaaaaagtcacacaatataatataccatattaatagaatgaaggggaacataaaccatgatcaactcagttcatgcagaaaaagtatttaacaaaatccgaccttttgtgataaacacacccaacaaactaggactagaaggcaactttcttaatctggtaaaggataattaggaaaatctcacagctgacagccatactcagtggcaaaagaatgaaagctttccccctaagatcaggaagaagacatgaaagtccactcttgccacttctcgccttgttgtaatagaatttctagtggcacataggcaagaaaaactagtaagaagtatccaaattggcaaggaagatatgaaactatttctattttaagatgacgtcttaaaacagcacgtcctcaaataatgttgtttcattataacattcatgaggaaaaaaaaatcaattcctggccagggccactgtctatgttgaatttccacattctccctgtgtctgcatgggttttttccctgtactctggtttcctcccacatctcaaagatgtgcacattaggttaattggcatgtctaaattataccagtatgagtgaatgtagatatgtatttgagtgcaccccatgatgaagtgatgtcctgtctaggattggttatggcttgtaccctgagctgctgggataggttctggcctatagactttgataggctccagagaccctgaactggaataattgggtaaataattaccttgttttcattaatttttcttaaatgtatatagagctcagatttatttcagtgtttaatattagaaacgtttcagtctttatttagaagtttggtgatgattttgtgaccagaaacataccatagcaaccttattcttgttaatattaattagcctatgttaaaattagttttgctataccttgttaaaattgcagtttcaagaacctatctactacattgaggacttactgtacttacagtatcataaataatacacacacacacacacacacaaatacccacacccaattttactgtgctaataaaggaatttggcaaagtttcaagaaacaagatcaacatacaaaaataggtcatatttctatatacaaacaatgagcaatccaaaaatgaaattaagaaagcaattacatttggcaatggcatctaaaagaataaagtaattaataatacatttaaccagagtggtgtaagacttgtatgttggaaactacaaacgttattaagagaatttaaagaagacctgaaaaattgaaagacattctgtgtttcatgctttagaagacttaatatttttgagatggtgatactcccaaaattggtatacagcttcagtgtaatccctgtcaaaattccaatagcctcttttgtagaaatgaacaagctaatgctaaaatttatatagaagggggcagccaagatggctgaatagaaacagctccactctgcagctcccaccaagaaggatgaaaatggcaagaattctgcatcttcaattgaagtaccaagattctctcattgggactgacgaggcagttggcatgacccatggagagtggggaaaagcagggtggagt

SEQ ID NO: 14410 - DNA, 2300 bp, Homo sapien
acatattttataagatcagtttaggatttaaaaaattacattcctcaagcctttggtcttatattaataaaatatgaaatgaaaaattctgctttaattatttatatttaatgcctaagctctttgtattttgttgtgaaacatgtgttttcagatataatatggaatttttaaacttcagaaaaattggactataagaggaatttttttattcactttttttttaatggagaaaattttctgtgccagatttgattgtttttactcttaagagtttttgattttttttggctaaccaagtttccacatattattcttgattagtcatgagaaatagctacaactatttcatgaatagtatgctcagacagtaaaggatatattttaaaatctaattgcatgactccaacagtctgcagtgtgcctgttatgtcctcctcaaataagggcattccctccaattcccagtttaccctcttcttataccacctaccccctcaaaaaaaaaagaaagaaatagagatccttttggctatttttaaaaggctttctttccctggggcagatagagcttgttgtggagatgaagttactattgtgcgctcagttaactattagaaatgttcaaatctctcttttgtgttccctgaacagaaattgctttgttattttttttctgctatcttttactgagcccttactatggctaaactctatgctgagaacttacctgtaattaataatttacatctcacaatcaactgaggctctttaaggtgaagtactttgcccaaggttatgtaagtagtaggtactagagcctagatcaatgtattccattaattatagaggagaggctaccgagaggttgtgagtgctatctggggaatgggtatggattcagagaaacatatcaataagatgaggaacatgttagtgacaaatatttcatgttgaagttacccagttttcatgatttatcttctggcttgatgatgatgatgatgataattatttagaattttatatatgccaggccctatggtaagtgcttttcatatattagctcatctgtgctttataatatcctaagaaatacatattattatttatcttctagaaaagtaaggcacagagaatgtaactaagtagcccagagccactgtgctagtgaataatggggtcaggaaacaaaaccagggaatctgacccgatatccactcttacacccactgtgctctattgtattacctctttctccttctcacaaactgtctttacttaattccatcatgaaagcttagttcagaaataaaatctattaactatggttttttcatcatattcaggtgtttctataaccatatattaacacaaggctttagaagtgattaatcagaaaacatatattaagttctgtattagtcagagttctctagaggtacagaactaataggatatatatgtatatgtgtgtgtgtgtgtgtgtgtgtgtgtgtgtatgtgtatatatatgtgtgtgtgtgtatatatatataaaacatatatatatatgagtttattaagtattaactcacacaatcacaaggtcccacaacagagtgtctacaagctgaggagtaaggagagccagtccgagttccaaaactgaagaacttggagtctgatgtttgagggcaggaagcatccagcacggctgaaggatgtaggctggtaggctaggccagtctctcttttcatatttttctgcctgctttatattctagcctcgctggcagctgattaaccatcacaagttcccacaaaacaagtataacacagtgtttgtataaaaaagcaagtctttactgaattatgtgtaacactggtaaatgactttcagaaaccagatatcattgctatttgatttttgtttaaactttaagaagcagagtacctagtggcaagcccatgtttctacttggcttgaacatgtaagtttggtgaaaggtatattactttgaatcatttttattttacacataattctaatattggaaacaaatatttctaacattaggaacgcaagagagctctagaggcagagcggcaggcccgtgtagaagaattgttaatgaagaggaaagaacaagaagcccgaattgaacaacagaggcaagaaaaggaaaaagcccgtgaggatgcagcccgggaaagagctaggtatctcatttgctatcttgatgaacattttgcactgagtgaatattcaagttgaggtcttaaagccatttactgtcatgtagagtttttttgagatg

SEQ ID NO: 14411 - DNA, 2300 bp, Homo sapien
tcccagagattctggtatgttgtatcttttgttctcattagtttcaaagaactccttgatttctgtcttcatttcattatttactcagaattcattcaagtacatgttgtttagtttcatgtgttgcatggttttgggtaattttcttagttttgacttccatttttattacattgtggtctgaaagtgtgtttggtatgatttcagttctttttgcatttgctgaggattgttttatgtccaattatgaggttgattttagagtatgtgtgccatgtggcaatgagaagaatgtatattctgtgtttttggttggagagttctgtagagatctatcagatccatttggtacaatgttgagttcaggccctgaatatccttgttaattttctgtcttgacgatctaacactgccagtggagtactgaggtcttccactcttattgtgtgggagtctaagtctctttgtaggtctctaagaacttgctttatgaatctaggtgcttctcctgtgttgggtgcatatatatttagtatagttaggtcttgttgaattgaatcttttatcattatgtaatgcccttttttttgtctttttttgatctttgttggcccaaagtctgttttgtctgaagttaggattgtaaccactcctttttttctgatttccatttgcttggtagatttccctccatccctttattttgagcctatgcatgtctctatgtgtgatatgggtctcttgaagacagcataccattgggtcttgttttttttaatccaacttgccactctgtgccttttaagtgggggcatttagcccatttacattcaaggttagcaatacgtgtgaatttgatcctatcatgttgttgttagctggttattatgctggcttgtttgtgtggccgctttatagtgtccctgatctgtgtatttaagtgtgtttttgtattggttggtagcagttcttcctttctatattttgtgctgctttcaagatctcttgtaaagcaggtctggtagtcataaactctctcaacatttgcttatctgaaaaggaccttatttcttttttgcttaccaagtttagtttggctggatatgaaattcttggttgaagattttttttctctaagaatgttggatataggcccccagtctcttctggcttgtagctgagaggtctgatgttagctttatgaggttccctttgtaggtgacctgccctttctctctattaaagctaccttcaacattttttctttcatttcaaccttggaaaatctgatgattacatgtcttgggggttgatcttcttgtgtagaatcttgcagaggttctctgtatttcctgaatttgactgctggcctctctatcaaggttgggaaagttatcatggatactatcctgaagtattttttcaagttgtttgttttctccccatccttttcagggatgccagtgattcacagatttgacttctttacacaatcccacagttcttggaggtttgttcattcctttttctttatttttgtcagtcttatttcagaaagccagccttcaagttctgagattctttcctcagcttggtctattctgttaatacttgtgattgtgttgtgaaattcttagtgtgttttttagccctgttagatctgttaggttcttttttatactgggtatttcttagctcctgtattgtcctattgtgatcttagtttccttggattgggttttgcctgtctcctgaatctcgatgatctatgttcctatccatattctctctttttttttcttttttttttttttttttgagacagagtcttgctctttcgcccaggctggaatacaatggcgcaatctctgctcactgcaaccttcacctcctgggttcaagcgattctcctgcctcatcctcctgagtagctgggattacaggtacccaccatcatgcccagctgatttttgtatttttgtagagatggtgtttcactgtgttggccaggctggtcttgaactcctgacctcaggtgaccctccttccttagcctctcaaagtgctgggattacaggccctattcatattctgaattctatttctgtcatttcagccagctcagcctggttaagaacccttattaaagaactgatgtggtcattttaagacatgtgacactctggtcatttgaattactggagttcttgcattggttctttcttttctctgtgtgcctttgggagcctcttcccagggaaactctgtgtcactaacagtgggtatgctcagccatggct

SEQ ID NO: 14412 - DNA, 2300 bp, Homo sapien
atggcagcagttttctaggggctcagctgggctggaatgtccaaaatggctcactcacacagtgggtagaggatgctgtcctctgggaattcagctagggcctgtcaaccagagtgctgcccatgtgtggtctctctacttgtggcttgggcttctcatggcatgacagctggattttaagagtgactgccctaagagggagcattctaagagactcaggtggaggctgcaaagcttctgatgacctagtctcagaagttatgcagtgtcccttctgccgcattttattggtcagaaagcaagttacagaggcatattcacggggagtggattacatgagggcatgaacaccagcaggtgtggttttctggggccaagggaggcatctttgaagactacctaccatacttgttaattcatatattattttttactcttacatgtttgcttcatttacttggattgttagctctttgaggacaagcacaatactttatatatttatatttttctttatattctcctcagtctcttacttgatgcttttgcacatagtaattgcctcgttaaatgtattgcgctttaggattccaggaatgctaaaagtccaggctggcaagaactataggagggcagggaggcacctactaattggactgggattttgggctggcccagtggtgaacttgtttcacaaagaggcaggtttcccacacagatttaaggattagataaggaggctgcatcctcgtgttcacatgggtgttttatgatctctttcttctcatagatacttggcttataaaaacagactattttgatatgacattcattagtggggaggcaatttcctttattttactggacctggctcccagctggcacagggtgttggtggggctgaatcttaggcccgtgttcttaggccaggcagggctagagcaagcaagaaattacgtatgttctgtgcaatagtttgagttttaaaaattgcaatttaaatttacctgttaacagcaattattatttgaatcctgataacttggagataaaattatgtagctaaaaatggaatgttgacttactttagcgcaatctctagagaattaaaaaaagcgttttccaaaatattttatgctgaagaggtcttttaggggaaatatataggatgtttgtgaaaactggtctctttcacacttggacttgttgatatgtaagggatggtgcagatattagtccacagcagtgttggtgctctttaggccactttttcaaaccttagattatatttattatttaaataatttgtttattttttagagttacaaaactcagtgtttttagatctaaaaaagacttgtgacttccttttctctgtttaaccacccaccacatcccaaattagttttaagtgttttctttctgagaaaaatgtgagaaataatgactttgttaaatatatattttgacttatctaataatctaataagtaccatcttttccatacataggcttcattccagcgctccaatagtcatgacaaagtaaggagaatagttgcagaggagggtcgtacagcaagaaacctaatagcttggagtgttccactagaaagcaaagatgatgatggtatgtatttaaaaaattagtttcatttttgttgtaaataaggagggtgtatttagtcctaaagagatagactgaaaactgtttgcaattagacttctagggctgattagtatgttaaataagaaatacttttttgttgcttttatacacacatggttttataaaagccttattgttagttttgctttttcagataatagtgaaatttgaaattgggtttattgtgttattatgaccagcagattaggggttgttaaagtgataagagatttagtgatatgtttaggctttgtctccccacccaaatctcaccttgaattataatccccataatccccacgtgtcaagggagagaccaagtggaggtaattggatcatgggggtggtttcccccatgctgttctcgtgacagtgagtgagttctcatgaaatgtgatggttttataaggggctctttcccctaagctcggtacttctccttcctgctgccttgtaaagaaggcgccttgcttgcccttctccttccaccatgattgcaagtttcctgaggcctccccagccatgctgaactgtgagtcaattagagccctttcctttataaattacctggtttcagacagttctttataagcagtatgaaaatggactaatacatttaggttttttctttt

SEQ ID NO: 14413 - DNA, 2300 bp, Homo sapien
gcatattcacagtagtaaagatatgaaatcagcctgtgtctatcaacagatgaatgtttagtcttcttttgtttcaacttgaagaacttcttttagcctttttgtaaggtgggatgaactcccatagcttttctttgtttggtagggttatgattttaaatagggccaggtgtgcatggtggcacatgcctttaaccccagcactttgggaggctgaggtgggtggattgcttgagcccaatagttcgagaccagcctgggcaatgtggtgaaactccgtctctgccaaaaaatacaaaagttacccagacatgatggtgtgcacctgtagtcccagctactcaggaggctgaggtgggaagatggcttgagtcagggaggcagaggttgcagtgaaccaagattgcaccattgcactccagtctgggcgacagagccagaccctgtctcaaaatgagtgaatgaatgaatgaatgttatatgggaaggcctcattgagagtgacatttgtgcaaagtgaattgggagtgttccacatgggaggtccaacaggtataaagccctaatgctagaatatgtctggcatgctgggaagcataaggaggccagtgtgattggagtacagtgaatgctggggagaaggggtgtatggaattggaaaattttggacatgataacctactgtgaggactttggcttttcctccgagtgagatggagagaggttggaggtttgtgagcagaggtagtacatttaaaaaaatataatagctttactgataaatgattcatttacaatataatttccccatttaaaaatggtttttagtatattcacagagttttgcagccatcaccataattaattttagaacattttcatcaccccctaaagaaaccgtgtgcttattagcagttactctcattttctcctaaccccgcagccttcagcaacctctgttttctgacactatggatttgactgttctggacatttcacgtatgtggaatcatacaatatgtgttcttttataactggcttctttcacttagcatgatgtttttaaatttcatccatattgtagcatatattagcactttcttccttttttttggtctatccatttttatgtccttttattcattgtgtgaatatacattttatttatccattcatcagttgataggtatttgggttgtttctactttttagctgttatgaataatgctgctgtgaacatttgcatataaatttttatccggacatatgtttactggtactgcattttaaaggagcatatttattgacaaaggataaatgatctagattttcttccagaaggaggtttggttccatttgctgctttcttttctttgttcactgactcttcatacagagttaggtcatttttgttgttgttgttgttgtttgttaagcaatttcccagtccctgtgttctgtctagtttccctgacttggatttctttgagtaaaagtgtggccacattaaataggttacctgaaaggtacgggctgttgtacttacagccttatgtaattgttaattaagatattctgataaaatcttagtttatgaacattcttaaggaaagttacacaggattttctatactgagttcagactcattagtgagtcagttcagtgaaagcagcatttaaaaactgaaatagaatacagaaggaaatattagagtacatctgttactttacaaaatttttaattcagttaaacgtgtatgaactgggtaagatataaaacatgtatgtgtttatgggttgtagtaagaaagtttggaacccctctgggttaggatgtccatgtaattaatactgtttcttttccattttatttttattttttggagagcactgaggtcttgttcagcatggaatatttaaagcatgctatattataccccaacaggtaatataaaggagcagttttttttgttgttgtttaatgtaagtgtggggatgagatttgtatctttttatgaataattatggttttctggtaatgttataactaagcgtatatatattttttattgtaggagtcatactccatgggtttatgtgataaatgatcttggcatagaagagaatttaaagaatgatggtaagtgatatcttaaagactagccttagtttttttgcctttctcttttcttcctttcttttatcttttttaatgtaatagttgtttcattcaagataccctatggaacacattgtcataaagcacagtgataaagtgagcagctatgaatgtactattc

SEQ ID NO: 14414 - DNA, 2300 bp, Homo sapien
ccgtctccctggttcagcgattctcctgcctcagactcctgagtagctgggattacaggcacatgccaccacgcccagctaatttttgttatttttagtagagatggggtttcaccatgttggtcaggatggtctcgatctcgatctcctgacctcgtgatctgcctgcctcggcctcccaaagtgctgggattacaggcgggagccaccagcccagcccaactttttttttttttttttttttaattgagatggagtctcgcactgtcacccaggctggagtgcagtggcatgatctcagctcactgcaaacctctgctatccaggttcaagggattctcgtgcctcagcctcccgagtagctgggactataggtgtgcgccaccgcacccggctattttttttttttttttttttgtatttttggtaaagacagggtttcgccattttggccagggtggtcttgaactcctgacctcaggtgatccacctgcctcagcctcccaaagtgctgggattacaggcgcgagccacggcggctggcccctagtgatgttggaaagaatggtttcagtggggtggtggggcagaaaccagagtgcagtaagtccagacttgagtagtggttgaggaattggaggcactcttgtttagataattggagaaatgtattataggaaagaaagcagaggttgaagtggagtctggtaggttcggcgggagatttcaagatgggagagacttcaggttgtttacatgcttatgagtatgaaaggaagtggggataattaagaaatgaggccctgaccgccttttatagaattgtagtatgctccctactctatcccccttatcctactcattttgttaactgtagtgcttatcatgttatataatttacttatttattgtgtttactatttcttgtgttaaaagcaaaatattagccaaattaaacagagtttgagcaaagaattattcccgaatcaggcagcctcctgagccagagtaggttcatacagactcccgcagagccacatggtggaaaaaggtttatagacagagaaagaaaagtgaggtagggaaacagccagaatggttatagctagacgtttaccttatttgaacacggtttgaacagttggccgtctttggccaaaacttggtgattggcgcaagagtaggttgcagtgtatttacacctccatttaggttatagtttactatttacggagaaaccttcaggctgaacttaaaatatgtaaggacacagcttttggctaaacttgatgtaacacttgcctggtttcaccctgctccaagaagccggaggttttttagagatttctgtttattttgctcacgtattaactccaagcatctagaataccatctgatatatagtatgtggtcaataaacatttgctgaataaatgaaaaagcgagttttctaagaaggcaagagagaaggggagccagaacatagccatatggttcctgcccccacaacgcttgtgagtccaggacttcccgcctactgcgggtggggagggagagggaagggtaaagagctgtttcccagctggatgaaaagggacggtgaatattcgtttgataattacagtctgcattgaatcttttttctattttgttcagactgatttaaacgttaaagtatttaattcatcatatgtttgtctttgaagtagatgaaacgtatttgttaggtctctgtacttcgaccttccaagcctggcacacagaagggccctgataaagcttctcggaggcctagttgtgttcagcgcagcccagcgtgctcctgtcaagtgctttcgccagcacagatttctgtgaggcgcgtctctaagtccttaatctgtggattgactgtggtgataaggcaggaggagggaagagattgagtacgagaaagacctgtgtggccaaaagcggcggtgtaagcttaacctaggaaaagaaacagcttcggaaacgccgcgccgggacatcgaaccaaatcaaccctcacacctcccgcctgggcgccccaacggcgcgaacgggcgtgcgcctgcgcgcggacaacacagatcttgcagccgggagcggcgcggcagcggctgagatcacgtggtgcgccgggaagccaccccgcctctccgaggcctccctgccccgccccgtcacgcccctttcccggcgggacgctttgagccgccccgaactaagcagggcggtcgggggtgagtgtccgcgaggggcgtgcgtagcgcagacccgggcgggtccgggttggg

SEQ ID NO: 14415 - DNA, 2300 bp, Homo sapien
tgaactgtatacttaacatttgtgtactttaggtaaattatacctcaataaaaatataaataaaaccaattttgctatatgctatgggcttttataggtcaagaaaattgatctttggattctcataacacatttttttaaacaggctacttattttagatatttatttttccccgagtagaatggattaattacaagtaatgacattggatcagtcttgcctcttttaagcataggcctttactgtaatctgcttccaaacaatcccaataaaatcgttgattttaagagtcaaaaagttgctcagagccttcttcagggactcttaactttttctgccacatggatcctttgaaactctgataaaagcaaagctatagacttcctccctggaaatatacacatgcaccaagattttgggataaacacaccactgaaaaccatgcagggaccacttaggaacccaaagatctcaaattaagatccactgagataacacaatccttttcctccagatgaaagcaatagacccagggagcgaaaacagcctgtttaggggctgaagacagaacccagccttctgatactgcttactccactgtctctttagatatcattaagttcccttggcccccaaaactcccatctgtggatcccctgagtttagaagaacttccacagtaccttgtagcctaccttttataactggagtcacgccggaagctggtcaaagtttaccttttacttattggagaacaacaggtacaaagcagagtttcttatattaaattgggacatttttctctttttttcctcaaaaccgagaatggaagtgaaaattaaaatccagcaataaagggttttctttttagtttaatgaaatcaactctaaaatttgcttttatttatattctgaaatttaaaactttgttcttcgttgatctttataacattggaaagattgaacttacactttgctctgtgaatctttcaatggtttgtgaccaaaccataaatttcaacccgacccaggaaatttctgcgacttgtgcccacccagttttgcagtttggaacagaattcttgctcccaatccaaatagagactgagagaaatgaaagaggacccagaaagccttttcttctctgtgaaaggcctgatcctaagtggcgcaatcaataaagaaaagggttcaaggtgcagcctacaaatttcttagagtttaatgtgttcaggttgaggtggagaaattacataaacctgtgaatagacatggaatagaagccatgtgtatatgcattctgtccctaaaggttttgctaggtacttactaagctattccttctgtgcaatcatctttcgtttttctacttgtatggatgaaagcctaccttcactgaacacttcaccttatgtgccagctattgttctaaacccattacattatttaatcttcacgacaattctttaaggtagtcttattactatgctcattttatagatgagcaaacaagttttcaggggtcaagaaatttgagcaagttcacattaacttgtaaatcacgaaattgagcatcagatacaagcatctggctgcacttcctgagtttgtacgtcctactctcataaaatagatacattgaagactgagaaagaatactgttggccgattcctcaggcaataattttttcgatattgtattgttgtctcagaaacctccagcctctctcattgatggacggtaggaggggcacatggagtggaccaggagtgggcaggagtggggtgggggcgtgcttttagaagcgtttcgggggaacgacaaggcgcgggtcgtagaggtctaccctctctgcagtcccagcatggctcctggagctctctgggcggccgctgaccccgacatcgcggcggcccgcccccagcgccgcgctgcccaatcagcggcgcggcctggtgccccgccactccgcgccggccatataggcctcctcctggcgcgcctccgcaccgcattggtggaccggcccccagcccgtccatgggcgttgtggccgccaccgcaggttccgcctcccgttccctccgccctcaacgtacgtcgcaccgcctctctgtagccgcccgcggagcatcgcagccggcccgggcccccgccagcctccctcctcgcgtccctcggtgtcctccgcgggccggcgcgatgcggctgggcccgaggaccgcggcgttggggctgctgctgctgtgcgccgccgcggccggcgccggcaaggccgaggagctgcactacccgctg

SEQ ID NO: 14416 - DNA, 2300 bp, Homo sapien
tagtgtggataaatattaataaatggtagcagttggaggggcaagcagttctgttttgatttaaaagaatattgaagaaagcatttacagttcacataaatttatatttaatcaactttttaaaactttatgcatttgttaactatcagctttagattagttaggattttattttttaaggggaaaatgtatcttttgttttctttttatttgggtcttcattctacagtggactaaagtgagtaaaaatcagtctttttactgcttgtaaatactaaaggaaaaacaagtagtgataatgagatttgggatcatctgtctattaagtatccccatttactataggaattaacttatcttaaaccaatgtaacttatctaaaaccaaagcatggtgtggtgtggtttcccttcctaggaacaacagagaagttaaatacagtattttaaaatcttgctggaattagattctaattatgttttctatttttattttttgttactcaaaagacttaattactatcccattaaaaaataagaagtgcatgttcctgtattcttagaagggggtgatgtaatagatggtgctgagaagaaaatcttcactttgaagagatacatgactcataaattgtttatgaacagttcttttaaaaggtgtctggttctaattctgtgttctccaccagctacttagaatgtgttgattataacactctgcttttaaaggatgaattagatgaatcttaacagcctaaaggaatagattgatcccgaaaatgaacacttcaatgggagtccttttggttatttttttttttgacagcctaggaatatgtctctatcttcatgaagttctaatcatatgtttttagaatttgctataagtaacttcctgtgtgtatgtgtagtcccagctgctcaggaggctgaagtaggaggattgcttgagcccaggaatttgaggccagtctggacaacatagtgaaaccttgtccctttaaaaaaaaaaaataacgtcctaaaaattgatgtggagtgtaaagatgaacccagaaaccatatgcattatttttctaaataaaaaataacggatgaggaatgaatcaatctcaaagttatagactaaacactataccataaataaaataatcataaaaagtaattggatatgtgaataaaataaagttttctataagaaagtctgttataactgacgaaagtcagcttaatatctgaacttcaccttttttttttttttttttttgagagggagtgtcgctctgtcacccaggctggagtgcagtggtgcaatctcggctcactgcagtcttagcctcccagattcaagcaattctcctgcctcagcctcctgagtagctgggactataggcacgtgccaccatacctggctgatttttgtttttgtttttgttttttttagtagagactgagtttcaccacgttggtcaggctggtctcaaactcctgacctcaagtgatccacctgccttggcctcccaaagtgctgagattacatgcgtgaaccaccatgcccagtctgaattttatcttatatttaataagttttcatatagggaataaagataaccctttcaggctgtgaaatgcctgaagaagcatttctttataatataaagaacagttatggtcaacacaggataattaaagtttggggatctatctggcaaaagttcaagtgttctttgtttttgtttttgtttttgttttgagacggagtcttgctctgtcacccacgctggagtgcagtggggcaatcttggctcactgcaacctcttcctcccaggttcaagcaatcgtcctgcctcagcctcccaagtagctgggactacaggcgtgtgccactatgcccagctaattttttagtagagatggggtttcaccatgttggccaggctggtcacgaactcctgacctcaggtgatctgcccacctcggcctcccaaagtgctgggattacaggcgtgactgctgaatgtgcatgtataagcagtatttatttatgtaagatataaccttgcatgtggctaatcagaatttttaatgcctagtcatttgttctagtatcacacattatatatttcctcatgtagaatcattagtctaccaaaagatggcagttttgttcctcacaagtttctgttgtaatctaaaaataaatgattatggtagcttttttattactgtacctaacactttttaccctctactagaatacaaagtttttatatacaagaaaaaaaaagagtgttgaagtt

SEQ ID NO: 14417 - DNA, 2300 bp, Homo sapien
ttcggacagatctaggaccaaagcccagccttctgcttattgcctgctacttgggtgcgttacttacactctttaatcactagtttgcccctctgtaaagtggggataatgacagtgtaactgaggtggtccgtgtgaaaagcagaatgatgtacccggtgctgggtaagtactccaaagccgaattggctgtctggtcgcccagcctggggacctgcaacaggtaagggtggaagggaggggaggaggaaggcctctctagtagagaattgcagagtctctccagaggttcctcacattacttccttccccagttgctccagcccgtcaccagcatggccctccatccggggctgccctggctggacaggtacagttgggaaaggaaggcctcatgtgtgggagccttgaggttggctttgagggtgggaggatttgcccaggtaaggaagatcaaggaaggcttgccagaagggaggctgggaacagagcaggtgggagtgggaaaggtgcctccagggagagggaagaggcctggctggagcagaagtctctgggaggtgatgggaaggacacctagagaggcagggcagggagcccagctgtaaaaatttctgccaataagcaggcaggagccttctgttaacagagggtctctagtctgctccagacctagaggcatcatcccatctgatggatggagaaactgagctcagggaggctgagccagtgctatcagaggtggtggtgccattgggaggtgaggtgcagcctggctcactctatggcctacaaagttcaaggggatttttacactattaattgtcttcagctgcaagtaacaaaaaacctgactggggcgccttacagattaaagattagctcaaatccaaggtttctggaggtgagggccttctgggggcagtcccattgctctgcaatcctccccaaagtgtttcctcttgggtggctatttcagagcctgggtgtgccccctctctctaaaccctgggcatgcataatgggcacttgggagctcaactatttcatctgcagcagctctcatcttatcaccccgtcagctgtaaggcagacatcagtgagggtggtgatttgcggacaatccctgactcaccccattttgccagcctgccctgggctcaggacttcctgctgcatcttctgctgagccggcagggcgtggcgtctcagggctggggctggggctctagtccagggctcttcctaaggtggtaccacacagtgcccccagcacctgcccaccaaactggaaattccagaaatattctcgacaccgtctactttccaaagactgggtgtggcagatgaggaagctgaggctcagcgagttggggggtctattaaggtccctcagcccctgaaaggtggggtcaaaattaaacaaaaactgggcctcagactgggtttccaaacaccccactctgtgccttgataatcctgtttctctctccatccattcccattcactgagccggaagcctccatcttcagaagggggttctctgccccaaacagcgtctaatctggagacttgcggtggtggcggtggtggtggtgggggcagtgccggggcctcaggctgttctccctcatcttgctgcctgctcaccttgcctctgtgtgctcacagccccccagagcacagctgtgtctgctcccagactatgggctccttgagggcaggacctggtttgggtcccagagcagccagggtttgatgaatgacagatgccctagacctgggtaagcccctccagaatgacttgctagtgcggggtggggagtctggcatctctgggcccagcctggaagggtgctggactggctggcgggtgacacacctggggttcctgggcccctcctggccacactgtcagtgggcctcaagctcccttagcatatggcctctggaataaagtgagcccgcacctcgggagggggcaagcagaggcaggagcaggatggcaggtggcaggcggggctgcacaggggagcacagcaactccacttcctgtgggcgagggccctgtgcctgccccgggggaggttgcacaaaccttcctgcgcaggcctcgggctgcctgcctgcctgcctgcctggcccggcccgagctccagcctgcctcttccactggccactgcctcccacccagggctggcatccctgctccctgccctgggtcccagactgtgtcctccatcaccgcagggtcggtgaggggctgggctggacaccagggcccgccctcccatcactg

SEQ ID NO: 14418 - DNA, 2300 bp, Homo sapien
gagggcaggcaggacgcagactggcctggaggctgggcttgggcctgtgaggatgggggctgagcctctcagggccttagtgatgagggtggtgccctgcacagggtggcagggcagcacacagatccgcttcttgcctggggaggaaggatcgttgtgaagtggccaaagaattgaaaatgaaaagtcacaactgagccttgaaggggaagaagctgtacctgaggctggggccaggctaggcctgggtgtcctggccataccacttcccatctctgtgcctcagtttccctctcacaggatgggacacatatgtctacctcccaagtgctgggagctcagcccaagccatgcgcccctcagtctccacagacagggctccagctctggttagcagctctgctggcagaaatgtagcgtggctgcccgtgccacctgcccatctgccagctgggctttcaggattctaaatgtggggttctgagcagacagggggtccccagaagccagcccaggcttgaggtgccggagcaggcaccctctctgagctgggacgtgcccgcagagcctgcagagaacctgccaggaaggagggaccccggccctgctattttgggccctcctgtggccagaggagctgcactggctgcaaaggctgttttggacagagcattctttctccaagtggccagggccccgcaggcagagcgctgtgttgtagtgtgtgccatgtgtgtctgagcctgtgtgtgtatgtgcgtgtgccacagagcaaggacatgtgcttacaggatggtgcacacgtgcctacgctcccctgcatatgcctgtgagcatgtgtccttgtccagccctgtgcacttgggtgttttgtgctgtgtgtgtgtgagtgcctgtgcctcgctggtctcccagctggcacagaacccctcccctgagaccccaggcacaaactggctcagttctcctcctacctcataacccagtcgctgtcctggctgttttgccttctctatcagaacaggaagcctgggaggtgaggggaggctttggccccagacctcggcacaggggcccagtggccactgtgcctgcatgtggcctgtggttgtgtgtgggtgactgtgggagtgtgtacttgtgagtggcatctgtgggtgtgcacaggaatgcctgtgatcatgcgtgtgggcagctagggatggggcctgtgtgcctccgagttaatgtggaactctgcatgtatgtgtgtgccagagtgtacacacacgtgtgagcgactgtgatgcctgcagaggctcagggatgcaggatgaacgactgtgtgcgcacgtgtgttggggtgggaactccccagctggagacgaagctctggccaaggtctgcagcaaggacctcacggcacacccatgccctgtgattctctgtggccttccattgtgagggtcactgtgaagcagcaggctctgggggagggagggcagcctgtcaccctctctccagagccaggagaggtgctgcgcctcatcccagggacactccgtcctcttggcctaggggagcctcccgaggccgcggccctcggctcagaacctcgtgtcccctgcagtatgaggccgtcatggaccgggtccagaagagcaagctgtcgctctacaagaaggccatggaggtgagcgccagggcctggggccgcggccttccctcgaggagcagcgcaggtctcagggtgcgatcctgggctgtggccccgggcagggcatttggaacaggctgacctcagccttggtcctcggacctcggccttgggcgcaccagcctgcggggcgcttgggcccgtgctgggcgctatggccccgtggggatggtcccgggcccttcccttgtggggctcgtgaatgaagggcagatgaagtcagctggggactccaggggtggagggaggagggacccctgagcttgatcctgcgagacgctggacaggaagggagaggggctcctaagagggcgcggcgtggcgaggggcgtggcgaggggcgtgccctcgccgaagagcacagcccaggaggcggggcccggggcaggccgcgctgtcctcagtggggagggcctgagagcaggactaccagcagcccccacgccttctctatctccttccggacccccagatccctgtccctggtgaggatgcccccactccacccgcaaccctcgccagggaaaaagggaggctgggctaagggagcctcactcccggggaccacagaacagggctgtgcagcccccaagtcacgcccctc

SEQ ID NO: 14419 - DNA, 2300 bp, Homo sapien
tcctttcagtcttcacagtggagaactcttggccaaaggtttttgcggggaggaggaggaaaccagctttctggttaaggttaacaccagatggtgcccctcattggtgtccttttaaaaaatatttactgtagtccaataagatagcagctgtacaaaatgactaaaatagattgtaggatcatatggcgtatatcttggttcatcttcaaaatcagagactgagctttgaaactagtggtttttaatcaaagttggctttataggaggagtataatgtatgcactactgttttaaaagaattagtgtgagtgtgtttttgtatgaatgagcccattcatggtaagtcttaagcttgttggaaataatgtacccatgtagactagcaaaatagtatgtagatgtgatctcagttgtaaatagaaaaatctaattcaataaactctgtatcagcccccaacatattatttttcattatttgggggatatttcagttccagagcagcagtatcatgttttctttgttggtgctgtctatagttcatcatggtttacgtgtgttttcgttatagctgttgccagattctaaagggcttgatattcaaaaaaccacagatgctttcagtccagtatatcctagaaatatagagctctactttgtgcaatgcactggggatacagtggcgatactgtccttgtcttcaaggagttcggagtcctagtataggagacatacataggagaagataattttcacactgcagtggttgtagtaatagaatgggagtccaaaggggagttccggagaggtcaggggtgacttcctggaggagatgcccaagcttggaggctggataggctttgttgaaagatggtacacaagagtgtgaaacaaaattgtgtgtgcagggagcttaaaatacaaggctggggaaagaagttggagaagcaggaaagcccaggccctctagtgtcttacggaacatcctgtggaggtgagagctgacttgtaggtggaagcagctctttggaggtttgatttggaaggtgaactgagaagaaggtggtgatgcaagccggccgtgctgaagccaggatgaattggtgtgactgggcttcagttaggctggcatagcagttgagagagcttagcagtgggcagcagggcactgttgggggcggtggtgagcggtggattctggctgtttggaggcaggacagtggtggaattcgatcattgattggacgtgggacagagaagggagaagagaagactcatctaggatgagtcccaggtttctggctcagtcaactggggaaacaaagtcacagagctagggagtagttagagaacacatctgggggtgtgactcatggtcagttttgggctcgtcagttttgagatgcccaaatatcatgcagatctgtcccacctgaaaatggagaagacacgggaaaggagaggagtaaaaactaactccttttcacaaagtggaagttaccagaatgtgatttcagaggccccgggggatttatcatgtgactactgacccatcccacctcttgcccctgcctgttgcacagtgggcaagaatgtttgtgacctttcactaccaccacctcccccgagcatggtccccccagttttcaatatgaaccatcctgtgggtaccctgtcacaggctggccctgaggtgagcaatatttggactgtgatgttggttgttctccactctttctacaggacagaacagggcctctagagtgggaaatggctttgggaaatatgccaagcagtagccttgttcttcaacttgcccaagaggataattctccacacccttcctgtactcagtcctcagtttgcctggtgagagagcagcctcctcccgtgtgctctgccagctggacccagactggccatattaccagtgagaccaaaaagatggaggtggggaggtagctctgaggtctgggaaaccattccagctcctgccagttttaacttgtgtttaattcctggcacagttgtcctggaaatgcctttttctcttgcctgggaaccactagaaggggatgttgtctgtgttggccagggccatgcaaattcaacatcttgtttctgcccttcccccgtgtagctgaggctaggtgttggcattacccagtgcttgttcttcagagagcaaaagcactgctcgtcatgtctgaaatttagtgagtgagctcacccactaggctggtgtttcctgcccgtggctgcacattggaagcaccggggcactttgagaactacagat

SEQ ID NO: 14420 - DNA, 2300 bp, Homo sapien
tttatgggttatagaggtggggcaaggaaagttaatcctcagatgtttgaccagaaaaattagatgtctggtaccttttgctatgataggaatgtaagggaagattagatgggctgggcaggaaggcagaaagggtttgagacaggttgaggatgacatgtctctggaacttgcagatggaaatgtgtagttctgagatgatagctcaggtagtgagctacaatgactaatgaagccatagctgctgtagcccacggagagcccagagaatgactaaagaataaggccgaagacagaatcctggagatcactaacatctcagagtccgtgaagagaatgaaaaagtgagcacctggggaagtaggaagaaaaccagcagtggggcctcttggaagccagaggaagagagttttaaaacaatgtttttaaaaattgccttcattattctagttgtcttctcactttaaaaagttcatgttacattttaaaaaatcaaattactttcccaaatttacataaatggagtctttttcttcctcatctgacagtgatcctaatggcctagtgtaaaaaaatatactgatgatccccaagcttactgaatttcataaacttaaatgatctgggttttcaggttcagagaagttaatgatatttccagtatcactgtggcagctgtttctagtttgaagatgatttatatgttaaattttaaaggatgatgaaatacttcttgtgaaagtttcaaagtactctacaaatgataactcattgttatccaagtgataaccaaatgttttaacacttactctgacactgcatttgcttgtttgtatatgagccagtggcattgggctgtcagcacagagctggtacccaaagatagcaaaattgacaatagcggagaaagtaagactctgcagctggagaatgatgcctggagcagcagctgaaataagacacacctatcacttgtctttgtgtgttcactttccctttaggtctttaataccttgttactcagagtgcgctccaagaagaagctgcaccagcatcacctgggaacttgttagaaatgcagactctcaggctcctcctcagacctcctgaatcaatctgcttgttattcagatcctcaggcaattcctattcacttcaaagtttgagaaccaccattctaaagaattgatagaggacttgcagtgttctttaatgactgagccctctagctttgccatttcactgtctctaggacagcaagatttttggaagtggggtgggtatcatgcttactagttggtgtattttcttttccttgaggtggggtagatagagattagaagtgtagattctggagtcagattgcctgagttcaaatccaagctctgtcatttctaccaaatttccccacttattgagggcaactgtagtgagcaaagatccccctaccaccatactgatccgtattggatgtggaattgagctacagtaagcctttagggatgtgtaggtgtgtgtcatcatcattgttattatttggttatggtttcttggtcctagctgaaccatcaattcgtgaaaagtaggtgaagtgtggataactttttaattttatctagtatagaaatgctcttaacaaggaatcatagaattttcagctttactgaaaaaagtctataacagttacggtaactctcattaaattataccatactaagcaataataggaaatttttaccagcagtgcttagagaccagtactgactttgttttctacagggggcagctggcattttatgctatgtgggagcctatgtcttcatcacttatgatgactatgaccacttctttgaagatgtgtacacgctcatccctgctgtagtgatcatagctgtaggagccctgcttttcatcattgggctaattggctgctgtgccacaatccgggaaagtcgctgtggacttgccacggtaagatgtgttgtgagaacatgcaggagtatttagtctatgctactctccttgaacatgagactccttggctcttatagttggaacagagttaacatttaaacttctagcaattatctctgataactttttttaaatcaagagtgtatttaaagttattttttcatttgtatataattttaaaccatgttttcttacagtttgtcatcatcctgctcttggtttttgtcacagaagttgttgtagtggttttgggatatgtttacagagcaaaggtatgttgtctactgtaattcacataatgccttaaaaggtggtttaagtgtttc

SEQ ID NO: 14421 - DNA, 2300 bp, Homo sapien
ctcaacaacaaaaaaaagtgagtgggaagcaaaagagtcaagggcagaagtccagccccttgctacaaagaggggcccagctgcacccccaccacctggagtctgcatcctcaggtgatctgtgcgcaaggcaaagtctgagaagcactggatgagatgactcttttaggaactttggctaagagaagaaagaaaaagtaaaacatggtgtttaagtgagaggcttttctttttaggataggagaggcatgaccatgcttgtaaactcagaactgtggtttgcagccccaacagcatattcgaatcacctggtgtgtttttgaaaaacacctgattccctgaggctcgcccccagagaatctgatggagtttgtctgtgtggcccagatgattgtaatgtggggggggggggggtctgagacccactcaaggagaaggcacaagaaggacttgatgagaccttcacagggaaatgagaagggacacgatgaggatgaagaaatgcaaaggggatgttttggaaaaggaggaaaagcactcagagcaaagcagacagagaaatttacagagggcagaggcgtcaagaagatagatgttcaaagggaatcatgtttgagagcccatcatttttctttctttaactaggacctccatggtatggcaagaatggcacttgaaacacttagatggtgttactggtctgctcaaaggcttctgcctggcgtagtaggctgttggtgatccggcctcgctcacctccagcacactaggctctctgtgttccccttcctacagcacagtgatcatgttccggtctctgggcctttgtccttgctgctctcatctttgggctgttcccctcacctcccttgggtcccctccaatgttctctcctcagagaggactcctctcatcactctattcctttcctctgaattgtttcctaacactacctcatgtcatatacccacttgcccgtttgtttatggtctgcctcctctgcccgaacgaatgtaagccatggaaggaaggatacgtcttgctcacagtggaatatccaccaccgacaacagtgaggcccagaggggacacgcggcaagtttgatgagtgaataaatggctgttgctgctgcttggtgtaaatgcacaggatgctgagattaacaggtacttctgagagtgcctgggaaaggtgatgagtgggggagattgcatgagagcgagctgataaagaccagtaaatggaaatccttacgggcgcggtcaaggagggagtgcaggattataatggcaggaaagacagcaaacagaggcagtttattgtgtgactgatgatgtgttttttgcactagaccacttactatgtgtggctctgggcgaacttcttaacctttctaagcctcaattacccgatcagtaaaatgaggctgataaccatagtgccttccatccagggttgtggtgggggttaaatgaactaatggagcctggcaccgggtgagcacccaataattaattgctatgacggattcaagattgggggaagaatgtgaaatgttgcaatgcaaagagatgtttctgtaatcgttgcgaatcttggtccaaaacttactaccctggaatagaacttgttcccaaccactcacccacacaaacatgtctctgccttgctaacgccatcaccagccttttctcctctctgactcttctgaggtctagcccagcgcctggtacaataagtttctccataagtatttgttgtttttctttgcacttctcaccaacagtgctgccaagattttaacctggtcaggagaatctggtcaggcagagattagtgtctccaaccttcctaggggagaatgggctaggtagaaagatagcactcagagggctctgaatcatctataagggtggcatagtcataggaggagagtgggtttggtccaccagaacctccctagggagccatctgcgtccaagggcggccagaggccaagaaaaggcgctgaggccttggctcctttaagaggcgtggcctcactgcagcctccgcagaggcgattggctgaagctaccggccgcgtggggcgggactcggttgccagggagcggcgcgggagccctgaggggactgcggcggctgcgcggaggagcgaggcacttgctggggtcggggctgcgcgacggcgcaggggctgcggggagcgccgcgcaggccgtgcagttcctagcgaggaggcgccgccgccattgccgctctctcggtgagcgcagccccgctctccgggccgggcctt

SEQ ID NO: 14422 - DNA, 2300 bp, Homo sapien
tttactgaacatgtttggaaacctggtgaatgcaagaattgctttaaacctaaaagtttgcaccagcttcccccagaccctgagaaggcacccatcacccatggcaatgtgaaaactaatgccaatcacagtaacaaccaccgcatcaggaacacgggcaatttccggcctcctgtggctaaaaaacccactatagctgtgaagcccactatgatagtggcagatgggcaaagtatatgtggtgagcttagcatccaagaacactgtgagaacaaacctgtcatcatagggtggaaccgaaacagagctgccttgagtcagaaaccacttaacaataataatgaagatgatgaaggaattagccatgttcctaagccttatggcaataatgatagtgcaaagaagatgtcagataacaataatggactaactgaagtgttaaaggagatagcaggcttggatactgcccctcagataagaggaaatgaaacaaactccagagaaacattcttgggaagaataaatgattgctataaacgatcattggaaagaaagcttccaccaagttgcatgataggtgggataaaggaaactcagggcaagcatgttattctgagtgggagcacagaagtgattagtaatgaagggggccggttctgttacccagagttttccagtggcgaggagagtgaagaggatgtacttttcagtaacatggaggaggagcacgagagttgggatgagagtgatgaagagctgttggccatggagattcgcatgagagggcaacctcgctttgccaacttcagagcaaacacattgtctcctgttcgattctttgtggacaaaaaatggaataccatccccctgcgaaacaagtctctgcagagaatctgtgctgtggactatgatgacagctatgatgaaatcctgaatggttatgaggaaaattctgtggtctcttatggacaaggaagcattcagagcatggtgtcatctgactccacatcaccagattcttctttaacagaagaatcacgttctgagacagccagtagtttatcccagaagatttgtaatgggggattatctcctggtaacccaggagattctaaggacatgaaggaaattgagcccaattatgaaagtccctctagtaataatcaggataaagattcatcacaggcttccaaaagctcaataaaagttccagagacccacaaagcagtccttgctctccgattagaagagaaagatggcaagattgctgtacaaactgagaaggaagaaagtaaagcctctacagatgttgctgggcaagcagtaaccataaaccttgtccccacagaagagcaagcaaaaccttaccgagttgtgaacctggaacagccattgtgcaagccatatactgtcgtggatgtgtcagcagccatggccagtgagcacctcgagggccctgttaacagccccaagacaaaaagctcatcctctactccaaactctccagttacatcatcttcattgacaccaggacaaataagtgcccatttccaaaaatccagtgcaattcgataccaagaagtatggacttctagcaccagtccacgacaaaagatacctaaagtagaactaattactagtggaactggaccaaatgttcctccaaggaaaaactgtcacaaatcagcacctacatcacccacagctacaaacatttcctccaaaaccatccctgttaagtcacctaatttgtctgaaattaaatttaatagttataacaatgctggtatgccaccttttccaattatcattcatgacgagccaacttatgctcggagttccaaaaatgctatcaaagttcccattgttatcaatccaaatgcatatgacaatctagctatctacaaaagttttctgggaacaagtggagaactctcagtgaaggaaaaaaccacaagtgtaataagccatacttatgaagaaatagaaacagaaagcaaagtgcctgataacaccactagcaaaaccactgactgtcttcaaactaaagggttttcaaacagcacagagcataaaaggggctcagtggctcagaaggttcaagagtttaacaactgtctcaacagaggtcagtcttcaccacagagaagctatagttccagccacagctccccagcaaagatccagagagccactcaagagcctgtggccaaaatagaaggcactcaggagtctcagatggtgggcagcagcagcaccagagagaaagcaagcacagtgctttctcagattgtggcttc

SEQ ID NO: 14423 - DNA, 2300 bp, Homo sapien
tctaaaacattcaagggtaggtggaagaagaggaatctataatgggctgggaagtgttagagaaattggtggataacagaaggagtggtatcaaaggcatttctgggagggaaggtcacagaatcattgcaacagagacatcaagctgaagattatgtatggatagataagagtgcataaaattatagttaaaaagctcactttccaaatgctgattggctaaagggaaattacaaagtacacaaattagtttagctctcagtcttttaatttaaggaaaagtttaggaatggagtcagttttttcaagtcactaataatggtaagtctcatagtgcctttttcattcagattttttgtcttcttttcccctccacagattgatcattcttagaagagctgctgtaacacataggggaagtgaaaactaacagatgaaagttttgtcatgcactgaaagaaaagcattgtctgtgaagttctatttttaaaaatgtctgcttgtaacacctttactgaacatgtttggaaacctggtgaatgcaagaattgctttaaacctaaaagtttgcaccagcttcccccagaccctgagaaggcacccatcacccatggcaatgtgaaaactaatgccaatcacagtaacaaccaccgcatcaggaacacgggcaatttccggcctcctgtggctaaaaaacccactatagctgtgaagcccactatgatagtggcagatgggcaaagtatatgtggtgagcttagcatccaagaacactgtgagaacaaacctgtcatcatagggtggaaccgaaacagagctgccttgagtcagaaaccacttaacaataataatgaagatgatgaaggaattagccatgttcctaagccttatggcaataatgatagtgcaaagaagatgtcagataacaataatggactaactgaagtgttaaaggagatagcaggcttggatactgcccctcagataagaggaaatgaaacaaactccagagaaacattcttgggaagaataaatgattgctataaacgatcattggaaagaaagcttccaccaagttgcatgataggtgggataaaggaaactcagggcaagcatgttattctgagtgggagcacagaagtgattagtaatgaagggggccggttctgttacccagagttttccagtggcgaggagagtgaagaggatgtacttttcagtaacatggaggaggagcacgagagttgggatgagagtgatgaagagctgttggccatggagattcgcatgagagggcaacctcgctttgccaacttcagagcaaacacattgtctcctgttcgattctttgtggacaaaaaatggaataccatccccctgcgaaacaagtctctgcagagaatctgtgctgtggactatgatgacagctatgatgaaatcctgaatggttatgaggaaaattctgtggtctcttatggacaaggaagcattcagagcatggtgtcatctgactccacatcaccagattcttctttaacagaagaatcacgttctgagacagccagtagtttatcccagaagatttgtaatgggggattatctcctggtaacccaggagattctaaggacatgaaggaaattgagcccaattatgaaagtccctctagtaataatcaggataaagattcatcacaggcttccaaaagctcaataaaagttccagagacccacaaagcagtccttgctctccgattagaagagaaagatggcaagattgctgtacaaactgagaaggaagaaagtaaagcctctacagatgttgctgggcaagcagtaaccataaaccttgtccccacagaagagcaagcaaaaccttaccgagttgtgaacctggaacagccattgtgcaagccatatactgtcgtggatgtgtcagcagccatggccagtgagcacctcgagggccctgttaacagccccaagacaaaaagctcatcctctactccaaactctccagttacatcatcttcattgacaccaggacaaataagtgcccatttccaaaaatccagtgcaattcgataccaagaagtatggacttctagcaccagtccacgacaaaagatacctaaagtagaactaattactagtggaactggaccaaatgttcctccaaggaaaaactgtcacaaatcagcacctacatcacccacagctacaaacatttcctccaaaaccatccctgttaagtcacctaatttgtctgaaattaaatttaatagttataacaatgctggtat

SEQ ID NO: 14424 - DNA, 2300 bp, Homo sapien
attcttcttggtctaatcctaagtatgtgctatattaatatattagagcaatattgctcttacttctacttttcctgtctgtatgttgttcattttcatattatgggtagaaaaccatcagcccctgtttgatcttcctactatagtcaatgtgcctctgtgttacttatactactccaccccccttatttgtttagggatatcatgtattagaaaatgggatgatttaatggatgcctacaaaatatgtaataagaatggtaaatttgctgaaaaacaagtaattacaaaatgataaacttattctagattgccatttttgtttttccagtctagtaataaatacaagttctcttcctttgatatacatcagaagtacctgaactgtttcagatgtttgagccccctctcagacctgctggcttaggatctatgggaatgcaactcatgcatctgtattttaataaagattacagatgattgtgacaggcactaaaggttgaggacaactgccatatagtaaaatagaattgtagactctggagctagatagatctaagtccagagttcagacataccatgatctaagtgtatgatccagtcctaggtctatgagcaaatcacgaaatctctctgaacttcagtttccttgtctataaaataggggtggtaatacgttataaggaagtagagggattaaaggaaacagtagataaaaagtgcctggcatatgttaagtggtaactattgttattctggtagcatgacattatcctcagttttcatcttgacttatgaagagtgaggtgtttctcacagtagctcttttctgcatccagaagagtatgcagaacttctcaagctatcttttcgtgagacagatttattttgggctttgaactttcctccaagtttttatttggactattcagaaaatagtgtcagagaaaatacatggcatctcggttttcaaattccacaacactctctggagtggctaattatttctggaccctgttacaaagttattcattgtcttatgttaagaacagatatactggtatatcatgaacttgggacataaacttactagttgcaaaaccatagaacaatggatttttgtcagtgaaacatatgaatacctaattcgttatcatggcaacttcatctttatatgtttatgttgtcagtgtctggatttgtaaatgataatgtttcagattttcttttcaaacatctcagatcaaatatcaaagacagggttttttttttttcttgaaatatctttagaatgtttaactgataatgtaatgcaaaaagccacaagagaaaagagaactattgttctgtttcctggtaatggtctttcctgtctgtattacattacacacatatatatgtgtgtatgtgtgtgtaatatatatatatatatatatatatatatatatatatatatatatccctttattttcagttgctgtgactgacagaattaaaaagaaagcattgatttttttttcttggttaaggatcgattaaatacttagagcgtaatgctcagcataaacatttcatttacatgaactttgcctagcatttaacaagactatggctagctgcattctcttatgaaatacacattcacaatatcttctcagtgaaggggccatttctttatgactgtgtgtttcgtcatatattgaaaaacagagagtatattaactatttcaaatgtaaacattacgagtgttagagattacataacttcatgcttggtgtaccctttctacttctttctagaattgtcatatatatatatatatatatatatatatataaattatacacacacacacacacacacacacacacacatctgtagaaagtcttgctcagatttcaccattgcttacttctggaccagaacaccttataggaaaatttcatgtcacaactatttttaagcagaaactgcagcagatgaggatataaatagatggaaacagttttaaccacctatatctttatcgatctttgactccaagcagttgcaagcttggcattatggtttatctgaaaaactattctagtatagcaccagttaatgaaataaattgtctgctatatataggttttgtgtgaacatacaaatgaaatgtactgtctcagaataatgtggttggggaaatatctggagacaaatacaatgcaattgcaacataacagttacacaccagactcttaacaggaataatgtagtgtgatacttgaaagcctaaactctgaaatgagattgcctg

SEQ ID NO: 14425 - DNA, 2300 bp, Homo sapien
ctctgactatacacatcactacatcacttcatttatcgggggaaaaaaaaagacgctgtggctgaacaaaaatcagtaagtaggccccaaaacagaatcctcaaggcaatcccaattcaggtgaaaagctgttcacgtacatcatccaatgacctaaaaatagtcttttatgtaagtctctaagtatttaattcaacgtatgatcttaccacattcaacagaggcagaaaaaaaatcaattaggttttctatagcaaggccaataaagatgaaatcatagttttcctctaactcatcactaccccctcaacgtcagccttccaataactccattccacagctctcaaattcctgaacttggatctttaaaaaacaacgaatcgcaaaaagtaacatttaacaggccagaggcaggcgggggaggagggtctctcccggtgctctcagcaatctttaacgtagccaaaggaggaaaaaacgaaatcaagctcccagacggatggtgcatgcgacgagaggggagggggcagacgcggttcagacggcaagtccccatcgaaggaggaaagaaaagttgcaagaacggatgggtcaaagggcagaaaagaaaaaaactgagcagccgaaccactcacaacccccaaacgaccccgccagcccacacgttcgcgggctccccagccgcggcgcgaagggagcaggcagggagccacccggctccgtcccgacgctgccggcgaggctgcgccgatgctcccgggtgcgggagcgggctgaccgtgtggacccggcaggagccagagaagcccctcctgccccggcctccccgcgtccagctcctccaggcttcactttcccccgcaacctcccagccgcgcccgggggcgtccctcgcggcaggtcccaactttccttcctctggggggcgtcgcgctcccggggccgccgccgagggagggggcaggggcggcagggggcgcgcggcaccggcggggcgcgggggtggccggggagctagagcccgcgccgggcgggacgcaccggccgccagagccccggcggcggcgccacccagaacccgcgccgccacccagaacccgcgccgccccgcccggattcccccgggtcagcgccctcaacccgcggcaaccctggtcccacagacggcgcgtgagtagaagacaaccgagcggacgcggacagccgggccgctgttacctgaggggcgcacacgccgccgcggcgaccaccatcaccgtccgtcccgtccccttcctggtgaccacggccgccgccgccgagcaactgacactgactaacaacaactaactaactactcgccgcggccgagtccaccgcgcgctcccggccgctcgccgcccgcccagcccaccagcctgcccgcctcctctcggccccgcgcgccgcccctccgcgcgcgccctcgcccgctcgccgcgctcctggagccgtgagcacgcgcgcgctcacgggccccggtcgtctcccaggtctccctcagccccagcgggaggagtcaccgccaggcccctcctctctgccttccaacctccagaggacgagacctaaagggtgcctgattggctgcggagggcggggctaagacaaggggcggggctgccgagaccttgggcccgcgtgagggaaaatttgggttcgattaagccgcagaggaaaagaccaggggagtctgggcccatttgggcgtcggggcccgctaggtcagccgtcatcgaatacagaatatgttttcgaggacgctaatatgtagtcatgaccaatttcagttcttctactttctgcgggccttcgcaataaaaaaaaaaaaactacatctcccagaaacctccacgaaaataaggctcaccttgcgtaaccacgtagtccttcgccgcattggggcaaaataatcccttcatttttgtgaaggtaccgtggaaaatatttcatttttcttctcaccggagcaattgtaaatgctatgcggtaagaggagttacctgtggaaaggtggttaagagattaggtaaagaaaaggaaaggacaccaaaataaagtgctgcggaagaatttttgtccagctgtgagacgacgagtgcgtgaagtgaaggcgattgagaggggctgagggaattgtcctctgtggaagggactttcttttggccctaggccccttcctgcccctgtcgtcagcaggtcagtaagcaaggcgagcttgggggtggccccagtcgagatgcccttcaccccttgaagatcacccctcttttggtggtggt

SEQ ID NO: 14426 - DNA, 2300 bp, Homo sapien
ttatgtatttattcatttatttgagacacagtctctctctgtggcccaggctggagtgcagtggtgcgatcttggctcactgcaggctccgcctcccaagttcaggccattctcctgcctcagcctcctgagtacctgggactaaaggcgctcgccaccacatccggctaattttttttttttttttttttttttagtagagatggggtttcaccgtgttagccaggatggtcttgatctcctgaccttgtgatctgcccgcctcggcctcccaaagtgctgggattacaggcatgagccaccatgcccagccaagaacatttattaaaataactggcccacactcttcaaaaatgccaagcacatgaaagacaaagaaaggctgaggaacaattccaaattaaatatgactaacaagacatgacaagtaaatgcaacctgggatcctggatcaaatcctggaccaaaaaaaaattaataaaggatattctttgaacaattggcaaaatttgaataagaaggcatatagatcagaaaatattattattaatgttaatatcctgattttgataacaaagacaagaaaataaccttattcttaggaaatacacacaactattttgagcaaaagggctatgatatctgtaacttacttttgaaaggctcagaaaacaatgatatgtaggacatatacataatgtatgtataattatatatgcatgaagagagagacagggagacagacagagagaaaggatgataaaccaattgtggtaaaatgctagttgttgggggatttgggtgaagggtaaatgtgaattctttgcgctggtcttgcaacttttctgtaagtgtgcaatgattccaaaataaagatttaactaactgactaaaaaaattccatgcttatttttattatttacatactagataaaattgacatgcaaccttaagtgtacagttaaatgggttttgacaattgactatgtatctatcatccaaatcaagatacagaacacttctttcatatcattccagaaagttctctcacgtgttcttcctctcaccccctccttcctccccatctgacctctatcaccaagatccattctgctgcctgttctggattttcacatggttggaattgtgtagaatgtattcttttgtgcctggctccgttccctcaggttagtgattttgagatttatctagttagttgcgtgtatcaatagttcatgcttttgtatggctgagtagtatttcatcgcaccaatgtaccacaggaatccaggcacctgctgatggacatcgggttgtttccagttctgggtcactatgaaccagcctgctgtgggtgttctgacgagtctgtgtgtgaactggttttcgtggcaccacttgcctccctccctcggacatgccaccttccccttgacctcactatgcacacatgcaggtgccacagggccatgggctttatggataccaaaaaagcttgctgactcaaatgatctcttctgtgaatgcctgaaactccaccactggctgtcccttcttttgaggctaccctcactctggatggtctgcaattttatcagaaggaagcttacaaaatacctttcttctggccaggttgggccctggatagggctatggaaagtgagtgaaaggaatggagagaaacttctcccattctactattttctgggtggcgtatcctctcttgccttctctgtgtcctccctaacagttcgtacctggggtcagacaccccaaactagtcagtgtaggagcttggcagcctaggcctgtctatctccaatactcagcagttctcctggaaggagggagggaggaccacggggagtctccgtatctctgaatctacaaggattcctggaggctcgggggtgagggtaatgaggggtgtgtgtgctgcagagagttgagcgacagccacacacagggatggatctgctggcctcatgggagaagcctctctctggatcagtggaataagccaatttgtgccccaaccactttccccgccccgaggaaagaatcagcaggctttgtgtaaagggattaaggcattagcctgctcagcagggagaagggctcttgactctgtggcagtgtggccacgtttccatgtgtccatgtgtccatgtgggctgctgtaggccctggctcactggtcccaggacctgtggctaaaaggaggcattgctggaggcctctcttgagaggtgggtacgtgggccatgctgcctatgccctcctcaggtccccagaaggag

SEQ ID NO: 14427 - DNA, 2300 bp, Homo sapien
ctggagggtgaacgtacagttcacagtagagcatagcatggacgcctgctaggagggactctagctaggcctaggttgaggatgggcatagacataggagacaggagaaagtgctccagacaggactgtccagagcaacggtgtgccagagagactgagaagtacccagaaatggtgcagctggaacagaaggtctgtgcaagcctttgggctgtgtgtgaggctgaacagcgagaaacaaggtgctgttgggggtggggagaggtccctccgtggcaaccaggcatctctgcaatgatgttgcgcaggcttcctgggagagggggtgtcactggaactgggattccagcgtctgccccagaatccgagaggctttgggctagatcccctcccccagcctcagctgcccctgtggactcaagctattaggagtattcatgtgctaatgggttgttcccagcaggggaggagggatggccgtgccgggcggtgtcagcattgatggttattctaataaaactggcttggtggtaaagggcgtctggcttcaaggagatggagggggtagtatagggaaaaaggtgaggtcctgagggtggtaacctactctgcaggctttgccaagacatccctgctggcctagtttctgtatctgaggatcaaggaggatctggatctccgaggagaggtcccattccttgggcccgtctgaagttgtggccccagccgaggatccccgggaccattccgggaggagggaacagtcaagcccaggcggaggctctgcgctgccctctgctggccactgggtgcagggcctccggacggagcgggccagagaggcctgccgccctctgctggacaggaagccaggctgggcggggaccccggctcctgggtagagctgccgggccagcgcggcttcctcgccgtcccctggagcttcccattctgcctgcctcgccctcccgcgctagaatgtgggccctctagcctcgcggactttcgagaggaggggacagggccaggacgggggctcccggtcggcctccccatgccgccctccaaacaaccctgttcgtgtagggagccctgtccgtcctcgtgcgtgtgttcgtccacagcccagttaacacgtgtaaacacactcgcgcgctcacatgcacacgcatgtggcaacacaaaaatcacacacaacggtgtgcgcgcatacacccagggaggaccgcacgccggactccccgacacccggctggcccgggactcgcccagagccccggacccggaggggcgcggccgtgtgcagagctggagcgcctggctggtgcgcccctcgcctgcgcacccctgcctgtttcgctgccctaagcgtgcagggcagcggctggggcgcccctcgctctccgccccctccgctgaaaggagacgaaccaccccccaccccaccaccaccatcaccaggttttgcggccgcgccttctcctcccccgcccggctcccgcggctcactcgctccctcctccctcgatccctcctccctccctggctcgctcctagtgctccctccccgcgccgctgcagagcgcggagcccgagcgggagccggcgcgggagccggagcgggcggcgggcgacagcgcaggcggcggcggcggcggtgggtcctggtcccggccccggagggcgcggagtccccacccgcgccgctccggcccctctcccgacgcggggcgccgagcagcatgcgcggccgctgcccgccggccccggccccgcggcggagcgcgcccggcctcgaccccggccccagcggcagaggcggcggcggcggctccgggccggcccagggggcagaagcaggctcgcgcagcccctgtcccgcggcctgagcgcgcccgcccatccgcccgccggggccgcggcctcccgcctccccactcccgagccccggccccggctccggctcggctcccgcccgcgcggggcggacagacggacagccagccccgcgagggcgcgcggactgccgggcggaggtgtcggaggaggaggaaacggaggagggggctgggcaggggctggggcctggtcgggccggctggagagacatgcgattggtgaccgagccgagcggaccgaaggcgcgcccgagatgcaggtgagccaggcggccgcggccgagccccgagcgggcagccccgcggcgagtgcccctgggggccgccatcggccctggctgcgccctcctggggttgcagggcacctcggtgccacccagacctcctttggggtcataggcc

SEQ ID NO: 14428 - DNA, 2300 bp, Homo sapien
ttgcatcagcataggtgatctcataaacacgatgtggaggaaaaaacatatgtacaaggtataccatttatctcaagtttaaaaacaagccccaagccctataaactgaatatggatacctacaaatataggaaaagtattaaaacacgcaggacagtgattaacaccaattccagaggactgtcacctctagggagagagaaggggaggtggcagagtcaggcctatcctgatccccacactttgaaccccacaccatgagcagcacggtggttctaagtgtgttatccactcactcagcaacccgctcaatcctctcagcaacgctatgggctcccttctattactatctcatcttacagtggggaaactgaggcacacagaatccagggagatattcctgggctttccagcctagcaggaagccaggacttggttcctcactctgtcattaacttggaggagtccacattatctccctggcctcagtttatttttctgtgacttgggagacactcactcctttccctagataggtgtggcttgagagactcgcaaagtcttgattaatcaacctggaatatttgcagagaccctgtgagccaagcctggtcccagctacatggcaggggagactaaaaacaaggaagtgtggacgagagaaggcgtaaataagacaattcaatccaacgtaattcagtatggttcaatttcacatgggctcaaatcacggacagacaacgggtgaggttaaggatattacttgagcacctctggcatgctaggccacatactaggtgcttttacaaattatataagcctcaatcacaccctgtaaagtagggactgttattatcctcatttagcagttaggaaacaggatcagggagggtgagcaacttccccaggtcacactgacagctgagattgtcaggatgtaccctccctccattctgacctgtcctctgtttggtgttggggacatagacggagaccaggccttggtgcccactggggaatctcagcacagaccaggagagtctggaggagtccagaggaggtggagcaaacaggagaggcttcctgggggaggagggtgaaggcgaatgcttcagtgggctcattggtggtgagacaggtggaggcatccatccattcatctcctcattcattcattcattcattcattcattcattcatcaaatgccaaacatttgccacagttttctctaggctccaaagcccatggtctggcaggcaagactcaacctagtgtgatccaggctgaggtgggagaagtgggggtggggctgcacacacacagcaggcaggtcagacatccagaaggaagcaatggctgagctgaaatcaaaggatgagttgggatcagtcaggtacacggaaggtagaggctggtgctccaggcagaacagcaggtgcaaaggctgggccctgggatggaggggagagacagccagccctgaggaaggccgctgctggccaaggaggtgccagctcagctgagagtggggtgcgaggctgaggctgccaccacctctcgcccaggtagggtggctgcctgccttcttctccagctgatgggtccccatgccatctcagccctgttgggtaggctgggtccctctccagagagattaagagcaggggagtttgaaccataacggtgcatgtaattatgtgcaaaaacgaaggagggctccttaataattgatggtgggagagagtaaatatcagcagaggcacccagctgcatcaccccggcccgtctggctgggacccagggcggctgcttgtccactaatatgcctataaattattgaagttataaagaagaaagcaggtgtcatgtcgcacccataaacagcttgttagctaagactaacgaaggggcggccggcctcttggcactgcatgggctccccctacaccctccccaattacagaaggagacagatgaggagtgggcgtggtaggaggctgagagcctgactggccccacaccccgtctcccaccatcttgacccactgtggagtcaggtggtgctgggagagagaagaggcccagagacacagagagccagaaacggggctgtggctgtcccagcactgtgggttcagatagcagctggacaaacctgcgacagaggatgtcagaggtcctgcccagcctgataggctgaggccagctgggatgctgggaagaactagacactggggtcagacactcagggtgcacatcccagggaagccacctgttggcggagtggtcttgggtaagt

SEQ ID NO: 14429 - DNA, 2300 bp, Homo sapien
caaatgccagtccccgtctctgccgcccgcccaagcttgggccatctgtttcccgggggtgggaggggagtggggcttggcagtcggcaccatcactctggatgcccccaacctggggtctggaccaacggcctggcccagaaatggccctcaggtgacggcgggatgtctaggaaggtgaggactgtgacacttccccgtcagcagggccgccctgccctgcccaccctggagtccggcgcatgcccagcccttcacaccgagctgggcagtagctcttctcttcacttcctgcatgtgggggcactggggcttggagagccctctctgggactcccaaagcccacccttgtagtacagatgggaaactgaggcccagagaggagaggagaggccaggtccacagtgaaacagtctgtgtacacacttcacccattcgctcaacaaacactgaccaggcatgctctggtgctggtgctgagcaccgttctcaccgcacgtggttctgggcaagggggactcagtgctgaactggcagatgcaggcttgttctccagcagctcaaggccaggggaaggcagccgatccgcaagtaataacagactgacaaactgggacttccaacaaaagaaagaggaagaaaagaaagcaggcaggcctggcagtagggactggaaagaaatgagggtgaccaatcatccccatttgtctgggaatgtctgctttcagcactaagagttttgcatcctaggagacacctcggttctgggcaaaccaggatgactgtcacctgaaggctactttaggttgagtacacttgagctgagtcctgaacatgatgaaaccagcaatgtgaagatctggggggcaacagaggagctaagactgagcgaggacggagtgggagaggagcaggggaaagggaggcaggcagatcacaaagggcccgtgggccctggaatagagtggagtggagattttatctagtcacaggattcaattttattgtggtcattgagtcaaactagggagcagcttggtgcaaaggtcacagattgtagagaattttaaaaattcattaaggttggagccctgggggcaagggcagtggcttgggtgcctggagaagctggctgggactagatctgaagcttcctcagggagctgggacttcagccgtagggcaatgggagccactgaagcgtataagcagggcttgatggggttagatttgcaaggaaaaaaccctaatgctctgggctggtcatggctctgtacaggaccctttcctgccgtccccagaacaccatgcaccactgtccccactcccaaaccttagggagtcctgtcatcttccaagacccagcccaaatgccacctcttctaagaagtcttccctgacttgctgagagagacaggtgcaatcatgccctacctaggactcccccatccaaggaccctcaagcagaggtctcaagggagccctcatcacaatggacactctttcggttcccactttgtcacagtggatccttaaggccatctgaccagaaccatgttccagttgtggacatggaggctcagagagggcatgtagtttgcctgagaccacacagcagttgaagtgtgaggtcagttcagaaccatgtcacctctgtctgagttcagagtccctgggctcctgcctacaggggtagtggatggggagaagcaaagagtggccagtcaccttcccacacaggaacagaggagtggtcattaccatggggggctggatgggatggaccatggggcgtgccacctggccagctggcagatttataatggaagtctcccagatcaattactgtattaccaggcagcctgaccttgaaagctggtggggcgggagaggctggggtggggtggggtggggccagcctagagcagctgcctagcctcctccagcagagggcaccctgggaaccagaagacctcctggtggagaggaaaggggcggggcctggaatcgtaccattattgcacattcttctgtttaaaatagtgaaagtccttgttagaatgcaataaacccttccctacactatgctccaggaagagatcatcagaccattctgaagaggaggagttggcacagttacttctcctctctgagcctcgatctccctgccggcaaaatggggatccttgtcccagctccactcactctatagggttcgtttgaggctcatggtaaataggcttagaaatgggccctcgggcatgtccagcctggagtagagtcaagggtgtccaggggg

SEQ ID NO: 14430 - DNA, 2300 bp, Homo sapien
cgtgggggatgctcagtgggacgctggcactgtggattgtaactgccgtcctcactttgcagtttctgcctcccagaaccctccctcatccgccctcctctatattgctgtaccccacctctcccctggccactgcctcattcctaactcacttcctcctgtccttccgcctgcctgaaatccatcctcccccaggtggcggctgcaatgatctttctgaagcacgaatccagactctgggtactccccacttagaacttcaagctcctgctggctcctaggatgagagctccatccctcttggtgcctactaggccctgcctgaaggagggggctttctccctctccagacactgggccttgtcactggtgcagtctgcggtgcccttccccactgcttccaagcccaactcgttttcctttaataccccttcaaagatcctttcatcccggaagcctttcccaaaccgcagccctggatcagatgcccactaccctgtttccacagcccctcaggctcccgctttcacacagcacccgagttgtcatctctcaccttcctgtgctccaccccacaccctgctcagggtgtttgtacccttaattcacagaaagcattagagggcatttgctgaatgaatgagtgaatgaatgagtgaatgaatgagtgaactggcagctcccccaggctgtgggaactctgggctggacctttgggcctactgaggggagtgggtaacacagcatgcctctgacctgtcctggagttggcctcctttctgtgtgtcctactgggctctaggcgtcttaccctggaattgtccccacccgcaggccctgcaacagcagtggctgcatctgcagcaaggggttttgaaccattccagggatttactacaggttgagggtggcataggagccctgagaacagagcctggggtctgcagaaccttgtcaccttgtgccctgatccccaccctgccaccatcatctgacacacgtacaggtcagttctgcccccgcctgaccccgaagacctttcctggcctgagctgctccagcccctacacagccctgcaccaggaacctggcactgagccccggctctattgcccaggctggagtgcagtggcatgatcacagctcacggcagccttaagctcctgccctcctctctgctcctctgacctggccccaagccctgccttgtgccttagccagtcctgctgatggtccagctattaccctgctctcgcagacccctgtcctgggatttctggcttcctggcccggctgccctggtgctgaccaccttcccatgagtgtcacccatctgtgggccccgcccatgcctgtggtgccaccctaacccctgactctaagcctgcaaattggggcaggccccggtacccagtcctgagtgtgtgggtgggggttgggaagatgaagaggggtcggttctgctcaggggagtctcctaaaactgaagctcctactcagccactggaaacggagggcccggaggtggggttctggctgtaggtgcccagggtgtgagacacccagagatagggggcagggagggtttcctggaggaggtggtggtgccctgggtgagccagtgaggatgaggaggataggggggccctccgcggtgggcagagcaggctgtccactctgtgctgggctccatgccagcttcgcgctcacccccggcacagccagccttcgggcgggtattattagctccatctaagagacaggaagacggagattccaagaggctcagggacttgcccggggtcacctggctgaccagtggccttgtcaggcctccacccaggtctggcatcattccaggctcttatggagggagtaagaggagagtccggggtggagggaagggaggcgggcacccgccacaaacatcaaagcagctgctggctgtgactctccagggtgggggtgtgggacggggttggctttctgagtcggtcctgctcccccctccccaccgtgggagagccctcacgatgcgaggttcccaccgccccctccctggagaggccggcagtttgcctcttcagaggataattccccattatacagagatatttagcctaatagaagccgacagatcattcagggcagtaatgtactccggcttcaagcgtgtagtttcctcagcctgaactcccagattaaaggctccttgcccagcccgccctgtgccggtgcctgtgaccttgactgcaatgatggggtaggtttctcccttcctccttccctcctcctccctt

SEQ ID NO: 14431 - DNA, 2300 bp, Homo sapien
gatttgcaggctagacagtaactgggcagctttctatggctcaattcttcacctcaaaaataaagatggtgagaatggctgcctaagagttggagttttaaacaagattaggaatctcacatgcctagcacggggcacctgtaacccatcgcaagtgctccgtaaatgttagtgattaaagggaacattgaaccattttcagttcttctgcattttatgggggaagtggtataatcccgtggtggtttcttgtttggcgatggggagtttctgtagccgcatctctggggagcggcagcagtctcctgcttgtgatatcaccagagtctgtcttgactaccctggcctgccgtttgagctgtcttgaacataatttcttctgtgactgggagattaggaacctcacacaccagcctgtcagattataaaagagaaacagaagctgggggagaagagacacatttataaaagactaaatttgtaaagaacatttagaagtcactgctcagaggtgattcggtttagtatccttagcagcttcttcagttcattgtttttattattaggaaagtctaaggaagttttctgagcttcattttcagtgttttacatgaaaacacttcaccccctttttggtttgctttttgttgctgttggatcctttcagctttcttgcttggagtttcaagggctgaagccaatatgacatgtgtcctgccccgacctgctctcaaagttggactcggcagaacttgtcaccagcttgttatgttcttttatagacagaaagcaaataggcaaaggttaacaattggctaatttaggtgaaggctatattgtgttcattgtacttttctttcaacttttctgtaagtttgaaatttttcagtgttgaagaatatgttctcttacgtgccttatacgttttaggtcataggatttgttattaagagtgatttttagttatgggctgtatatgtatgtagactttttttacgtaaactggataagtgaagatgagaaccttcagaaaatatgttcagtttctctagtttaaaaaaaagtaaggtattgcttttttttaaccacctcaatgaatatggaatatggatagataaaatatttgcatagatttaggaatatgtcatatttatttctcctgtcatcagttgagaaaaactaccacaattaaataaaaatatcttctccatctccgttacggcagtcatgcctgcctgccttctactactgtaaatggccaaaaagattaattaggaagtgccttttaacaacttctagttctttagaacttactctaacttagcagggctatttgattggtgaagcagcaagctactgactacatagggtaattaattagtcaatattcaaccaatgtgaattcagggattttttttttttctaacaggataatctacaggggtacaaaacccaaaacaaatttctaaataaggagattttggaactctcagctctacgaagaaatgcagaaaggagagagagggatctgatggcaaaggtgggtcaggataggtggattctattacctggtgggaggtaaggttaggaaaccattaaaaataagcatgctttacaaagcggttcaactcccaggcttggagagatgtggttactgataacaaaatatatttaaaatacatataatacatagagctgtatagttagtctcattttattatctctgatgaagacagataaatgccgtgagatgtgagtttttcacataaactggataagtaagaatgagaagctacagaaaatgtgttcagtttctctagttaaaaaaagaacataaggtattgctttctttgtgtacctttgttcataagcatttttaatagattttgaagaaaacaaagtaagtacataattataaggtcacctaaattaagattatttgggttttgatttatgctgttcagttttgtatttatggagatggtgaggtaaatgcctcctctgtgaacccaatagggttggtgtgaaagtcagatatgattatggctggaaggggctttgcacaaagtgtaatgggaccacaaacatttcagctgtcatcaaatgagctgtaatcaaatgatacttgtcaacagctgttatatacctgatatacttttttgaacagaacttgaagcatcttcccagaccttattcctgcatgttttctagggtatatttgatttgtctgataaggtggcagatgggagctagtcctggaccacagtgtcctaagaaagaatgggtatagcatggagtgg

SEQ ID NO: 14432 - DNA, 2300 bp, Homo sapien
tctggggctagaagtccaaaagcatggcactggcatctggggagagcctttgttttgtatagtcccttggtggaaggcaagagagaaagagagcaagagagggcaagggtgagggagagccaggggaccaaacttgtttttattgcaaacctgctctggtgataactaacccaccctggtgataacaacattaatccattcacaggggcagagtcctcatgacctaatcacctgttattaggcctcacttgccaatactgttacattgaggattaaatttctaacacataaactttgggggacacattcaaagtatagcaatgtttgtatgttaaaaaaaaaaaaacaacaaaaaccaacatacatttgagtgtttttgcttttttgctaaggacaaattagcaaaaataggatgcttagtatgtcttagttttccatgaaaaatgatcctgtgatacagtcttccaaggaaggatccagtggggggaatcaatcatctctggctgaagcatgttggttactatctagaatgcagtgggggcagagtcatcaatctcctgtagttcttaaggtggtgaatgccaaactccctggaggatgatttgtggggatgctttattttgttatagtttccaaaaggaagatgtggtttttgtttaaaatacaagttttggccgggcacggtggctcacgcctgtaatcccaacacttcgggaggccgaggaggaaggatcacaacgtcaggagatcaagaccatcctggctaacacagtgaaacctcatctctactgaaaatacaaaaaattagccaggcatggtggcgggtgcttgtagtcccagctactcgggaggctgaggcaggagaatggcatgaacctgggaggcggagcttacagtgagccgacattgcgccactgcactccagcctgggcgacagaccgacactccgtctcaaaaataataataataataataaaatacaagttttatttttatgtaggagtaactggctcaggattcccctttgattttggacgtaacccctacaaaggaaagcgccctttgaaagacataattgggtcgtacaaaaatcgtcacagcagtggtgacccttcaagtgaaggcacatcaggcagtggcagcgtcagcatcaggaagccggcctccgaaatgcaactgcaggtccagagccagcaggaagagctggaacagttaaagaaagacctgtccagtcagaaggtaacttcttcttctggcttctgtcttaccccacctcagcaggccaaggacgggaggagtaaagcccaatttatgtttccctgagtctttctggggacagctttgtttcccaggagttgcttttcccctggaggtttcatattgccatggcggtcatctaggcacagctgctgtgcttgatcattggttcagaggtgtttgcatttgcaaggagagtgaagatctctcaaaggaggacagaggaggttgctgtctgcaccacagcccagtcctgcccctgaggttgaatctccctaaacacagtttcagcccagagttctttaacagtcattaaaaagagtttctgcatcctattcaacaatggtttcttgaactaatcagatctaattacatttaattgttcagcagttcagtgactcttagagcacaggttttttaatacccatgacatttactggataccattgctaattatagtggacatgtccattatttcctgtttcctattactgttctctacagacagtctttatggagtaaatatttttttcctctatttttgagatccttcaagaggaagttcagtattaaaatgtttccagtaaagtttctacatttcctcaaactctgtcgattactccatgtaatgtcatgatttctgcttttcctcctctccttgctcttttcacccttcactccattctccttttggctcccaggagcttgttcgactgctccagcagacagtccggtcatcccagtatgacaagtatttcacaagcagccggctctgtgagggggtcccaaaggacacgctcgagcttctgcaccaaaaggatgatcagattctgggccttaccagccagctggagaggttcagcttggagaaggagagtcttcagcaggaagtaaggacgctgaagagcaaagtgggcgagctcaacgagcagctgggaatgctcatggagaccatccaagccaaggacgaggtcatcatcaagctcagcgagggcgagggcaacgggcctcctcccaccgtggcgcccagctccccttcggtt

SEQ ID NO: 14433 - DNA, 2300 bp, Homo sapien
tggcagagctaggagacacatctggtcagtgtgaagtcagagcccagtccttaacactgtgctgattgtgctcaaagacaggtggagaggtcagccacacctctgatgggccccaggaaaggaatgcttgcgtggtgccactttagggcctgcagagagtcggcaggctgggtgaggacccagaacctgcccttcctacctgggtggctccaaacaggcagtctaatttgtgtccctgtccagctcagaaaggtcagttttccacctgggtctttcagtgtgtctgtataaaacatgcaaatctatgagggtgagatatttggtttgggctttcacaaatgtagctatgtagctatacacttcctttttcctttgaataaagtgagctcttgtactcactattccctctccctggaatgcttcacccacatttctggttgcccctgtccctcccatcatctgggtttgtgctccatgtcacaggatcagaccagcctccttgcctgtcctggggcagcagcctgctatctgccccccatcacttcatcctctcactttgctttttacttattttttattcttgtgggaacatagtaggtgtatatatttatgggttacatgagatattttaatacaggcatgcaatgcataataatcaaatcagggtaagtaaggtatccatcacctcaagcatttatcctttgtgttacaaacaatcctattatacttttttttttctttttagacagagttttgctcttgttgcccaggctggagtgcaatggcgcaacctcggctcactgcaacctccacctccggggttcaagagattctcttgcttcagcctcccgagtagctgggattacaggcatgcaccaccacgcccagctaattttgtatttttagtagagacagggtttcttcatgttggtcaggctggtctcgaactcccgacctcaggtgatccacccacctcggcctcccaaactgctgggattacaggcgtgaaccaccgcgtctgtattatactcttttggttatttttaaacgtacaattatattatttttgactgtagtcaccctgttgtgctagcaaatacttggtcttattcattctttctctttgctttattacaaagcaatagatttgccttctcaggttgtgagtgttcaaataagttagtctataaagcactgataaatactaggtgctattttaagcggtaatcatttacatgtcatcacggcatttatacaacatagcacacattacttttatctgctttcttgtgtgtcacctccctgccttactagaatataacctccacgagggcaggagaatgattggtttgttcactgctgtatccgccagggcctggcatacagaaccgtacccggcattcagaaggcgctcaataaatatatgttgaattcaataaatgaactgaggtctggagaggcaggaaacgctttggctttcatgaattctgcaaatatttactgagcacccactcagcaccaggcaataggctgtctcatttttacaatattagcttgagactctggcaggagggagatttaaatatcaagtttttagaataagatacacagtgtgaaatgcagttttaagcggacactccgctgggttttgagagatgcacactcccatgtacctacactgccataaagaaatagaccattgcttcatccggcagggcgaggacttggagcccaggtggcacgaaggcaactgacccgcggggtgctggtcgcaggaccctgcctccgggggctgagggggcaacggccggcgggcgggcgggggcgagactacaagtcccagggtgctttgcgcgcccgcgggccgtgcggagcgaaggggcggtgcggagggggtagggggcgcagcggccgcggcgcggaggcgcagggcgcgggcgcctacggttggcgcgcggtagcgatgccgggggccggagcccgggcggaggagggcggcggcggcggcgagggcgcggcgcagggggcggccgcggagcccggggcgggtccggcgcgggagccagcgcggctgtgtggctatctgcagaagctgtcgggcaagggccccctgcgtggctaccgcagccgctggttcgtgttcgacgcgcgccgctgctacctttactatttcaagagtccgcaggacgcgctgcccctcggccacttggacatcgcggacgcctgcttcagctaccagggccccgacgaggcggcggagccgggcacggagccgcccgcgcacttccaggtgcacagcg

SEQ ID NO: 14434 - DNA, 2300 bp, Homo sapien
tgccccatgtcctctcccatctctgtgggcctgggtacagcttcaccccaccctacctcggacaccagtgcatcctgaggcccccagctgtgggtcaggggagaccagggcactccagggaggtaaggtgaggctcgccaccctttctaccctccttcttccccttctctccttagccagaagagggtgaaccctgcatctgaaattggggagctaaaggtgggatttcgggcactgggagaggcttgtggaatcaactatcagaattccaacctggcctcatgtcctaggcttgggcccccaacccaaggtcaatgaggggtcctcggagcctgggtctttccctccctgtccagcgaccccaggccccagtatctcctccttccttgcagcctgacaagcttcggaggctcttcttcacgtacaggaagcacaaattctgagggcctggcatccggcagcccaccagtgggtttcctggtacccaggccatgccaggggttatcgcaaaggcctcagctcacttgaaggcaccctttggatcttgagactcatccagcctgctacagaactaggctccgagacagccgaggtgcctgcctgagagcaggtggaagaggaccttgcaggtgcctgcagctcctggctatgtcctgctttccttgtgcctcccatccatgcacaggagggactggagaggaatgagattggccaaaggcaggggtcaccacccccatttcccagataagcatgctgaggcccaggcagactgactgaacctgcctcccactactgagcacttaccgaatgtgtggcaggctgtgtgctagcacagacacctttctaactggccaagtgacatcatgcaattgctaccgagaacaaaaccagttcccctccttgcggccccatcagcgaaaaggaggggagggccagaagccacatcctctgcttcaggcctcttcgctccagctgtaccctcaggtcaggctggctcttcctggaactctgtccctcaggaaacttcctgttttgtgtgtcacttcccttcctatccacatgtccccttctctataagggtggacagctggcttgctaccccactcccaacaacccccaggcctgggatgcagaaaacaggactgatcatctccagagagaacaccatacgtgcccctcctccctgccctgaccctgggcagagcgggctcaggttgcatttgtgggaaatctactcttagtgaccacttggctatgcagcttttcctgaaatataggcctgtaagagtccctccctccttgggggtttaaggattgagactgaagcaactgtccctgtgcctgagtggttagcactcccaaatgttaaccagagatactgtcagggaattcacggaaggttcggggcatgaatgtgttttcctcccgatggcacacgcactgaaatcaaagttagtgcctaaagcaggaggcactgcctaatgccgagaggtgagacaccaatggtgggatttcaaggatcagaagcaaaggtaccctcaaacatttcctaacattagcatacatggagagcaaagggatgcaaaagtgttttactaccaggagttcacaaatctgtggacagcacaccagtgaggattccacggtgttggggaggcaggcagggtggtactcatgacccagaggcagagacaggagcaagagcccttgggcccactgcacccacagcttcacattgtgaaggaggccgggagaaggggaacaggcaggggtgggaagcagcccaaccttgggttttggaaaaagattgcatagctcgttaaaaccctgacctcttttttttttttccgctctgtcctgggtgaccagggtgtctgccagcacttggacacgtcagaccccaccacctcctgttgggttatctgcttttccctctttgggggggtggggagcatttctggagtaggaaaggactggggcatggggcggggtgcggagggcctggagagaggccatgggtcccggggctggaccacagcggggctgtgggaagggtcctaaccttcacaggcccccttcctggttaaggttttttttttgctgaaagggccacaggatatatttgtggtgtaaaccccagaggctgccactgctttcctggggagcttggaggccacacccatgtgactgcagggcaggatggtggacttctaggcccctacagcctcggcagtgtcctcagatccggatgtggaaagtgctagaaagagagaaagggcaagagagggtgagaggccctg

SEQ ID NO: 14435 - DNA, 2300 bp, Homo sapien
taacagggtgacatgtctgtttagctgatggctgctgttctcaccagggagtggcaaaataaggttggaaaaccccaaccagtagcctcagatataaaagaaaactaaaagcatgagggatcatctgccaaacttgaagccctgttcccatcagaacccacaagcttcagcagcctaagcactctcaaagtatggttccaagaccagctgcatcagtgtcacccaggaaccctttcgatacccacattcttagccaccccagaccttctaaatcagaaaatctaggggtgcagcctcccaagtaattttgatacatgctcccaggtggtttcagaaccactatcctaaagtaacaaaccacgcattttaaagcataaagtcttgatctcgcccaggcatggtggctcacgcctgtaatcctagtactttgggaggccaaggcagaaggatcacttgaacctgggagttggagaccagcctggacaacatagtgagactccatctctatttttttttatatatataaataaaaaaaaatcctgatctcttcaaagtccactggcagttgtggaatggtatgttgagccagtgcctgggtccagtccaggttctactaattcccagctgtgggaccctgggcaagttactgaacctctctcagcccaactctttgcctataatatggagataatacctactgattcagttgtcctgagtttagaaataacagttgtatgggctggaccccaaaaagatagcggtgactccatttggtggatggggaaggagttcagaacatgccaccacaacatatgctgctctggcatattgagtatttgagttaaaggcacttgaaaaatagcagatgcaagaagggcactcttgatcatccttctttttctaaaaaacaggagatgaggccgggcatgatggctcacatcctataatcccagcactttgggtgagaagccaaagtgggtggattgctcgagcctgggaattcaaaaccagcctgggcaacacggcaaaaccccatctctacaaaaaaaatacaataattggccgggcgtggtgactcaggcctctaatcctagcacttcgggaggctgaggcaggtggatcacctgaggtcaagatttcgagaccagcccagccaacatggtgaaacctctctctactaaaaatacaaaaaaaaattagctgggtgtggtggcatgcccctgtagtcccacctactaggggaggctgaggcagaagaatcgcttgaacccaggaggcggaggttgtagcgagccaagatcgcgctactgcactccagcctgggcgacagagggagactccatctcaaaaaaaaaaaaaagtatttagattttgccagttctcagggtcttcatttccttatgagggcttccacgtcatgtaaaacttgtattaaatctgtttttctccccttaatctgtcttatgccaaattaattctcaagcccagccaaagaccctaggagggcagaggtaaagtcctgcttcccttacaatggcatctgcttaaaagctccaaaaaatgtcttggcctttgtcacacttctgtggacacagtcaagtcctttaaatcctctcaagtctcacgtttgtaaccaagccaagtaaatcctgtcctgctccctaaggaacacagaaggtctgagatgccctgcctaggccgcgcccaaaggccagatgggcttcccgaggcctggccgggagggcctcagatgtcagcttgactgaccccctccttctccccagagggacagggcccgggtaagggcttgaccaaggtcgcgacgcgagacggtggcggagcccggccccagctagatccacgcactcacagtcctcgctgccgcccccgccccaggtcaaggggcgccactcgccccactgcccgcctcgagagggttttttcccaggccccgcaccctcacgccgtgcgacctggactcccacggcgggacccgggctcacacctcttcctgctgcggggcggagtcgccgccgctccgggtctttgtccccgcctccgagacccccgcgcgcccccagcacttccggccgcgggagccaagggttcgtgccgggcagcgtctcccggggccaggtcgcctcctgccgggacccgggcgcgctgcagccgcggagccgggtgccccgccctcttcccgccggcggcggagtcgctgccgctccgggttcccgtccccgcctccgagacccccgcgcgcctcctccaggcgagctgcggggcgggaagggtccggccac

SEQ ID NO: 14436 - DNA, 2300 bp, Homo sapien
acagggttttgccatgttggccaggctggtctccaactcctgacttcaagtgatccacctgcgtcggccacccaaagtgttgggattacaggcgtgagtcaccacgcctggcccaaagcttatcttctcaatggcacacagcagaagagaatgtgatgtttcccaggagaggtgggagccaagtgctagagggctctgagtaaggagagggggacacattcgtgggtcttgggggcttttacaacttttactacttcccaacatgtaagctgagtcttgacaaggagctagaatttcagccagtagaagtggggcaagagggcattgaggctgagggaatggcacgaccataggcacggagaggtaaaatatgggaagcatttgggggctggccagcagtcctagttggcaggcgctccaggtctttggggctggaaggagtggtgggaaatcaggctgaaaaaagacagtggtgtgagaggagagtgcaagggagagccaggaggtttcagagccggggcgagccctggtcagagctgtgcctgaaggggagggcaggttggcaggtgaagaggctgttgtaagagcctgggcctgaggtggtctggcccgaaggagggcaggggtgacattggggatggaggaactgtgggagaacacttcaggatgggactgccagggcctgatgaggggaaggggcccaatggaaaggggttgataaaagccctccttcctgacaaggccacagacttagctgcagtttattatttaggtcataaaagctcttgggatcacttctctactgcactcatcacctctctgggtgggtaggcagctcctctctggatagaactcttcccagggtagggtagcagagacctggtttaaacacctgacctcccctggcacccagctagaggcctggccatcagcaggaactcaggagtttgtgatggacagggagaggacaaggggaaaggtgagtatggatgttatttcttcagagaagcattccctgacctccaggttaggtttgaatcaggttgcctgattttgccttgccatagctccttgctcttttgcttcttggcgcaacagttttaatgacatgtgtgtgacacttgattgaagcctgtctttcctactggacactaagccccagcacttaaaacagtgcctggtgtctagttgaccctcagaaatatttgttgagctaaatagacagattagtagttgcctgggattgaggacaggagcgggattgactataaacggacacaaggaacattttcatatgctcaaaaactggattgtggtgatggttgtgcaactgtttacatttactaaaaatcatcaaactgtacacttacagtgagtaaatgttactatatatacattatacctcaataaagctggtaaaaaataaaattcggccagtcgcagtggctcactttgtgagcctggggcaagcagatcgcttgaactctggagttccagaccagcctgagcaacatagcgaggccccatctctacggagaaaaaaaaaaaaaaaaaaaaagaaaaagaaaagaaaaaacaaagttgggctgggcttagtaattacttgatcccaggaggtcgaggctttgtagtgaacctgttcgcgctactgcactccagcctgggcgacagagtgagacccggtctcaaaaaaaaaaaaaaaatcaaaatttgtggaataagaaaattatgtgtctttctccacgggattgtaaattctatgaggagcgctatatccccaagatcctagaacattaatcagcacctagtaggtgtggaacaaacgtcttaccttaacagcgagtcaatgaaccagggaggggaggaagaagctttcccggagatgccggcccctcagtttccgggttcgcctggcgctcagccaggccagtcacagagagacgagcccggcgattcgccagcggaatgtccaggggcggggcagcgagcgagcgcgaagcaatcctgaggcggtctagggggcggggcgttcagggggcgtggccgtgcaggggcgggctccgagcgtggggtgggcgcttgcgcactgccgctgcggctgttgctgcggagccaggaggggaagcgatggctgggcccgcgtggatctctaaggtgagcgctggcaggccggcgtgtggcaggcaggcaggccgcgagggctggcaggagagccggtcgcgtgccgggtgtgggcgggcgcgtgggccagacagggaggcggtggctgcccgcggggacagcttgggagccggtcctgg

SEQ ID NO: 14437 - DNA, 2300 bp, Homo sapien
attttcttagaatatatgttacccctaaattgaccgaatggtcaagaatgttggcacaaaatgatccactcatctgagaagaatctgtatgttgagctgaaaaagtagttttattctaccttcaacatcttttatttgacaacttatattcgttaaattgactttgaaaatatacagtactcaatctaaagtaaaaatctgagtatttaggctttcaaatctgagatagcttgccacattgagctaatacatgagatttgtattcctgggaagctactgaatatatctgtgccaagttgcagcattaccatccatcaggacttcctcgctcttgtttactgtatgtggtttaattctgtgtgtgatatttctctgttgatattaatataggtctctcggctgctgggggcattccacaacccaaaacaggtgaccagaggttttactggtggtgtgagtataattatgtcttttattttttccttttagaagtttctcaagaaagatgctctaacatatttattatatagcattttatctccattcatttagaatttgggaaaattggccatatttataatgtatgttgaaattactggctgacatgcacaaatctgttaggttacttgcgcatttgaaagaattatcttacagctggctatgtaagtttgtcacattaatatcttgagggagccttgttaaaaatagaaagtacccttgagcctgttattttatttcacaatctcattttggtgagacagcttttttcaaaactagtacaagttgagagaaaattgttgagaagcttcaaaacctgctttgcatttttattttatgggcttccctaaacccagtagattgagtgccaattaggaatgcctcgaacatctataagccttgtaggcttatacttgccttatataggctttgtagactatcacagtagtagatcatctattgttcattaaatctgctgcttttagaattcccagcatcagaattctgtgctttaaaagctgataccacatttttggaacattctaagactgtgggtcagtgacttcctatttgttttgatccccgccccgccttttatggaatctgatttggatttcataattcctatactcccatataacatctatgccgtgaaagatttataagaccatagtacattttttcctccatttactttctgtattgtggaagaaaagcagattttctggtgactggatgacatttattattacatgttgggagaacaggaagaagtagccaaagcgttcttttggctctgcttatgccaaaaatgcaggatggggcttgcacttcaagctcaaggatagccatgctagcatttcaaacgcattctgaaagctaataagatgatcattgctctctgctattatttaattttcaggctatttatttgaaaaaaaaattagcttgatggaggaggttatttttgaagaaataagaggatgtattaatttttttaaagacttcttcaacccgagaaaactggtatgagccttagccctggctaagactgaggtgggagatttgcttaaggccaggagttcgaggctgcagtgagctgtgatcacacctgtgagtagccactgtgctcctgcctggcaatgtagtgagtcctcatctctaaaaaataaaaattgaaaattagaaaaatgaaaaaaataaaaatgtttcttcagttgtacagaaactaatcagaaataattagtccacgtatctgggcagacatcattggaaggcaaaggaccaaggaaacttgaattagtgactttttaaaaatgcagttcaagcaactagaactgaaaaaaagccaagcccctaggtggggtaaagtcccaagataataaaatatgtggttcccaaatggaaaaagaggtgctgatcttctcccttacatatttttatttctgcatttgaaatgctggcttcgttttgcctgaagccttagaataaatcattgctgttacattataaaaacaataattgtcattctaagtgtgactcaggctttgcaggtatgatgacatatactattctttttggttgcagatcaactttgccaagcttatgtagattactcttagatttaagcagacagttttatagaggaactaagaaaaaaatggaagctctcttgataaaaagtctgattttccctgagtaccaaaacagacctcagtaatattttggaaatgtgtctgaaaatgttttgcaagactgaagaagttgcatgagaagctttccaggatcacaatggaaaggaa

SEQ ID NO: 14438 - DNA, 2300 bp, Homo sapien
catccggcgaaagatgctgctgtgggccatgtcggtgaccttggagcagaacctcacctgccccggcaggtacagagggcccacgggcgggaggcctggggagagagtgggctgggtcataacccaaaacacagtgagggtctgatacgccatgcctgtcccggttccagtggccgggcagctctggagaccccgtgcagaggccccatcaatgactgggcttgagctcctgtgcgtttcccagggcctgctggggacagtcgctccacctttggattctgactgggaggagtaacttgctttctctgaagtgaaattcacctccctaggagcagcttctggcacaatctcctgaggtctcctgacctcagtaagtggctggagaaggggccacagtgatcaggacttagcctttccggccttttcagcatcccaagtgacccctcagatattttgccctttctatctttctatagctttcaaaattcccacatagttctatggagggtcagtgacgtaaagctggcttggtttcaatttagaagtagtttccattccccatgtgcctgtgaaatggtatgtttcatgagatgtgtgcacatatctgtgcatccacagcttcatttgcacagacacgaaacatgaacatgcacgaacaaagcatttgtgggcttcactggggtcccacgtttgtacatgtgtatacatgaatacatacttcaagtttctgtgcatgtgtattgtgtgtgcaaaatggcatgtgtctgtgttgttgcccgtacacctgtacacagctgaatctgtttgacttcctgggtcaagacatatttgcacacaaccatgtgcctgcatacctacatctgcatgcatgttcacgggcaggttcaatattcaaaccaaccaactggaacagacaactggaatggccgagccagggtgttctcactgaataccaccataccacccttttaatgtgtgtatgtgtgtgtgtgtgtgtgtgtgtgtgtgatttcttctgtgaaccattctccctctcccaccagcgacctgaagcccttcacaaccagactggcagattacctggtgctagccaaggttcgccaggcactgggatttgccaagtgtcaaaagaacttctatggagcggcccccatgatggcagagacacagcacttcttcctgggtctcaacatccgcttgtatgcgggctacggcctcagtgagacctcaggcccccacttcatgtccagtccctacaactaccggctgtacaggtgaggctcgaggctgccacacacatgcacacccatgcgcccttgctggtactttgtgcccgcctgctgagtgccctggggatccccttctctttgcatgccagttgggtcccagagacctggccactgggctatggagcccctgagagccaacaatgccatcttgggccaagtccctagcttatcctcagtctagtaggagtggcctctgccaccgtgtcgtgagtctgtggttgaaaacagcctgcatagcccaggtgccccctgaacctatggagcagttttcctctggcccctccctcttttggagtggggtgtgctccagtgtgttctaggagagcagatggcccaggggccagctggggtaggagttggggggaccaggccagcctcctaatggacggtgagggcggtcagttctggggagtgatttgcaggatcatctattatgattaaatatctcctctccctgccagcctatcacagtgctccaagttctaccattaccatttcatttgttccttccttccttcattccctaaaaccctttacttggctctacctttcagctgtaagtcccctgtaaaaatacaaaagccctgtgaggggataccttctagcaatcagtgaagaccgagcagttgggaccccggctccccagtgggggcttggaggagacggctccctctgaccagtctcccggcccctccctcgccagctcaggcaagttggtgcccggctgtcgggtgaagctggtgaaccaggacgcagagggcattggcgagatctgcctgtggggccgcaccatattcatgggctacctgaacatggaggacaagacttgtgaggccatcgacgaggaaggctggctgcacacgggtgatgctggccgcctggacgccgatggcttcctctacatcactgggcgcctcaaaggtgagcaccccaggccaggcacggtggctcatgcctgtaatcccagcactttgggaggccaaggcgggcagattgtctgagctcaggagt

SEQ ID NO: 14439 - DNA, 2300 bp, Homo sapien
ttcaacagcattaggaaggcagcatttgggggcctgtggcctgtgccctgagtttgttagaaggcagcccagctttttctcagtcacctgccttcaccagacagcatcacctgtggcccaactggacctatttcttcttggggacatctcataggtatccccactaacacctcctgtacacaatgtatatggattttaattgcgtcccccagcaaattcatgtctacccagagcctcagaatgtgatcttgtttgaaaatagggtctctgcagatatagttaagatgaggttctttggcatcagggaaggccctactccaatgactggtgtccatgtaagaagagaaaataggaacatagactgctatggtgggaaaattcccaacaaatttcatatgttggaaacttaacctcaaaattcatatgttgattggaagttgagcccttgggaggtaattagggttaggcaaggtcatcagggcggggtcccatgttgaaactggaaactttataagagaagaaagacctgagctggcaccacgctcttgccctctcaccatgtgatgccctccacgttatgatgtagcaagaaagccctcaccagatgctggcaccttaatattggacttccagcctctagagctttaagaaatcaatttctttgtgtgtgtgtgtgtgtgtgtgtgtgtgtgtgtgtgttttggtgtttttttaaatttgtttgtttgttttatttttgaggcagggtctcactctggttgcccaggctggagtgcagtggtgcaatcatggctcactacagtctcaacctcccaggcttgagtgatcatcccacctcagcctcccaagtggctgggaccacaggtgcacaccacggcgtggcacccagctaattctgttttattttttgaagagacaaagtcttactatgttgcccaggatggtcttgaactcctacgctcaagcaatcctcccaccttggcttcccaaagtgctgggattaaaggcatgagcctccgcacccgacctattttcgttatgaattacccagtctgaggtattcagtgatagcaacagaaaatgtactaaggcatagacacagaggaaagacagccacgtgaggacagaggcagaggctggagagatgcacatgcaagccaaggaacacccaggatggccagtgacccccagcagctgggagagaagcaaagaaagagtctgcccacagcccccagagggagtgtggccctgcgcacatcttcatttccaacttctggcctccagagccgtgggagaatacatttctgttgtttgaagctatccagtttgtggaactttgttacagcagccctggggaatgaatacatggtcttagaggggagacttttggtattcagaaaaaggccttgtcctgtgtgaatttcccatctctttatggctgcctgaaacccccccgccccccttaacatgcttctttcctttagaagaagggacagatccaggcttctattcatgtgtccctggaaagtcacattcctcggttgcctctatcatgtcttcagtgcaactgcttctatagaccatgtggcgtggtctcagtgttggaaatgtctccttccttcccccggggtgggctccctccttgggtctccagcctccatgcaggacctgggggagggggactgagtgggtgagatccctcccagggcagcattcggcagaccgcaagtcaaggttgcagagtgtatgcagccaggggtagcagccacttcaggatctgggtctggatttgtgctgagaaccactatgaccttttaaagccagtgaggaggttttctgggggcccagaagccctgagcccattggccagacctcctgggagaagcggagcggatttgcatcaaaaagaacactggcttcattgaaattctcctcatcttgagagaaacaaaaccacaaagaaaaggaaagttttaattctgagaaacttcactgaggagcaattttttttgagcttctaaaaatagagaggaaatgagcctctttgggtcactctagttgccgcctcccctgccccatgcccacccccactgctcactcaaggctagcctctctcagtgggtgactgagctgtcttcagtggaagcccgaggcagatgccacgcaattctggagctggatacggctgcccacacggggaccccagcatgctggacagcagagagaccccacaggagagccggcaggacatgattgtgaggaccacccaagaaaaattgaaaaccaggtaagtcattggt

SEQ ID NO: 14440 - DNA, 2300 bp, Homo sapien
tcttgctctgtcacccaggctggagtgcagtggtgtgatctcagctcactgcagcctctgcctcccgggttcaagcgattcttgtgcctcagcctcctgagtagctgggattacaggcgagcaccaccatccctggctaatttttgtatttttagtagagatggagtttcaccaagttggccagactggtcttgaactcgtggcctcaagtgatctgcccacctcggcgtcccaaagtgctgggattacaggtgtgagccaccacgccaggccttcatcatagaattattgcccacccccaccaccctgtccgtgacaaaatcgtcttccatgaaactggtctctggtgccaaaaagcctgggaactggtgatcttaaggatgtgacgttgaattattagaaactgtgttgctgtctgttcagtctttataggccaagactgaagcctagttgagaagagggctcataggagcctggctaagttccatcaagaagagaatcactatcagcttctataccttagcccctgcccgcacccccccacccccaaaaagcatcaatattgtgactatataccaggtgtttcacaaagttatgaagtagttataattaatatcctcattaaaaggttaagaaaactgaggctcagaaaggttaagttgtctgcccaaggttccacagccagaagtagcagtgctgggatttgaacctaggtctaagtctcactggttccagaattcactgtcgtccaaagtgcatagctccattctatgtttctaggctctgtctttaagccatccctctcctgcacatgcccattttacgaatgcctatggtcccgagtactaaatctggacaagtatgtgaccctgggcagtggatctcggctctggctgtaccacctggggagcttgaaaaacactgatgcctgggcctcacccctagaagctctaaggtaacaggtgtggagtgcaacccagagggatttttagaagattccaggtgatctctgtcaggagccaggtttgagacccactgcgctaggagtcttcacagttatcatcccatttgatgcttataagagccctgtgagaaaggcaggcaagtggcaatccccatgtcctgctgacgaagaaaagtgttgagatgctaaggctcagacagtaagatctggatagaaaacaaagtttctgacctctagctctgagttctctgcctaaaggttctgctctacaaggcataatttaaaaaaaaaaaaagcaacatctccaagaagagcagcttaatttctcttgtacagtacaagtcacttctcacccccatggaacacatggaggagaggtagtacctgcttcagccacagtacccaaaacaaggccagggcatcccagggaggtgagcagtgacccccctttctgacaaactgttcccctggcagaagccaagggagggctaggggacaggggcctgcaattctgtgatagcgttggggcctgctttccacgcccacttttctgcaacggtttgtgatctggactccctgagcacccgttgggagctgggggcagcctagggaagtcgggacctactcctgtacccttccaaggcaagcatcctgggccacctagccgtttcagggtccaggccatgggaccccctgtgcataacactgggcccaacagcctggtcgggccctgatgtttgctcactgatgatgtgcagaggagagggggcagtttcccacttctgggagaagagagggcactgtcggcccttggcagacttggggggcgtcactgcccatatgtgggggacgtcactgctcaccttgagggacttaagggttcccagtggtgggcattcgagaggatactgtccacatctggggccagcaaaggacccctgtacctcaactggaaggccagaggttcacctcagccttgcagtcatgaggcagcagagggcccctacccactccaaccccctaaaaaatgcaacaatcccaggcacaccttaggccgcagcctggctgtgaccgaacagacggcggccacacccccggggagaggccgggtggggaccgcagggcgcagctctcccagtcccacccttcggcgcagggctccggccaacacagccctccaggccgcctactctccagccagccggctccacggacccacggaagggcaagggggcggcctcggggcggcgggacagttgtcggagggcgccctccaggcccaagccgccttctccggcccccgccatggcccggggcggcagtcagagctggagct

SEQ ID NO: 14441 - DNA, 2300 bp, Homo sapien
ctatcagcttctataccttagcccctgcccgcacccccccacccccaaaaagcatcaatattgtgactatataccaggtgtttcacaaagttatgaagtagttataattaatatcctcattaaaaggttaagaaaactgaggctcagaaaggttaagttgtctgcccaaggttccacagccagaagtagcagtgctgggatttgaacctaggtctaagtctcactggttccagaattcactgtcgtccaaagtgcatagctccattctatgtttctaggctctgtctttaagccatccctctcctgcacatgcccattttacgaatgcctatggtcccgagtactaaatctggacaagtatgtgaccctgggcagtggatctcggctctggctgtaccacctggggagcttgaaaaacactgatgcctgggcctcacccctagaagctctaaggtaacaggtgtggagtgcaacccagagggatttttagaagattccaggtgatctctgtcaggagccaggtttgagacccactgcgctaggagtcttcacagttatcatcccatttgatgcttataagagccctgtgagaaaggcaggcaagtggcaatccccatgtcctgctgacgaagaaaagtgttgagatgctaaggctcagacagtaagatctggatagaaaacaaagtttctgacctctagctctgagttctctgcctaaaggttctgctctacaaggcataatttaaaaaaaaaaaaagcaacatctccaagaagagcagcttaatttctcttgtacagtacaagtcacttctcacccccatggaacacatggaggagaggtagtacctgcttcagccacagtacccaaaacaaggccagggcatcccagggaggtgagcagtgacccccctttctgacaaactgttcccctggcagaagccaagggagggctaggggacaggggcctgcaattctgtgatagcgttggggcctgctttccacgcccacttttctgcaacggtttgtgatctggactccctgagcacccgttgggagctgggggcagcctagggaagtcgggacctactcctgtacccttccaaggcaagcatcctgggccacctagccgtttcagggtccaggccatgggaccccctgtgcataacactgggcccaacagcctggtcgggccctgatgtttgctcactgatgatgtgcagaggagagggggcagtttcccacttctgggagaagagagggcactgtcggcccttggcagacttggggggcgtcactgcccatatgtgggggacgtcactgctcaccttgagggacttaagggttcccagtggtgggcattcgagaggatactgtccacatctggggccagcaaaggacccctgtacctcaactggaaggccagaggttcacctcagccttgcagtcatgaggcagcagagggcccctacccactccaaccccctaaaaaatgcaacaatcccaggcacaccttaggccgcagcctggctgtgaccgaacagacggcggccacacccccggggagaggccgggtggggaccgcagggcgcagctctcccagtcccacccttcggcgcagggctccggccaacacagccctccaggccgcctactctccagccagccggctccacggacccacggaagggcaagggggcggcctcggggcggcgggacagttgtcggagggcgccctccaggcccaagccgccttctccggcccccgccatggcccggggcggcagtcagagctggagctccggggaatcagacgggcagccaaaggagcagacgcccgagaagcccaggtgagcggctgggccgcgccggacgggcgtcgggggtctgggccgcgaacccgccgcggggccgccggaacctccgcgaaggttctaggcctttgtggcgtcaccgtctccttgcggaagcttccgccggcgccgaataaaacccgccgcggaggagccggtggctctagtgcggtggagccaggcgtggaagtcggtccggcgcggggcggggggcgggcgggagctacaagcggcggcggcggcggcgaccgtgaccgtgacgcgcgagcgggcggcgggggcgcgggccaggggcgcgggccagggtgccggcaggggcgtccggggcgctctgaccggcctcgcccgccccccccgcagacacaagatggtgaaggagacccagtactatgacatcctgggcgtgaagcccagcgcgtccccggaggagatcaagaaggcctatcggaa

SEQ ID NO: 14442 - DNA, 2300 bp, Homo sapien
cgaacagacggcggccacacccccggggagaggccgggtggggaccgcagggcgcagctctcccagtcccacccttcggcgcagggctccggccaacacagccctccaggccgcctactctccagccagccggctccacggacccacggaagggcaagggggcggcctcggggcggcgggacagttgtcggagggcgccctccaggcccaagccgccttctccggcccccgccatggcccggggcggcagtcagagctggagctccggggaatcagacgggcagccaaaggagcagacgcccgagaagcccaggtgagcggctgggccgcgccggacgggcgtcgggggtctgggccgcgaacccgccgcggggccgccggaacctccgcgaaggttctaggcctttgtggcgtcaccgtctccttgcggaagcttccgccggcgccgaataaaacccgccgcggaggagccggtggctctagtgcggtggagccaggcgtggaagtcggtccggcgcggggcggggggcgggcgggagctacaagcggcggcggcggcggcgaccgtgaccgtgacgcgcgagcgggcggcgggggcgcgggccaggggcgcgggccagggtgccggcaggggcgtccggggcgctctgaccggcctcgcccgccccccccgcagacacaagatggtgaaggagacccagtactatgacatcctgggcgtgaagcccagcgcgtccccggaggagatcaagaaggcctatcggaagctggcgctcaagtaccacccggacaagaacccggatgagggcgagaaggtgcggggcggcgcggggcacgggccgggctcccgaggggccaagggttattaagccaggagcattgaaggcgacgggaaacctgagccgcgtttgttggggaggctgtcgccaggcgcctcggggccaggccgggcagaggtggcgggagaccctgggcgccgtgcggcgcggtcggtggagggcgcttcgcccgcggaggaggcatgtggtgcggcacttgggtccctcgcgagtccctgccgagcccattcattcctccattcgctccacaagtgtttgggtagcccctgccgtgcgcgccggactagttctcatagggtgtgttggttccctgtgggagaggcggcctgggaatcgggaaactgaggcacacacaaacagttgtttacttgctgggaacgactggctcatattctctgttgatgcataaaccctagggatgagtgtctttaatctgagctggtaccttggacaaacgccgtgcctctcttgagaatgactagctggatttgttctgtgcacctactgcctacctgataaaagcgtcagatagtgaataatcccattttctttattaaacagggacacggacatctgcaacctgacatcagcttgtactcatattctgggttttcggtgacaagtgacacacagttgatcataagtaccaatcatagactgaaaatgctctgcattttagagacagaagttaaaagcttttccatcctgtttacagaaagtttgctttttatctctaaagaggctcatgacccacctgaataggtgaattgaaggatgaggcattgcaaggaaaggctgctaaccctcccgttcctcctttcacttcttgccattttcttacaaaactttggttgttccgcatgggtcttgagaggtggggccgttatagtagctgatagcagtgtcacttgggccacgtttgaaaccacaccaatcacccatgtagcatttaagacctgtggaaacgacgctggaatcaaaatacctgtctgtgttagttgttccaagctggagaaagctacttcaggacggttggctgaatggcaacagtgatggaatatttatatttagccacatgtgctgaatgtggctgtcacaagtttaaaatgctttcctgtaagaccatttgtctgttactcacttgcgttctttctcatctatatttagatggcttactgtagcttttaaaggcactggcgttttacatggtgctggtgattcatccacctgctccctacattcattgtggtccgcttctgacagtctcctttaaggagagcttgtaggcttctaatttcacatttcagcaagctggctaaagacatgtgggaaagcctgaccctggattcaggtcaaatctcagcactcacaagagtaagttcatgcctctgtgtatacagttagagctgaatatgcttttgttctgaagcttttatttttaaaaaattagacttgacctgt

SEQ ID NO: 14443 - DNA, 2300 bp, Homo sapien
gggaggccgaggtgggtggatcacgaggtcaggagatcgagaccatcctggctaacatggtgaaaccccgtctctactaaaaaatacaaaaacttaggtgggcgcggtggcaggcgcctgtagtcccagctactcgggaggctgaggcaggagaatggcgtgaacccaggaggcggagcttgcagtgagccaagatcgcaccactgcactccagcctggggacagagcaagactctgtctcaaaaacaaaacaaaacaaaaaaaaccttgggtattctcttgtccagctccctcactgtcttgagatgaaaaacttcatgcccttaattaagtcatctctcaaagttggcagccagtaaaccaggacagctcatctcagtgactgcaggagctccacgggcagcagggagggtcttgatgctgtcagtcttgacaggctggcaggtgctggagcacacccccaccctgtggactgaacacccactgtcctgagttgcagaagcaagattttggcagaggaaagaattcccatttggccaccggttacagaagggctcagaaagtaaagtgctttatgcccaaggaagtgaaagatccagagactttggctgccaaacatttatgtatagaaaggactcctttcatggggaaacttaaccaatttcgtgggttaatactgcctttggtttctcaattagtactctccttgtcctcagatttgttctcagaaaataaaggtggaaagtctttttgttggcctctataaatgattgaataattagctcatagctagagagggtattagctcttgttattggctgagggccagaaggatgggctggggtaatagaagcattgcttcctgcagggaagggagcgcatgacccagccacagtcttgagtctctggagacttcatacaactaagggtcatatgggtggtatttaatacaatggtatatttcattcaacgccactaattttttttctcccttgctaaggcaagaatgttgtacaccagttatctgtaactcttgaagatctatataatggagtcacgaagaaattggccctccagaaaaatgtaatttgtgagaaatgtgaaggtaaaaattaatttttgactgaaccgcacagttctgatcccttagattcagaaacaatgcttgttttatagttcagggaaaataagttatcttttttcaaatgcaagggtcaagcagagattacaaacaggtggcctgagggccacacttctttgcctgaatgaatgttttctttgggctgcacctctatttgacatgttgacaattatttctttttatgtttttgtattttttatttttattatactctaagttttagggtgcatgtgcacaacgtgcaggtttgttacatatgtatacagacaattatttttaaaaattaaaaatcagacacttgacctcatctaggggttggcagactttttctgtaaagagccagattttaggctttccaggccatggagtcttttgtagctagttcactctgccgtcatagtacataaatgaatggacatgcctatgttccagtaaagctttatttacaaaaccaagcagtctggccatggtttcttgacccctgacttaaatgtatatataattattgtaatttttaaaaaacctgagttttcaagaaaagccatgtctggtgaccccagcctcacattgtcccacagagagaattggctgagctgggtagctgccactattgacagagcttgtgttgtctagatcgccacagccccagcctcctcattcatctgtgggcctatgcgagttccacctggggtggaagaaaacacatttgatgaagctaaagtaataaatttggattggtgcagccaaaatcacaaacgtttgaggtcagatgttaacatctggatgttgtctgcttggctggactcctccagactcttctgcattgttttttattattgtaaatagaattctaagcccattgtccaatgtgagggttccctacccttctgccatggcgcccagcagggacactggtaagggaagagcatggccctcattcctgcctcccctgaccctgcaggtgttggtgggaagaagggatcggtggagaagtgcccgctgtgcaaggggcgggggatgcagatccacatccagcagatcgggccgggcatggtacagcagatccagaccgtgtgcatcgagtgcaagggccagggtgagcgcatcaaccccaaggaccgctgcgagagctgcagcggggccaaggtgatccgtgaga

SEQ ID NO: 14444 - DNA, 2300 bp, Homo sapien
cttgaagtctgctcactttgacccaaactttttaagccagtgacatgcagagggtccactggggctggatgaaatttctatggacagagatgtcacagagctgggaaggagagaaatagctctccagtcaatgtgactgagaaaaattagtcatatcactctgaaacatgtgaacttgagggttaaggatgctggcatgcagggaagtcatgtgtgcagcagaagagctgcaggatgtcttctcttttgtgttaatgtgagattactgaggacaagagaataggtcctgggagatgtgggtgtatttgccaatttctcaccacacatagcctcctcaaaaagcccccaaagatggccaggtgcagtggctcatgcctgtaatcccagcaacttgggaggcagaggtgggtggagcacctgaggtcaggagtttgagaccagcctggccaacatggtgaaaccccgtctctactaaaaaaaaaaatacaaaaaaaaattagccgggtgtggtggtgggtgcctgtagtcccagctactggggaggctgaggcaggagaatcacttgaacccaggaggcagaagttgtagtgagccgagattgcgccactgcactccagcctgggtgacacagcaagactcagtctcaaaagaaaaaaaagcccccaaagatgaacttcacctagttgtaagtggtctaatagtcctccgtctctctctctatatatatatttgaacttcaaaactagttttttcgaaaaatattttttagagccagggtctcactctgtcacccaggctacagtgcagtggcccaatcatagctcactgcagcctcaaactcctgggctcaagtgatcctcacttctgcctcctgagcagctgggtctacacgtgcacaccactgcgtctgtaactttaaaattttttgtagagattgggtctcgccatgttgcccatactggtcttgaaatcacggccagaagcaatcctccccccttggcctcccaaagtgctgggattacaggagtgagccaccacatctgagccacagggcggcctccataatggggcatgagcctcttcccatctttttttgttgttgttattcgagacagtctcactctgttgcccaggctggagtgcagtggtgtgatctgtgctcactgcaacttctgcctccagggttcaagcgattctcctgcctcagcctcccaagtagctgggattacgggcacatgccaccacacccggctaattttgtttttgtttctgttttttttttttttacttgagacggggtttcaccatattggccaggttgatttcaaaactcctaacctcaagtgatccacccactccgactcccaaaatgctgggattacaggcatgagccaccacacccagccccatctctttttttttttttgagacggggtctagttctgttccccaggctggagtgcagtggcgtcatcacggctcaatgtagcctcaacctccagggcttaagcgatcctcctgcctcagcctcccaagtaactggaactacaggcatgtgctaattgtttttatttttagtagacacgaggtctctcgctatgttgcccaggctggtctggaaacccagagctcaagcaagcctctcacctcggctcccaaagtcctgggattacagacgtgagctactctgcctggccctcaaaaaaaaaaaaaaaaaaagtcagttgacaacctattaaactgatatctgtcacgttaatgggtcatgactagcagtttgaaagacaaagctcgatttcactgaatttatttcagcaacagaagttattagctttagtccaatctcaaaagtacaaaatgaaattgcaacacaaacctctaaacctgcagttgccggaagctaaacgtctgcgcttccggaagcaaatttccaactaccactcctctggaagcaggacctggcttcctccctcctctctccgcccaccctcgtcggcgtctgccccgcgcccgccatagcgacggcaacgggcgctgcggagtgctccgagccgtgagggcggggccggcgcgatgccccgccccttcgatagctcatctttgcgcgtcgcagtcgcgcggagcccggcttccgacgtgcagcctggcagtgcagtggtgagttggagcgcagggccgttggggattggggtcattagggccgttgacagtccaggccagagggcgagtgagcgaggttgggcccgaggctgcctgtaagcaggtccgttcagggatgctccaggccctggggcctgagg

SEQ ID NO: 14445 - DNA, 2300 bp, Homo sapien
gctggatggcactcctgttttgccccttcactggagaggcactcaaccctctgtgaagtgggtttgattctatggcagctccatcccttgcctcccacatccaggacctgctacttaatttgcagatcccagtgcaaaataaaaattcaggactccttgttcaaaaagtattatggggccaggcacggtggctcatgcctgtaatcccagcactttgggaggccgaggagggcggatcacgaggtcaggagatcgagactatcctggctaacacagtgaaaccctgtctctactaaaaatacaaaaaattagctgggcatagtagcacacacctgtagtcccagctacttgggaggctgagccaggagaatcatttaaacccaggaggcagaggttgcagtgagccaagattgcgccactgcactccagctcgggcaacagagcgagactctgtctcaaaacaaacaaacaaacaaaaagtattctgacgttcaagctggcaatagcagagcattcctgcttttccattttccaatctaactatcaggcccttctaagtgcatggccctgtgtgactgcacagacggcacgtccagaatgccggccctgcccatgcccctttccagctggtgatggccccactcccctctcctgtcctcagctgctttcttagacagatcctcggagcctcctggcagcaacccagccccagccacctccagaagtttccagggccctgttcagtaggcactcagcacagattccccaaggtcctgggggaatcttcaccccaggccaccactcacatcctcctcaaatcaatgcacagttatcgagccccacctggctaagccttaggaagggaggacaagtggataaacgatcactgccctccaggagttcagtttatagcagagcgaagacttgaacaagagcaggaccggacaagaatcctgtcaattcagagaaaaataatcacagtttattaggaaactgaatttcacaaaagagagagcataaagatgggctttcgtgaatgggcaagatttgattaacccgatgaggaaaggggcattcaaggaagaagccatggcatgggcaaaaacttagagataataaaatgcatggcacgttctagaatcctgaattgtacagtttggctgaggtgtgcagatggtaaaatagtgggaaaaagctggaaggaaaatgtacagagaagagctacaagggtaatagtgaagtgtttgtactcccttagtggaaacaccgaggggactttaggtcgtgatgtttaggttatttgggagcaaagggagaagacttcctccccttggccctcacagcctgcccgaagagtgcaaagcctcacgcttttgcaaaacaggccgcacctagcccagattctggagctgattcagtccatgcctctcgacccacagtttgtcctgagccctgacaaaggtctggccccctcctgcactcggaacgcggaggacccgcagctcgtggattcgcgcctcagtgcccaagctggtgttgatgggggttgcggtttcctgccactcactccccatgggtcctgtggggggcgtggggatgcggggagagggtttcagaataggatcccggactgggagggaagggacaccatctgggcacacccagtaggtacgaccggaggtgaaaaaagagtgggtcccatcccctgatggccccgctcgctatccactttaagtttatgttatggatattttcaaacatattcaaaagtagagagaaaagtagaatcataacccaagtccacaccgcccagcttcaacagttatcccctccaagcccatcttgtttcagctaaccctctcccaccacccattttaaagcgggatgtgggtgtcctgagggaggtggaggctccccagttggagagcgggtgcccgcacctctggaggctgaggcacaactgggctgggagttgagcgcataccgagtaggggctgcgggggagcgggggcagggccggcggggcggggccagaagcccggcggggttgggggcgctctcctagtgactcaaggcgcgcagcgctgggcgcaaagcgccagtctccgccttgcgagctcagagtgtgcccgctgcgccgccgctgtccgtacctgccgccgccgccaccgccaccatgcccaacttcgccggcacctggaagatgcgcagcagcgagaatttcgacgagctgctcaaggcactgggtaagctggtgcagagggcgcgccccgacggggagatgcggcccggaggtgccc

SEQ ID NO: 14446 - DNA, 2300 bp, Homo sapien
tcacggtagctggtactacaggcatgcaccactatgtctggctaactctttaagtttttgtagagacagggtctcaccatgttgcccaggctagtctcaaactcctagcatcaagcgatcctgcagctttggcttcccaaagtgctgggattacaagcttgagctaccaactgtgcctggcccagtcgaatattatatgtcctgtaaaaccaaactcattcgttataaatagatacaagcatctgactactcaattttgtcatctaatatagacatgcctgtgcagctacgtattataatacatattattttctaataaattactttcctatttttctcctttatattacagttaggtcattaagtagattatttatcgtgtatgtagattatattacctatgaatttcatgctgggattgtaaaggagatgttacaaaatatagcaaggtgaataaaggaaatatattggagtttgggttgacagggcttggatcaatgattaaagggagtggatgaaggagtcaggtataatgtgttgatttctggcttgggcaaccaggtggatggtggcgccattcgctaatacaggcaatacaaaaggaatagtaggtttaaggagggaaatgacgagttcagttttggagatttttagtttgaggtgccttgggatgtggaggcatcccatgggtactaggatatacacctccgggtttaggagataggctcaggtcacaggcagactgggaagcatcaacatattaactaataactgaagtcaaaggaagtgtgagatgggccagggaaaatggacagagggaggaggtacaaggccagagccctgggacacatttaatgtccaatatatttttttttgagacagggtcttgctgtgttgctcaggctggagtgcagtggtgcaatcatggctcaccacagcctcaatctcctgggcccaagtgatcctcccacctcagcctcctgagtagctgagactacaggtgcatgccaccacactcagctaatttttaaattttttttgtagagatagggtctcactacgttgctgtgtttggtcttgaacttttcagctcaagccatcctcccactttggcctcctaaagtgctggaattacaggcatgagctactgtgcccatcaagtgcccagtacatttaaaagctgggcggaggaagaggtctgcagaggagcctgagatcaagcacccttaggagaagaaacaaaagtagagtctgaagtcacagaagctgatggaagagtatttttcaacaatgggagagaaccagtcaagattgagatatgtgagattagaaagtggagttatagctggccttggctaaaggcatttctgggagtggaagccagactggaagaggataagaagtgggtgggggagagccgagtatgagcgactctttctggtaagttgctgcgacaggagataatgctgggtaggtggagaacacagggaccggaggagctgaggcggaaggatggagaggcttaagcatgtgttaactgccactgggaagaagtcggcaatcacggaagctaccggagggtaagaaaaaattcattcattcaacagttgagcgcctcccacgcgcccgatcagtatggccgcccccacttgaaaacacgcgtgtgggccgcccacgtctgacaagttaatgcaaggctttatagttaggggaaagcggttctccttgagctctttctcctagcagttccgattccgaccctgactccaacagacaccttgcgggaacgcaaacaccgctcgaattcatgaccccaatagaaaacttaaggccgcaactaagtaacggatcgctgcgaaggccaaactagccacgccaacgcccccactggagcctccccagcgctccgcccccgctcgcgagaacagcggcgacggcgcgagaaatcgctttctggttagctccgccccttccctttctttgttttcctgtccgacgatctcgcgggagttaggcgacaaatcccgcgagcgcagacccggggctggctctgctgctctcgcgatatttgcgcgagcctgcttccttctttcctcccttgccagtccgcctgtcttcctccccgtcttccctgcccggcctcccccttcttcccccgctggccccctccccggagggataatatggtctccggcgatggacgccccaaaagcaggtcagtttcgggcctccgagctgggtctggcagttggaaacgcgcgctgcctaggcgccgaattccttgcttttctcgcctggag

SEQ ID NO: 14447 - DNA, 2300 bp, Homo sapien
tgagcgcctcccacgcgcccgatcagtatggccgcccccacttgaaaacacgcgtgtgggccgcccacgtctgacaagttaatgcaaggctttatagttaggggaaagcggttctccttgagctctttctcctagcagttccgattccgaccctgactccaacagacaccttgcgggaacgcaaacaccgctcgaattcatgaccccaatagaaaacttaaggccgcaactaagtaacggatcgctgcgaaggccaaactagccacgccaacgcccccactggagcctccccagcgctccgcccccgctcgcgagaacagcggcgacggcgcgagaaatcgctttctggttagctccgccccttccctttctttgttttcctgtccgacgatctcgcgggagttaggcgacaaatcccgcgagcgcagacccggggctggctctgctgctctcgcgatatttgcgcgagcctgcttccttctttcctcccttgccagtccgcctgtcttcctccccgtcttccctgcccggcctcccccttcttcccccgctggccccctccccggagggataatatggtctccggcgatggacgccccaaaagcaggtcagtttcgggcctccgagctgggtctggcagttggaaacgcgcgctgcctaggcgccgaattccttgcttttctcgcctggagtcgctcggcaggcgcccaggccctcggggctcgggttgtgctcccctcggggcctgcctgctgggccgccctttgagcctaggccgcggaagctggggctcccgatccccaccctcctgcgcgacacccgcagggcgggccaccccaccgctggccttgacccgcacccctctctctccggtggccgctgcctgctgccagcggcttcctggcccccgtcagcaacaccaggggcagggagaggcccaccgtcttctcctgcccgccccccattggcgagcgatgaaggcgggggcctgcgtctccgtgttcgggtctcacgcagctagatgttgattccacggtccagcctaaggcccctcagtctctctgtgcctctggaagccgaatgaggggcagtcaaggttgaacattggtcagtcagttctccgaccatttattgcaccgctgtctcctcccccgtccacctccctctacaaaaaaaaaaaaagagaaaaaaatactattcattctgaaaatgggctgtgcttatgttttctccttttggatgaaagccttaacaatgttgagggtcctggccacccaccgctatgagtctgcacaaaagatctgaaggttcttttcaacctcagggctgcctccccgccactgccccctagaatgttgggagctgaggcacgtttaaatgagacctctggatctttgacttagtagttcagcttcagttcgtgcaaaaccagaagacttgtctctttcgggtagaatatgctaatttcctagagattctgttacttttattttcagtactaagccctggtaaggacttaactgagaagtttttttgttttggtttattgaatgctctgtaaaaatccgtcttttagtttttttttttaatcagtccctctaatgttaattgtggaattcacaaattcctgtctctgcagttttcaagacatgtctttccaaaacgtccccgtggattatttaaatcattcttattgtccctttccaggtattcttatcacatttcaggagtgaattatcttactagtttttacttgacaaattatggtttagaactatgctttccagtgtggtggatactagccctgtgtgactttaaattaatcaaaattaaataaattaaaaattcagttcctcaggcacgatagccacatttcaggtgctcaatagccacacgttgctaatggctactttactggacagctcaaacatagaatatttttaccattgcagaaaattctattggataaagctagtttccaggtattttcagctgaataaaatattttgttgctgcatttaatgaaaatacaatttttttttcaggatacgcctttgagtaccttattgaaacattaaatgacagttcacataagaagttcttcgatgtatctaaacttggcaccaagtatggtaatgttgctttacattttcttgggtttgtttagtctctaataatgaaaatgcatttgtcaagctgagctgaagaaattttaaatgtatttccaccgtattgtaacaggtacacctacacatacctataccattttaaaaactcctcctgggacaacttctgttcag

SEQ ID NO: 14448 - DNA, 2300 bp, Homo sapien
ttgagttttttggaagtggagtttcacaattatctatagttgatcgaactacaatagcaaacatgtgtccggaatatggtgctatcctcagctttttccctgttgacaatgtgacattaaaacatttagaacatacaggtaagaagataaaagatcactagaataaacatgttacatttccaatgtgtttgataatattttataaattactaccttatccatgttatttactattcacaaaattacattatgttgaaacaacaactttcaagcaaacatcagatgtctttaaagagtgttgtgtcctcaaaccctagttccctgtgacacattgaaagcaatttaaaggaattattcaaaccattgatcctgacttgactgtttccccataatgatggatacctccacctctacttaggggtcataggttgcaatttaatggaagtcagccttaaacatattcacagcagtccccttctacaaccaagagtagaggagctatcagacaaaggggtttggggaccagtcttctatctagagaagaagaagaagcgcaaaattttgcaaaaaacaacataggaccacagtttctaaatctttttgtaacctgattaactagaaattttggccactcttccattggctgtttagattaaaacagaaagtatctacaaaacaagatatgttgatatttcataagtctgctatttaaaaagtaagatctctttttttaatctctttaatgaggtaatcattgctgagttactcatttctaagtatagatatttatttggaggatatattctagtattcttcagtgtgcaggcagattattatgttagttaatcagacagcaaaattgatgaatggttatatagaatcctggagggaatgatccccccaagtgcaaaacttctgcatttgagttagtagaacattcaaagtagaaatggttagaagtgcctcgttccttgcatattaatcttgagttaaggttttagtgatcctgtgtaacaaattatcctaaaatttagtggcttgcacaagcagtaattactagctcatggtttcagtggggtcggtaattcagacagggcacagtggggacagctcatctctgtttcatgtcttgagcctcaactgcaagatttgaaaggaagggcctgcaatcctgaaggcttgttgtgcttgcatgtctaacagcaaattatgagctgtcagctgaggacttaggtaagtctatcaggcaaaacaccctcatgtggtttctccgtgtagtctgggcttgctcacgtggtagattctcaagggttaggagaaagagaaatgtaaatgaatatgtaaatagtatttgtttcttgttcatcactggaattcagtatccttacccccaaagatttcaaaattccttactgaggccaggctcagtggcttacagctatgatcctagcacttcgggaggctgaggcgggaggatcacatgagtccaggagtttaagactagcttgggcaacatagcaagacccccatctgtacaagaaaattaaaaattagccaggtgtggcagtacagacttatagtcctagcaacttgagaggctaaggcgggagaatcacttgaacccaggagttcaaaactgcagtgggctatgatggcaccactgtactccagcctaggtgacacagtgagaccctgtttctaaaaataataaatttattggcggggtgtggtggctcatacccataattccagccctttgggaggccaaggcaggaggatctcttgaggctgagagttcgaaaccaacctattcaaaaaaaacaagaccctcccgccaccccatctgtacaaaacatttgtaaaaaaaaaaaaaaaaaattaaccaggcacggtggggtgctacttgggaggctgacatgggaggattgcttgagctcgggaggtcaaggttgcagtgagctgtgattgcagcactgcgctccagcctgggcaacaaagtgaaaccctgtctgaaaaaaataataactaaataaatttctcactgcattttgttgttttgttcatcttcgttttaggttttagcaaagccaaactcgaatcaatggaaacataccttaaagctgtgaaattgtttcgaaatgaccagaattcttcaggagaacctgaatactcccaggtatatgcagaataacccacctcgtagcaaagagtgtaaattgtggtgtaatcccagcgctttgaaaggttggggtgggttgattgtttgagttcaagagtttgagaccagcctgggcaatatg

SEQ ID NO: 14449 - DNA, 2300 bp, Homo sapien
ttcttttttgagacagtattgctctgtcatgcaggctggagtgcagtggtgcgatctcggctcactgcaaactccatctcccaggttcaagcgattctcctacctcagcctcctaggagctgggattacaggcgctagccaccacgcacggctaatttttgtctttttagtagagatggggtttcaccatgttatccaggcgggtctcaaactcctgaactcaagtaagccacctccatcggcctccccaaatgctcggattacaggcgtgagccaccacaccctaccaaatactatatttcagaagaattcagggagtggaaatgcacataccaaagagggcagttgtggatccaatagccctgcctccaattctcacaatttccagattcaatcttaattcccattccctcatcccaagagaagtagagaaagaccagtagagctggaataatgacaggtggaaataactcagaagccactcaaggcaaaaagcatgcagaggggcctaagggagccaataggattccaattctggttacagaaaaatccaagtcaaaatcactctttgacaatctaaaggaatgagatattaattatgttcccctggggttgtgaaaaacagccctgccttttggagattagaagtgaagcaggtaagaaccatatctaaagcaggagaagaagcttccctcagtaggtggttgataggggtctgggaatcatccaagttaatcagggtgactatagataatccgagtgtgttatatcctgacagaaaacaaagggtggatgtgcattggcaaaaacaaaataagaaaccaatttgcaggcatgagtggaccagtacccaggactctcttccagtagcctacagtagatagagggctctgacttatcggagaagtcctgcttggctggagaagggcatcaagctgtttatcagcgcctcatgcccttaacagttaagaccatccaactaacctggctgttactccatgaatctcgtgcagctttctgaaaatcatggggtctctgcggactttcctgcagaaagagagcccactgattccactacctagataaaggcgtggtggtgggcccctgtaatcccaactactcggtgtaagaattaaagaaagaggaaagaaacacgaaaagtggcttggtggtcataagaggtttattttagagaaaacctgagaggggcgtctggccaagttaggtcagaggcacactctcttacagactaagtaagtttttaaggattcggagtgggagagtttatcagaggcttggactgcttctgtgtctctttgttgtgcttatctcggagggagagttgtgtgtctgttcccatacatctttctgcagctgcagacataccccctgagtctaatttttgtatttttagtagagaggggtttcaccatgttggccaggctggtctcgaactcctgacctcaggtgatcctcccgcctcggtctcccaaatttctgggattacaggcgtgagccatctgcgccctgcctaaactgttcgggttctaacattccagcatcctcctgcggaacgcagccaggccttactcaggccttccaatcaggacccttacagttcctggggctgggattgcgagtctctctggggccacgctttctaagcgtatcacttccaggatacgtgcctccaacagaaggaatgaaggctaggaaacaaaaacgtggatgcgggtgaggagctgtcagtgttaccgccacgacaacgtggaccctgcgaaactcggaggtgccactcaagagccgaaagcctgcccactcggggtggggcggcaacccggagagccaatcaggaataaggagtccggttcatgaaaaggtagccggattctgactgggatactcactgtgagaaggctgggcggagttgcagaaagtcaacagaagccgaatctctgaatttctgttcgcagcctcctaggcggggccgggaaaaaaatccagtagtctgcgctgactgggcggcgagggaccgggaggagccaatcagaagtcaggactcgcggggcttggaggaggggcgcgggcgctgcggcccctgctctacctcctagcgccggtgcgcggccgaggccgcactacctgtctgcgggaaagcgggatccaccccaggacgtcgggtcgctgccggtgagccaaggagggggaagcagagacgagccctgcgtccccgctgcgggagtcggggtcgcccccgagggcagggaggctcgctgcaagtgtggagccgggagtcctat

SEQ ID NO: 14450 - DNA, 2300 bp, Homo sapien
ttaatgcagtttgaagctaagctgcctggttacaactgggtactaggatcatctggaggaatcttcactcagctgtctggcaggtgacactgggacttcatctaggctgttggccaaacacctctccatgtggcctttgcttcctcacagcacagtgcctgggtcccaagaacgaccatcccaagaggacaagacagaaccatatcaccatttgtgatttgctcttggaagtcacatgatatcacttccattgtagtcacaggctcacccagattcagaataaggggacacagaacctctcagtgggaaccatctgtggcacattgtaagaggaacatgtgggatgagagatgttgagggttcatcatcctaaaacatcactttaatcctgtcttcccattactgaccaaaacaaattctggcattaaaggcactctacacttaggcctcaaatgcctttccttacttcctgtattatctcctccattcagatcagaccgaactactcagtcacccacacttgtcagactcattcttctcttgccctttttctcaaggaatccctctcttgacctgagaaattctacctctcacttaaaagtgactgttcactgaattccgcagaatgaactaaggtggcaggcaggggccctcagagatgccataagttacaccacctgaggatgctttcagagcaccacctgcgtgtggctctttgccatcttgccttggctcacttccctgtgtgcttggaaagtagagacgataggcgagacctcaaaatgtaacttacttccaagctatctccttttcaaagcccagatcccccaataattttgcaaccaacatgaagaggagtttctgcccagtgggctgctttttgggagagactgtgagcagatgacttcatattaacccagatctagtcaaccttctagcctgaaaaaacctaaaatgcatagtagatagtttacatacggaccgaggctgaatgagcaaaaaggtggagagatggataatgaacacagaaacaagtatgacaatttcagtaaagaagataaaatggtgcgagtatatgctgacggtagggtattgctttaactgtgctggtcagggaaatcctttctgactggtgaaaagcagagaaagagaccaaggtgaaaattcccccaaaagtgtgaacctgatcataattttttttaatttaatttttagagccagtgtctttctctgtcacccaggctggagtgcagtggtgcgatcatagctcactgcagcctccaaactcctagcctcaagccatcctcctgcctcagcctcccaaagcggtgtaattacaagcatgagtcaccatgctcgaccctcatcataatttttttttttttgagatggagtctcaggctggagtgaagtggcgcactctcggctcactgcaacctccgcctcccgagttcaagcgattctcgtgcctcagcctcccaagtagctgggattacaggcgtgcaccacacacccggctaatttttgttaattttagtagagacggtttcaccatgttggccaagctggtctcgaactcccgacctcaggtgatccacccgcctcgacctcccaaggtgctgggattacaggcatgagccacccggccttcctcatcataatgtgtatgtccaaaatgtatgcatcagcagtaaaagtgaaagccagaatgaaaaaggaaggtgatgagaggggtaaagtctcatgtggttggaaccattttgggaaacaggacaggaatgatagcaattaagaagccggtccacactatttgctatcctaggtctgaatagtgaagagaaaatgaaaggagagcgccaagggtaagagaaagaaattagctattccacctcctggttggctactgtcttcctgccctcttccccatggcacagcaactcctccacctgctgaggaccctagcctaagctgcagcgccccagagcctcagcacccccgcgacccagctcccacgaggggcacgggttctagctccgccccgcaagaaggacttccgcgtcctcggccgtcccgctccccccgccccaacccagcggttctgcgcatgcgcgggggccatattagcagcggttattcggtgagcggtggtggtttattcttccgtggagttaagggctccgtggacatctcaggtcttcagggtcttccatctggtgagcctttggccccttggggcccgcggaagcttggccgctttcccattgggcgggggtcgtgaacgtcaagacagtcggtcccgg

SEQ ID NO: 14451 - DNA, 2300 bp, Homo sapien
tggaaccattttgggaaacaggacaggaatgatagcaattaagaagccggtccacactatttgctatcctaggtctgaatagtgaagagaaaatgaaaggagagcgccaagggtaagagaaagaaattagctattccacctcctggttggctactgtcttcctgccctcttccccatggcacagcaactcctccacctgctgaggaccctagcctaagctgcagcgccccagagcctcagcacccccgcgacccagctcccacgaggggcacgggttctagctccgccccgcaagaaggacttccgcgtcctcggccgtcccgctccccccgccccaacccagcggttctgcgcatgcgcgggggccatattagcagcggttattcggtgagcggtggtggtttattcttccgtggagttaagggctccgtggacatctcaggtcttcagggtcttccatctggtgagcctttggccccttggggcccgcggaagcttggccgctttcccattgggcgggggtcgtgaacgtcaagacagtcggtcccggcctgcagttgccgccgaggagccgtgggcacgatgactctgcaccgcctcctctgtgacggaccgaccgccgggaatggcccccgccggccgccgtcgggggcttcccagtgccaagcctggacgccggggcccgcgagggggcgggctgagggtgggggtctgtgggcaggaccgagagttggggtggcttccgtcctcaggagttcggtacgtgaaagttagctctcccggaggtgccggtgaactcaaaatagtgctgtgcccggcgtcaggcgtggagacaacagaaagttgtgcttaaagctcgaatcagaaatccccggcgagtgtctctgtgtcctccctgcttctctgctctgtgccatccttactttgcaccattcctattgcaattacctcaaccagttcgctgccctcggtctctcaccagccagagtgatcatttaaaatgccaatcagttcctgtgggccttgggaatcattcagaggagccccattggctgagagataaaattctgtttttacctgggcacgcgggctctccaggatttgattccagcttacctttccagtcttgattccctatattccagtatttggaaatgtgggccttggactgaggctttaccaaataacgctgaacacctagtattgccttttgcacgaatggtactgatggtgcccaagataactgcctccacccccaagttcaggacccagatcactctctggagaaggcctcagcctcttgccttggctttcaaggctctgcgtgatttggatactcgcttagctcttatttatatatattttaaaagcatcagcagtttatctcatgcccactaaactatcctgcctccgtaccctttgttcatactttctgctctgtgtggaatgcccttctttcttcccctgttctttctcttagacccaagggttctcagccttatttctgcctctcccatctctgatttactttcattttctgtatcgatttctcaaaaaatactttcttgattctttcatcatcccttttcccaccctacccccggttcctctttccacattataatctatgactgcctctctcacctaactgccagtattagcttttcaggacaggaactggttttacacattttggtattccagcatctagcataatgcctgacacttagctgaataaagggagtaaataaaacagatttgtaaagtcagcaaatgctttttaatttgtgaatcttattttaatgatgatctgattttctttttacaggaactatataaagttcagaaaacatggtgagttaatacacatgccaataaacggttgcctgataaacagtattgcttgtactcagtttacagacttgagtgggaaaattgaaatagaaggaaagcagtgagaaggtgccttttttcttgtcagtttcctctcacctattgaactttgtataccaggataggttttgtaagatcatttgtaggcttgcaggagttggcctactttcagtgggtaggaatcactcatgtgtttttcctttgcagtctcgaagatatgactccaggaccactatattttctccagaaggtaaaatagaaattgtttaatctgcctcaagtttaaaaataaatgtgttagacttttagaaaaaaaaattacaaactttttttggtagttgcaaagttcatcctttttgtactttgaagcaattatcatcaccaggttgattataccatagaagagt

SEQ ID NO: 14452 - DNA, 2300 bp, Homo sapien
gcgtgggtttggatattcagaagaggggagaaggaaggataaatgaagacaggaaagtgtaataaaaattccacaatcttcagaggaaaaggtggtgtctgggatgcaagaactgtgtaatagtccctttggctaagtctcagaaagttggtagatagatgccactttaggggaactttgtaggtggtggctgcagcaacagcagcaattttcattgtcatttggtcagctaatgtctcctagcagtgtgaagatgcctgttatcagagtcaggtgtagcaccatatccagcaaccatgagtaattggcgtatccccctggaaaaaccatgtaagatgtagacattatattctgattatttgtttggattttaaaatgcccaacaaatgtcacgctttgcctttcacttaatagcaacaattaatagtgtttttcatagattatgtaaataaccatcattctcatgattattgatataacatctaggagttccaattatacttgcagtggctgcactgacaaccatttcattctagttttgccactgacaggtactgtgaccttcagcagttattcaactcctctgtttcaaatcagttagctgtaaaagcagaataacattttaaagtcatccaaacactgttaggatgaattgcataagtgcctgtaagtcccataaattcttcagagtaaaatgtaaatttgcagtgaaaggatgataggtactgtctttcatttctgtgcagaagtgcaattaattactaatctggttaacatcttgtgcatcccttttctgtggcccctttgtttaagtcctgtttaaacagattggctccattggatgtaatttacatttttccagctgtatttggacctaagaagagcatcttcactgaattttgctgtttagattctttgcaaccaggtttagtttttcacagatttactagtctggagggtggagtgaaatttttgctcacaatgagtcttagaggtgtcacctccataaagcgttctgtgaagagtcagcggctccctctgccactgaagtttaaagataattcgcctgaatcccttcagccaaatgaagctttctaattatggacagagaggatgaaatatagggtctggagggatttgagacgggtttccagcagtcggcaccaatctccaccagaggtgctaagtgtctgtagcagatagtcactaatatttacaaatgttaattgatgacaacacggagggcgatgcccacgtttgaggcgactgcatatcatttccggggatggcttgagtgagtgtcagagctgtaccttcccgagtcctctagtttatctgcctcggttcctcgcttccagacgaggaaacaggcccagagaggaaagtgacttgcccagggttgtctcgctggtccacaacacaggtctcctggtggggaccccttggctgacacgacagccccaggaggcagtcaagctgcgactggtacttcctggtgagaaagacttgagtgggcagcggggcccatggagagcgctgcagcctggagcaagtcccccaccactgtgattctgccccagcctccagcttgtttctttctgatcacaactcggaattactttatttacattttctatcagctgggagcaatctgtccctctgcttccccttttggtgctgagcacagagcagacatcaatgaatagctgttatcttaaggtgtgcagtgactaggccaaggacatccggtggttagagaaggacgcgcctgcgatgccagcctcaagtctttgccttcctggaactctgctccagggtcgcacctgcccaaaggaaggcctggaggcgggggccagggcgatggggctgggccaggcgtggaaaaagaggagctaggagcagacagggttggaccagaggcggggcggggtggggaaagggttggtggggatcggaggcggggctatgaatagaccggactgggccaaaaggaacaaggcgaggattgggcggggccagagggaaataggggcggggctaggcgccgggagcttccacatgcgtcccgagcccgccagaagctgctaggctgaggctgctgtcccggcgggagctgtggcgcggagcggcccctctgctgcgtctgccctcgttttgtctcacgactcacactcagtgctccattccccaagagttcgcgttccccgcgcggcggtcgagaggcggctgcccgcggtcccgcgcgggcgcggggcgatggcggcgcgggggtcagggccccgcgcgctccgcctgctgct

SEQ ID NO: 14453 - DNA, 2300 bp, Homo sapien
atttatttaaacactcaggagggtgattgctaggttatatggtaagtgtatatttaactttatatgaaactgttgaggccgggcatggtggctcacacctgtaaccccaacactttgggaggccaaggcggcagatcacctaaggtcaggagttcaagaccagcttggccaatatggtaaaaccctgtctctactaaaaatacaaaaattagccaggtgtggtagtgtgtacctgtaatcccagctactcgggaggttgaggcaggagaattgcttgaacctgggaggcagaggttgcagtgagccgagatcgtgccactgcactccagcctgggtgacagagcgagactctgtcaaaaaaaaaaaagaacaaaagaaagagaaagaaactgtcaaactgttttctggagtggctataccattttgcaatcccaccaaagtatgagagatccagttgttcagcaactggattccaccctggttttaatttgcgtgtccctgatggctagtgatttgaacatcttccacgtgcttttttttttttttttgtcttctgtatacctctttggtgaagagtctgtttaactcttttgctcatttaaaaaattgttcgttttcttaccattgagactttctttagaaaacaactttattgaggtataatttacataccataaaatccacccatttgaagtacaattcaaagagttgtcgtaagcttaccaccagaatccagttttagaacatctgcatcaccccagtaagacccctcatatgcatctacacttagtgttgagttttgagagttccttatacattctggatacaagtcctttgttggatatataacttacagtattgtcccaatgggggacatttgccaagagttgagaatgctgtaattggaggcctgagaggtgggtcccaattcttacattttccattccacaaactgtctccttttgtttggttttaatatgggtaaacagcacattctggaaatgataaaggtgactctccatttgctgaatgccaggaggagagtttatgacagaacttcctcctgcaataaaaggatgtcaaagaagccaacatcaaggtgccccccatccctggtgggtggtcagagagggcaggaggctccagggcaccctgcctggccaatcagtgcacattcttggggttgcagatggtggcggggaaggggacaggttctgcaggggactagggtgggaaccccattgccctctcagattgctccatcagaagagcagatgaggctgcacacagtggctcacgcctgtaatcccagcactttgggatgggaggtgaactaccgtcacagctgtagttcatttgcttgatacaccgcttcctttcaacccccacatcctcaccacctgtttctttgatcaccaataaatagcgtgggctcccacagctgggggccttcgtagcctccatacgttggccgcctggtcccgctttctctcttgtcttttctcattcttttgactccgcctgactttgtcacccccatggcctggggttgggtctgatcaccccaaaaaatttttcattaaggaacaatccaaacgtattccaaagttaagagaacagtataacaaacctccaggtaccatcatcctgcctcgacaattatcaactcatagccaatattgtttcaactaacttccacccacccctaagctataaggacttaaaaaaaaaataccagtactatatctaagtttttttgttttgttttgttttgttttgagatgaagtctcactctgtcacccaggctggagtgcagtggcgcaatctcggctcactgcaggctctgcctcccgggttcacgccattctcctgcctcagcctcccgagtagctgggactacaggtgcctgccaccacgccgggctaatttgtagagtatttttagtagagacgaggtttcaccatgttagccaggatggtctctgacctcgtgatccgcccgccttggcctcccaaagtgctggctgggattacaggcgtgagccactgctcccggctaaaatatttaacaattatttaatagcatgagatacacaaggcgtccttcccagggtgtgttagcgtctctcctacggcgcccgcctagcccggtggtcccaaccccctgcgggagctgcacacgccccggaaacctgggacagaaactgagtccctctccttcctggtggtggtgacagcacctgctcagatctggtcggacgccgccggccggagcacccagcccggcggagaaggagctc

SEQ ID NO: 14454 - DNA, 2300 bp, Homo sapien
ctagaactatatatttaaaagtcaattttattgtataataatttttaaaacagaattttttagaacatcctcctccattccacaaatattttgagtgcctactacatgccaggcactgtgcaaaaggcagtatgtgcgaggagtgaatcagagcatccgtgtgggagacagacctgaacccagccatgagagagaagtggaaagtgaccagcaccgcagtcatggaggagcaggtcatgcctttcagatgggggaactagggatggctgctcagaggaggggcatctggacttgaaggaggggtaggagccattcattcattcaacaaacatttattgagcacctactgtgtgccaagctctgtcctaggccctggggatactaccacgaatgtgaaggagcaggtccctgttctcatggagctcacactctagtgggtgagctgtggatgacatacatgccaccagataagagcgacaggtacacaggagtgctcgaggaaggaggcagggtaacgtgactgtagggaggctgctttagaatgattgggtggttagggaaggcctctcagaggaggtgacattggagcaaagaatggattggagccatgccctgactgatgtggctgtggaaagagcttgggaagccctgggggaagaggaagaaggttcaggtagaagatagggaaggccaggcatagtggctcacacttgtaatcctagcactttgggaggccgaggcaggtgggtcatttgaggtcaggagttcgaaatcagcctggccaacaaaaatacaaaaattagctgggcacggtggcggctttctgtaatcccagctacttgggaggttgaggcaggagaatcacttgagcctgggcgatatagcaagactccgtttaaaagaaaaaaaaaaagatgatgatatggcaaatgccaagcctctgagctgggaagaatctagaagtgtgtgaggaactggacaaggggaagtggagagagatggtgatggagaggcaggccggcaccatgcctgaagcatagtaggtgctgctacgaagtcatctttatccccattgcccggtgcagggaaggaagacaggccagaattgaactgtctgaagctccctcctactggggcttcctgggatccctccaaggcattcagagaggacagcccaggcccccatccttgcctgttccacggctgtggctggtttgatggggttgatggccaatgctcacatatttacttagggcctcatcagccacaacccagaaagaagcagcaaagtgcccacccggccactcacatcctctcaccccacaacccagggggccctcagtcacgctgggcagcgtagggcccctcagaagctgcatgggtctggaagaggggcggtaggaagagccccacagtgcccaggacgcacacaaacatgaacacccacaggaacagccggtccaccaccatagccacgtacttccagtcctcaacgacctgcaggcagacagaggagttggtcacaggtgccaagtactggggtccctcctttccccgagtcaggcccttactctctggccagggactccacaggccacaggcgtggaactgcatactaggggggcaagttctgagtcccaggctggcctcccagctgggcagctctgagcctctctggctgttctccacctccacccctgcctgtcccccacagcgttggaggggcactgggaacttgggctgtacagaaaagctaggaatgtgagggcttgttaatactacatattatgatttgaaaacaaaatctggttatacataggagatagggcctgaggatctcaaagccccaacttctcatttttaccccaaactcactgcctgagctggttctagctaaagaaagaactaggtggctcccacctagttcagtgagagcagagaaaccggggcttacagaacacctggaaatcctgctgtttaatttgttcaagtctgttcacagcagtgtctgtttcctgtaattaagacccagcctcctcctgctgcatcattcaggtctctctggtcttcttagatcctgctgcggggtgtgaggttggcagagacctggctggcctccagaggggccaccagagatgggcctgtctcctttgcactgggggagaacctagagaaacgcctgtgtgcccagggtcctggcctccctcgccgatgcctgctttcacacccctaggcctggctggctcacactgcattcattccctggcagagacgggctggatcagaaggcttcggagatc

SEQ ID NO: 14455 - DNA, 2300 bp, Homo sapien
cctgggaggtgaaggttgcagtgagccaagatcccaccactccactcaggcctgggcaacagtgaaaccctgtctcaaaaaaaaaacctaacttgctaatagtgaattatctgatgttgactctgcccttacgttattgtaatgaaacctaattcatcatgatgcattgtttgtgtgtgtgtacattgctgtattcaacttggtattatttaaaattttggaatccatgttcataaaagttaatagctaacatttatttggttttctaggttctgggtattgttaagttactttacatgaattatttcattttatcctaaaaggcttattgtgaaggttattttccccctttatatatgaggaagttaaggcacactgaaggcaaatcattttgcctaaggtcacagagaagattagtggcaccagaatacaaatccggatgcctggctccagaagcaatgcactggccactgctctgtgctgtctctctgtgacaaagacccataattcagattgttctataatgtgttttccttgtacatccttgttctagttttgtaccaagattatattattctcaatagataattagctcttctttttatttaaagaaaatacatgtcaaagctctataaaaacctatttcatcgtatcccctttgctagcctaacttttacagctctgcagtggcctccaggttttatgtcctttccaagctcctgtcctgggtatattggggatgtacacatccgataaagccagggatacagaccacggatcagcagcaggcctcccgctcccagcatcctttcaagtactggcatacacccaagctcccagcttctagccaagagtcttttggtccccgcttatcccaaaggacctgccactgtctttggtttccaaagcccaacaggctccaggctcttcagcctccaaccactttgcatttcttttctggttttggttcatggagatgattatcctattttccagccttgccatgtctttatttactttacatatcttacctattactgctgcagtttggagaagagaggatgccctcaatcctaacttctccaaagcatcccaaaggggaagtccgcttcacttcaacagtgttgttgttgttgcttttaaagaccatatgtcaacatgtcagattatagcaaaatgacgtggggggagcaatatgaaagcaagactgagagtcctggagataaggtggcaaagctgcctttttacaggcggttcccttagaccccgcccttcctgtcttgttcctccagttgtcagatttgcctgttagggcccacacaagggagcaggtatgaggaccggactgagagagttggagaagctgccagaggcccttctagatccagaattgaggctgcagttcccgaggtgggggctgtccccccacccgcaagggaatggtactgattccaaaaacgcgtcaaggacaccctggctagtagagggatgtgcttgaatcacctgagcggcctctgttcagcccagattggaaggcccatgggggaggacgaggccagcccactccagccccattcccttttaactctgctccttccccagcccccaagctgggtgaggggccctgagctattcaccctcccagattccactcacttttcctaagtgtcctccctgcaaagtctgcagagagcagcgctccctcgcgtcggctcacccagcagtgtcctttctttcagcaaaccccatgcgaatgaacctgagatgactcatttgcctaaaagcgtcttcgaggtgagggaaggcaaagcccaaggacctccccgctcaagcacatgctctttccccaacagtagagggatcctgcgctagcgtccgccgccctcgagggctcagtctccccagctgtaccaagggtgcccgcactgtcctgcctgccttccttgggggaaggttgcgaggcccgaagagatagggaagccaggcggcaggtggggtccagaccacccagggggcgtcggggcggagcagcgggcccagtacatccctgagtgggcggggctcggcggggctctccgcggggtcctagtgagcgccgccccgccagcaaacctcgggggccaggaccggcgctcactcgaccgcgcggctcacgggtgccctgtgaccccacagcggagctcgcggcggctgccacccggccccgccggccatgaggcgcgcgccttccctggtccttttcttcctggtcgccctttgcgggcgcggtgagttcttttcggggaaggagggaggggcgc

SEQ ID NO: 14456 - DNA, 2300 bp, Homo sapien
ccaccatgtccagctaatttttgtattttaatagagatggagtttcaccatgttggccaggctggtttcgaactcctggcctcaagtgatccgccagcctcagcttcccaaagtgctgggattacaagcatgagccactgcagcccgccagcattacctttttttatagtgaacttgtattgttttgccattaaaatatttttaaaaagtgcaggggtaagtttaaaaataagtaactttcactgtagcctagttgacctcactcagtagagatgttggtggctgaaactagcaccacccagtgccagcaaggagtaattgcaggttccagtctcgaccggttatgtgcttgcaacaaagctgagcctgcagagttcaagtgacagtgggatggcaacaggcaccattcaagaggactgccagagattcatggccaaatctattctgccaagtcaggaggtctgttctgattggaccaagctcctgccacattgggtgttaaatacttttaatatctcccctgggtgacagaactgtcactttggagcttctaccaaagaaatgccaagatggtgtttaccctcacctccctatcaagaacctgagttacaatccagcccttcaaatgacccacagctcatgccaaggaggaaaaataactggcagggtggggggtagtatgtgaatgccctcctctgtgagttctagtatgcacagaaacacatgcacacagagttcacatgtgccatacggcatgaggaggacacatgactgggctccagcctcagaaaccctagcaggtccctgggtcagtcacaagtggggaaaagggatatattttcctaaaagtgagcccaggatgagccctttggtcttaaagaaggtaacattcagtggtaggaggagccccaggcttaggtcctgggcttcaaagaaaatgacaaacaggccagcagcctcagagtcaccaatcctgagggagtgcagaacaggaaggaccccatgctctatatctatgggaacactagagacagacttcacccttggagtgtttgtgcccagattaggttggagagagtgcctggcctgcctccaccctcaaacagcaggtccaggtcatctggggagtcctgggtcggcctggcagattaataaaaataatgaccactacattgtagtcactgtgtcctgcctgagcaactgacatattcaatatctcatttaatcctcataagaatcccacgaggttgaccgcacccaactcttcccacagctgccagggggccaggacccaagtcctgagggaagcattttcctgctctcccattcccatcgcccggttcatcctcctcagcccccagctctggacagtggaaaacacaagcctcattcaggaagctcaggagtccaaccccacaggtcgctctactctgagcctgtttgctggtccataaaaggactttccatcacttgctttgcacggttgttgtggagatgatgagaaataagaacccgtgaggctggcacacagtaggtgctcattaaatgttcgctccctctgcgctctgcgcatggctgctagaccaaatctttccaaaacactgctttcatcagctgctcccctcaacggcttcccaaacctctaagatcaagagtcaatgtccccatccttcccgcccagactactttctcgtcacaatccctccagtggggaggcaggtcgaccccatcccagcaagcaaccctaatccagtcccccgactgatgctccccaggggagggccccactccctccacgcccttctagctcatccagaatccatccatccttccagtctctccaacctcatgcccctcctctcctacaaagcctgccggtcggctctattgcaggactctccccactatccaccggctcccctgactgggagctccctgagcaccgggcctggggtctcctacatcctcggttactgaattcccaggccggctgcgtcggacgcgccagcagcgcggccgcccggcaggtcgccgccaaacaagagtctggacgcaggccagaggctcgtcggaggccggcccggcggggcggggagagttaacccatggccgggaaaagaagctcctgctccccgctccactcccggcgtcttcacacttggggaagggagaggcaggaagtgcaaggaccgcgcaagacccggccccccgagccgccaggggccgcgccagcagcccagatgcggtgggcgggagctgggggggcggcggggtcccgcgaagacctgcgacctggcgcc

SEQ ID NO: 14457 - DNA, 2300 bp, Homo sapien
agggcctcactttgttgcacaggccggaatgcagtggcgtgatcttggctactgctcattggtggggccaggcctggcccagcctcaatctcctggactcaagtgatcctcccacctcagccccccaaatagctgggatcacaggcatatgccaccatgctgggctaatttttaatttttttgtagagacggtgtttcactatgttgcccaggctggtcccaaactcggggctcaagtgaccctcccacctcagcctcccaaagtgttgagattataggtgtgaggcaccttgcctgctttttgtttgtttgtttgtttttccctagagacagtgtctcagtatgtctcccagactggcctggaacttctgggttcaagtaatcctccctcctcagcctcctgagtatcactgggactacaggcctgtgccactatacccagctattatcagtatctttaataggaggaagacaagaatgtttttagactgacggtcaccaacccaaggagaccaaggaaagcgggggacacctggagcaggacctttgaggagacaggaggggagggagccacagagccctggtggaagcattgtctctgactgctggagggcacctgtttcactgtgtccagatggagggagaagtgagtgggtgccagctacaaaggctcattgtatgcagtgtgcatggtaggatgtggtggtctgaattgtccatgtcactgagcagcaagaccagctggtgtaagcagtggggaagaaatgcaaggtggttgggtaggggccaggagtcaagcagtagatgtagctgggagggaagtaggtgaagccaggaggggctggtaggttgggcgaagaggaaggtatcaagggactggaggaagagcaatacatagtgggactgtgaaggtggaaaggactgcagagtcgggtctgacaggggggcacctgagcttcggatttccaagatggagcagttctgagggatgacacagcccaggctttggccctgagacctgatggctgaggtggagtggaaggtcactggagatgagatggaggaagtaggtgaccctgtactacacaaattccctagaggacagacaggttgagggtggagaggaagccagaagtgagcttccaggaattgaatgaaagggcccaggagattggacaatgaggaggtgtgcgggcctcagagggcagggggcacacaaagactaaccaaggggaggaagctgaccgcaaccgccccgaggacaagacgggcgtcctcggtacagggccatgtttagtgacggcagaagggagaaaggaagctcctgggagcacagggggaaggggagccggaagccagagccagggctggggccacgaaggacagacggccggtgttggaggcggaggctggcctgggatgtgaggctggggttggccggcctccaggctccccgggagcccctgctgaaagtctgtgggcgctggcctgggcgaagccgcggtcccccgcctgtgggctcaactctgcgctctgcttcaagcaaacgcactaggagaggagtcaggagacgaggaactgcggggccccacctcgcgcgggcaaccgctgtctgtccagggagggcccaggcctgtctccgcagatagctttgaagcagggcccccggtgtggccctctggaggcctcccgcgtccccttttgaggggctgccctgcttggcctggggaacacagcgaagggcacctcgtggagcccaatttagggacaacacattaattctggaaattccagattctttccgggggtcctcaaccggccggggtcggaaaggcctggcagggctccgccggcagggggcgctcgggacaggggggcgaggggggcggacatccgttgcggggcgctgcctgcgccgggccggccagcccttgaggcgagcacggcctgcggggccgatgaggccggggccggccggggcggggcggggccaggggcgggggaaggagtccgaggggcggggcgggggccggcagccgccctccctcactctccctccctttctttctttctttctttctctccttctagctctcttgtcttttctttgcctctgcagcggccaagggggcgggccctgcagcctttgttgcccgcggaccgagcgcagccgaacggagtcggggccgggtcgccgggagctgcacgccggccgggcatgtcctgagccggacctgggaccaggcagcgaccggacgggacggacgagagcgtgcgcgcggggtcacccggcggccgcc

SEQ ID NO: 14458 - DNA, 2300 bp, Homo sapien
cctggctacggagcgagactgtctcaaaaaaataatttaaaaaaagtacgtattttatattcaataaaaaatttaaaagtgtacaggacagttttggtggggtggggtccaaagaagcccttgtccctttttacaatttagcaatggtgtccaagggagtgaatacagtcatgggttcttagtttctgtttctggttgggccagtaaagccccttcctcatcccccttttccacttatcactagagactgaaactaaaaaccatggcttcagggtgctaaaagcctaaacaaaacaaaacaaaacaacaacaaaataagacaggttggacaagcttgcgagaagtagtcgtgacaagatggtgtatattcaactggaataaggaaggtttttgtgggtttctgttgtcagagaaggggttgtgttaaaaagactgaaggagaaatggaagtcagataaatggagaggggcccggaattggtggggtgtggaacccgggcaggggagggcttagaaaagccatggagacaggctgggcgcagtggctcacgcctgtaatcccagcactctgggaggccgaggccagcgggtcacctaaggtcgggagttcaagaccagcctgactaacatgaagaaaccccatctctacaaaaacacaaaaattagcccggtgtggtgtcacatgcctgtaatcccagctactcgggaggctgaggcaggagaatcgcttgaacctgggaggcagaggttgcagtgagctgagatcgcgcctttgcactacagcctggttaataagagggaaactccgtctcagaaagaaaaaaaaaaaaaagaaaagtcatggagacaaaggtttgcgtaggaggataaaggtttacataggggatgcaggtaggctaagggctgtttgtggaaggatttaaataccaggctaaggactttgagatttatcgtctaaagttcattgagcacttattcattgttgggtaccgcgctaagcccgtatatgtaattctcacaataaactgacggaaatggtgctattttgcagcttagccaacaaagttgtttttgaacagggaacgacataaatccgtttgtttaggccaggcacggtggctcacgcctgtaatcccagaactttggaaggccaaaccgggcggatcacgaggtcaggagttccagaccagcctggccaacatggtgaaacccagtatctactaaaaatacaaaaattagctgggcgtggtggcacatgcctgtaatcccagctactccggaggctgaggcaggagaatcgattgaacctgggaggcgaaggctgcagtaagcagagatcgcgccactgcactccagtctgggcaacggagcgacactccatctcagaaaaaaaaaaaaaggtataatattgaagaaatccgtttgtttagagtgacaagaagcacaaacagggcaggtacggaatacagacgttgacatattcacactagcctttttcagaaagcagagctccattatctcaaaaagctaaagcgtgactagtgtttcccacgtcatcatcctcatttccgcaaggctgggctggagaagaggaggtagacctaggagccaacaaatggctatcaatcccaccaaataggctccgcagtggggttgctaaacaacgaagcttccagaagcggaccccagttcccaccctcttgctgatcctaaagcctttctatgcaaaaactagcggaatgctattgaatgtaggtttccgagccagccctattctctccgactacttcaacatcaacgggggcttatttgcccaagggacgtcgcaactgggcctttcccattctattatcactggtggctcaccacccccactctcccccatcgccagctccgccttaacctcccacgaaatcaaatccccgctttaccaacccgcagcagccgggggcatggagagagaagcgggggtggggtggggtagggtagccggcccctcccccacccggggggggggggggggcgcctccaccgactccgaactaccagtcccggcgtgccctggggcggcgcgggcgcaggggcgcgtgcgcggcgggctgtcgttggctggagcagcggctgcgcgggtcgcggtgctgtgaggtctgcgggcgctggcaaatccggcccaggatgtagagctggcagtgcctgacggcgcgtctgacgcggagttgggtggggtagagagtagggggcggtagtcgggggtggtgggagaaggaggaggcggcgaatcacttataaatggcgccgaag

SEQ ID NO: 14459 - DNA, 2300 bp, Homo sapien
cgccgaggctccatgcggccttcgggagaaagcccagactccaactcagtctccctgtctcttttactctcccttctttttttttttttttttttttttttgagacggagtcttgctctgttgcccaggctggagtgcaatggcgcaatctcggctcactgcaacctccgcctcccgagttcaagcagttatctgcctcagcctcctgagtagctgggagtacaggcacccgccaccacgcccagctaactttttatatttttagtagagacagggtttcaccatcttggccagactggtattgaactcctggcctcgtgatctaccgcctcggcctcccaaagtgctgtgattacaggcgtgagccaccgtgcccggccaactctcccttcttaacctcacgcccaggcccagccacatgctggttcctaaatgccaggtcctaccctccctctagttctgtcccttgtcctgctgccttctctcctgccttgaaagggctgcgcttccctccttgtgaccttacccctgcacctgcctcttgccagcattgttttttgggctgagactgtccccactcccctgcctcacaggctctgactcggcctccacttctcagtgagtttcctcaggccgggtgaggcccctcctcaggctcccaccacacaccatgtgtgcccacctctgccaaagccagcacaggaccatctgctaccagaccctaagctccttgaggacaaggatgctttaattctctctgaaattatcccatcccccaggccctggcacatcttgttttgtttagtaaatgttattgaactgcgtggggaggctgagacttcgggtccataacctgtatttcatgccctttgcatcctcaacaggatggttattgcaagttccaacctggaaaggccatcggctttgtcaaggatgtagccaacatcacaatcgtgagtgccgatccccctctgggatggggaatgtgtcctgatgaggaggcctctctcatgctgtcggatagccagtgggcccagcaaggcagcccttctggcagcacatccctttgacgagttcatattatccctgggtctcagtcgctgtgatggtggcgaggcaggagatgggagggagagcgcaaactggcaggcaggccctctggttctgaactccagatccacacatgccttcattcttttggttctgttttcttgcttgtaaaatgcaagcaattgtccgcatcctgcagaagagggtatgagcacgtgcttgacacagcgtgtgtgaaactgaggagggtgagtgtgtgtcactcaggatgagccaggttctgttgcaataacaaccgtgcccaatctgcatggctgacaacagtcaaagggtgtgtggcactcctgcgcccatgcacagcttagggagggtggtgtgtgctccgtgtcattggcctcacgccaggactagagggaaagaaggtggtaaatgatgccctagctctaaagccaaaacaagccgcccagtcacagttgacctcaagtgaatagggaagtgtggtcttaccctgcttctcccagagagaactggaacgtgaatgaacgccttcgtgactgcagtgtgcatgcatgcaagtgtgggagggtgtgtgaggagtggaggaatatcgcttaggttgtgtgtgcgcccacgaatgtatgtacagttcacaaacgtgatgtctgtgtaatgacagcggctgccatttagttgaagcatgtgccaagctctcagcaataacatcttaacttgatggagtacttctaggtgctgtaccaaccctcaatacgcactatcccctctagacccgaactggccctaggagatgagtatccttattacctcatttgacaggtgaggaaacgggggctccaagtggttaagtaatgtgcccaaggccacagagctaggaaatagatgctggatttgaactaagaatgtgtcattccagaaccagggctcattgccttgacaacatacagcgcaaatcctgtactcaggatgtcaccctcttcagaatgttgctgctgtcactcaagctggctgctctgggccatgatatcccaaggacaggtgaatttgggcctcaaaggtatccctttgcatggtccccaggagagcctcattggtgacacctgcagggccctgacgaccaggccagaactagcattcagccctcttgggcaggcccatggggtggaaatggtgccacctgcagaagtcatcgcccctgtgctgggctggcctctgtgccctccatgtctcagata

SEQ ID NO: 14460 - DNA, 2300 bp, Homo sapien
gggaggccacgagagagctcagatctggctctactcacaggttggaaagatgcatttttaaaaagagagggaagggcacagaggctcacatctctaatcctagcactctgggaggctgaggcaggaggatcacttgagcccaggagtttgagaccccatctctactaaaaatacaaaaaaactagctgggcgtgatggtacgagcctgtggtcccagctactcaaaaggctgatgtgggaggatctcctgagcctgggaggccaaggctgcagtgaactgtgatgatgccactgaactccaacctgggtggcaagagagccaggccctgtctcaaaataaataaataaaaatttaaaaatgaagagacagagaaagagcaagcccagagcagagagcactgcagtaggtcaaggctgggttcagacactctctgcgcacagactgggaaagttaccatctactcttgtggcctcagtttcctcatctgtaaaatggggggtcaacaacatgccactttgcaaggtgatgatgtaagtgaagaacagggcatcactgggcatttgaggctacggcacaggctggtctgaatcaccctctcctcacccaaagcagtgacagcaccggcctcctcagcctggaacgcacgttcttctgtctgtctcacacccagacccttacataccatcttctttagctttgcaaactacagagaatggccctacagctcttaatgtagcttcctcagcagaaagactaaaatgtctgttgagggggcaaaacaattcacaaggaggtcgtctagcttcttcagttgtaagtccactccaagcaaaagggaagccagggaaatgtggttaaccagggcagggagacgtggggagtgtgggggaaagtctgaggtggagacacacagggacatggggggtatgaggtggggacaggcagggagatgggggtgcaaggtggagacacgcagggacatgagggggtgtgaggtggggacaggcaggaagatgggaggtgcaaggcggggacaggcagggacataggggtgtgaggtggggaaatgcaggaagatggggggatgtgaggtggggactggcagggatatgggggtgtgaggtggggacaggcagagacatgggggtgtgaggtggggacaggcagggacataggggtatggtggggataggcagggagatggggggtgcgaggtggggacaggaagggacataaggctgtgaggtggagacaggcagggacatggggggtgtgaggtggggacaggcagggagatggggggtgcgaggtggggacaagcagggacatggggagtgcgaggtggggacaggcagggacgtggggcgtgcgaggtggggacaggcagggacataagggtgtgaggtggagacaggcagggacatggggagtctgaggtggggacaggcagggagatggggggtgtgagttggggacaggcagggagatgggggggtgcgaggtggggataagcagggacatgggggtgcgaggtggggacaggcagggacatgggggtgggaggtggggacaggcagggacatagggggtgggaggtgggcacattcagggagatgggggtgtgaggtggagacaggcagggacatagggggagcgaggtggggacaggcagggagatggagggtgcaaggtgaagacaggcagggacatggtgtgaggtggggacaggaagggacatgaggggtgcgagttggggataggcagggagatgggggggtgcgaggtggggacacgcagggagatgggggacgtggggatggcgacaggctgggagagggagaggccaggctgagacctccccgcgcggtgccagccagtccaggcagatccaggactcagccaggcctgatacccagataagcccttcctcccagaggagataagggagcgacgcggccggccgacaggtgaactagagctggcgagttagtcggcgccgccccctcccgcgagcccggcctcgggggagtaccgcccaccccgccccgcgctcgctccgccccgcgctcgctccgccccttcgcgctcccgccgctcctccacgctcgtgccgctccccccccgcgctcccagttgacgctctgggccgccacctccgcggaccctgagcgcaagagccaagccgccagcgctgcgatgtgggccacgctgccgctgctctgcgccggggcctggctcctgggagtccccgtctgcggtgccgccgaactgtgcgtgaactccttaggtacgcagaggg

SEQ ID NO: 14461 - DNA, 2300 bp, Homo sapien
tcctagaagtgctgggaacgagctgctaatcagacatagtaatcactttatctgtgactattaatcagcatagcagacagccggttccaacctttatagtagcagagtcaattagccaagacaaaagcagcagactttatttttctcaagcagctaccaaaagattcccaaacatataataagaaaatttggccaggcacggtggctcgcacctgtaatcccagcacttcaggaggccaaggcaggtggatcacttgaggccaggaattcaagaccagcctggccaacatggcaaaaccctgtctctactaaaaatacaaaaattagccaggcatggtggtgcatgcctgggatcccaactactcaggaggctgagacaggacaattgcttgaacccgggaggcagaggttgcagtgagcccagattgcaccactgcactccagactgggcgacagagcaagatgctgtctcaaaaaaaaaaaagaaaatttttttctttctgctctggatttatgtagcggggaaaaatgtgcctttagttccaaacaactgacaagtaaataagtcttggaaagatactttttggagcagggggctgcctgtgaggttagagctcagatctctcattgcacatttaatgcgcaggcattcagcaaaatgcttcagagcaggagtggggtggggagagaggagaagacaggataacctaactcatgtgagtgcatctttctgattttccactcttaagatttctccccagggtgagaaaaagggaggctcttctctcacacagcctccatttccacttgcctctcttggagtggatctctcacagtaccatgtaatcctagcgttttaatacattttgtcccaacattttattataaaactttttattttattttattttattttaagacaaggtctgtacccaagctggggtacagtggtgtgaacacagctcactgctgccttgacctcctgggctcaagtgatcctgctgcctcagcctcacatgtaactggaaccacaggtgcacaccacaatacccagctacttttttgattttttgtagaaacagggtctcactttgttgcccaagctggtttcaaactcctgggctcaagcgatcctcctgcctcagcctcccaaagtgctgggattagaggcatgagccaccacgcccagccttatgaaacttttcaaatatacagaaacactgacagaattgtgacagacagatcaaacatacagaaacactggcagaattgtgaacacatatatctgccacctagtttctacaattgacttttttttacttttgtaccagccttaatattatgacaatattaaataataatcctaagacaatacttacgtcgactgcttaaaacttatgtcaagatggaacactactgaatgcatttttgcctcatatgcccacctgactctccacagtaagaggcttgggccctaggagataaagtgcatccacaatcagtactatggaggtcccacaaccctcccattcccttttctcttttcttttctcaggtaacgcaatatttactggaccaatcttttgtaatggatgaagaaagcctctacgagtcttctctccgaatagaaccaaaactccccacctgaagctgagcccagcccagacccagctgctcccggggacatgtgctagatgatactgtacatattcgtttggtttcactggattttcttcttcagtatgtgcttctccaagaatacaaatcgtccttgttcttagattcctgtagaaccggaatatgaatttctgcaccgtttcagacttcgcccacccatccctcccctcgtctcctgcagtgcctgtttcttttaaacagctgtactcttggtccctcttccctagactcctcactcttctcagaggggaaacagcacccttgcatacaagaatcttagactccagtcctgcttccgtccctccccagcccaggctcctgggttgaggtggccacccaggcatcctcccagcatgttccatgtagttgttataactgggtggggggtggggggcggcgggagggggaaaccataccctgaagtccagtcattgacaaatcttcccgctgatggtgatgtcaatttccaaagcagcttctccagccaaaatcgcaggtctcaaaactccccatgtgtctcccagtaacctggacggaagggagtcctctctgctcagaaccacacccctcgtaccaatgctgccatctcgttcaggccccacgtcgctccttgctctaggatt

SEQ ID NO: 14462 - DNA, 2300 bp, Homo sapien
caaggcttttgggggtttctgaccacccagatcagtgaaaaggatcagaggtcctctgatcactgagggtcgacttcccctggtatttatggggagtcatggttcagctgtgggaaggtggtggatttgcaatcgaatcacttgcaagtagcacgcccagccccagtactaacctctgtccctatttactacctctatggcaggggtggccaatcttttcgcttccctggccgcattggaagaagaattgtcttgggccacacgtaaaatacactaacacactaacgatagctaataagctggaaaaaaatcacaaaaaaatctcttaatgttttaagaaagtttaccaatttgtgttgggctgcatttaaaaccatcctgggccatatgcggcccttaggccacgggttggacaagcttgctctatagtgaggggccatgaaggaggggacaagagaacactcaatcaaacacacacacacacacacacacacacccatccgaaatccagagccatgtgggcaaatgtatggagttgccagattgggacagaggactgctggagggccccacagggacacacggcatagggactgagccacaccgagcctctgaatgaaaagggaagcatgttggggcttcctgcaggcaagacacccaacaacaggcaagtcctgaaccttccatattggccttttggcctctctcgggtgaggtccagtcttgcccttggcagggcctatcaagcagagctgatacgggggtggcttcctcttctggcagagccctcacgggcctgcagctagcattttagggagcagagaggaaagtgtcccacccctagcctgaaagctgcttctggtttctgggcaaggcctcgctgtcgcactcccatgctggtgacacctggccttgcctgtggttgtttggagcccccaaactggatgtttctttccaccaagacgctcctgatgatgttaaatggaataagggagattatgggggaccagctgctgctggcaagaggcagctgcccatgctctacaccaaactccaggaaaccaacccgagacaagcaatgagtccacctccccttcctctttctctccaacttctctcttccctgtactgccctggctgtgggatgggctattctctcttacaagtttctgccggctgtggttggggatctcctctctcccatcttgaggcctggggaagggcattcagggagggcatgagggcccttgaggctgggctgtgtgggctgaatcccctggggccagggtccaaggttctggcacgaggtacagggtgatcaggtaagtagtctttgaaaaacaaaactgcgatggggtgggggtggaaagtcccattttaccactgggttgctaggctgctctgtggtcacaggcagagaataaagatagagatagatacttggctttgctggaacccctgagactctagagctcagcctttgggctcatgacatccatgtagataaattgattctcaccctgattaaagggtataggggatggcctggcagtcagctagctgacacgctcctccatggctgttcccatccttaattcaggggaacaaaggggaaaggctttcactgcagcagcctacaataacagcctgtcccccgtgttcctctaaatcaagggcttcctattcaaattaaacacaaaaggtgcagatatgcaagtgtgtgctcggttgagattagacagggtagtcaaaactggaatcggccccaaaaatgctggtgaccacattttgctactaaattcagttttcaaccaaattcttgttgcctggagctgggggaaggttccgattgctgggaggttgggaggagggaacaggcataggactttgccagtatgtaggcttggggaatgagaaggggagatgaggccactctcagggcatctggcagggactgaaggggcacacatagttagggctgttgcaggtggggcaagggacatttaagagagtggctagtggggtgtttggtggtgaagtctcggctgggaaatgcaataaggccattctccagcctggatgctggcagaaattggatattttttcttctttttctttttcttttcttttgttttttttttttttttttttttttgagacagtcttgttctgtcacctagactggagtgcagtggcacgatctcagctcgctgcaacttctgcctcctgggctcaagcgattctcgtgcttcagcctcccaagtagctgggattataggcatgtgccaccacgcctggct

SEQ ID NO: 14463 - DNA, 2300 bp, Homo sapien
gcctctctcgggtgaggtccagtcttgcccttggcagggcctatcaagcagagctgatacgggggtggcttcctcttctggcagagccctcacgggcctgcagctagcattttagggagcagagaggaaagtgtcccacccctagcctgaaagctgcttctggtttctgggcaaggcctcgctgtcgcactcccatgctggtgacacctggccttgcctgtggttgtttggagcccccaaactggatgtttctttccaccaagacgctcctgatgatgttaaatggaataagggagattatgggggaccagctgctgctggcaagaggcagctgcccatgctctacaccaaactccaggaaaccaacccgagacaagcaatgagtccacctccccttcctctttctctccaacttctctcttccctgtactgccctggctgtgggatgggctattctctcttacaagtttctgccggctgtggttggggatctcctctctcccatcttgaggcctggggaagggcattcagggagggcatgagggcccttgaggctgggctgtgtgggctgaatcccctggggccagggtccaaggttctggcacgaggtacagggtgatcaggtaagtagtctttgaaaaacaaaactgcgatggggtgggggtggaaagtcccattttaccactgggttgctaggctgctctgtggtcacaggcagagaataaagatagagatagatacttggctttgctggaacccctgagactctagagctcagcctttgggctcatgacatccatgtagataaattgattctcaccctgattaaagggtataggggatggcctggcagtcagctagctgacacgctcctccatggctgttcccatccttaattcaggggaacaaaggggaaaggctttcactgcagcagcctacaataacagcctgtcccccgtgttcctctaaatcaagggcttcctattcaaattaaacacaaaaggtgcagatatgcaagtgtgtgctcggttgagattagacagggtagtcaaaactggaatcggccccaaaaatgctggtgaccacattttgctactaaattcagttttcaaccaaattcttgttgcctggagctgggggaaggttccgattgctgggaggttgggaggagggaacaggcataggactttgccagtatgtaggcttggggaatgagaaggggagatgaggccactctcagggcatctggcagggactgaaggggcacacatagttagggctgttgcaggtggggcaagggacatttaagagagtggctagtggggtgtttggtggtgaagtctcggctgggaaatgcaataaggccattctccagcctggatgctggcagaaattggatattttttcttctttttctttttcttttcttttgttttttttttttttttttttttttgagacagtcttgttctgtcacctagactggagtgcagtggcacgatctcagctcgctgcaacttctgcctcctgggctcaagcgattctcgtgcttcagcctcccaagtagctgggattataggcatgtgccaccacgcctggctaatttttgtattttcagtagagacagggttttgccatgttggcaaggttggtttctagctcctgacctcaagtgatctgcccacctcggcctcctaaagtgctgggattataggcatgagccactgtgcctagcccgaattggatatcttaatgaaaagctaaaaaaagatgcctgggacgtatgaatgggctgcagaccaacatggtgaggcccatagcaggactccttctctggggaggtcattggctatgcccatggactgccacctcgctactcttgcccccgtcccctgcctagtgaaacagacgctcagtattcatgcaacaccgctctttgtgaaaaccttagagcctcaggagagggggtgcgggaagcatttgccccaggtttccccagtccctccctcctctgtgtgccctgcctatgtctctgcaagtccagaacctggtttgcataaagctcttagcttccagaggcccgcaggccacctctgccctgtgctgcagggagcaggggaatgtgggagagacacttacacgggcccacaggccacctgaaagagggaagacggtcagggtggggactcagacagaatggggggccccagaggcagtggaggcagcggtggtggcggcggcagacgaggaagccagccatgtgaggaggtggatggagtggtgccccgggggcggacgga

SEQ ID NO: 14464 - DNA, 2300 bp, Homo sapien
ggcaacatggtgaaaccgtgtctctaccaaaaaatacaaaaattagcgaggcatagtggcatgtacctgtaatcccagctactggggagggtaaggcaggaggatcacttgagcccaggagagcaaggctgcagtgagccatgatcacaccaccgcactgtactccagcctgagcaaatgagaccttatctcattaaaaaaaaaaaaaaaaaaaactagatacggccatcagcatgtaagtaataaggacaaacaaaaaataaagaagtaaataaaaagaaatgagcactatatttgattctaagattcttggtagtcaaaacaaaaagtaaaacatgattacaaagactcacaacatccaaaaaatgaaaacccagagttgcccaagagtcctaatagctcccattggatgaccaataaaagacgattccagtggcgtaagcaccagagggcgctgtgtggtacagcagccttcagggccactggttcccactatgccctgtagaggctgctgacctcaagttcacaagcagctgaaacaagacccctgcaagttcaccccatcttagcccctttgttctggctaactgcactggacacctgtccttacatcttgacagctgctagcagatcaaatagaccacattttgtttttccatgtatcagctgatggacacctgggtagtttccactttggggctattacaaataatgctgctaagaacattcatgtacacatatttttttttgaggcagagtctcgctgtgtcacccaggctggagggcagtgtcacagtctcggctcactgcaacctccatctccagggttcaagcgattcttgtgcctcagcctccctagtaactggtattacaggtatgggccaccacacctagctaacttttgtatttttaagagagacagggtttcgccatgttgcccaggctggtcttgagctcctgacctcaagtgatcctcccacctcagcctcccaaagtgctgggattacaggcgtgagccactgcaccccatccacatacacatttgtgtaaacagagttccttacgtcttgtgaactcaacaacaaatgtttttaaatttgtaatacttctccagtatttctaggggttttataatggagagtttttaggatattgggaaaaagaagttgtagccctccttcagtgtcatccttcccaagcttgttctcttaataagaccatcctgtgttgtcagtgtgtgggggaagcagtgatgagcaggcctggtgggtgccattcagatgcctttagacccacatcacctctgcatccttcctcccctctcaggtccgacgcctccttatattgtgatgatgttgacattcgcttcagcaaaaccatgaactcctgcaaagtgctgcagatccgctacgccagtgtggagcggctgctggagaggctgacggacctgcgcttcctgagcatcgacttcctcaacaccttcctgcactcctaccgcgtcttcaccaccgccatcgtggtcctggacaagctcattaccatctacaagaagcctatcagtgccattcctgccaggtggctgaggtgccctcctcctcccatgcccggagagcttccaagccttggaggaaaactgagcttgcacggggccggggggtgacctggaaggtccctggaggagcagcagtaacgtgttggggtgctgcgggacacacaccgccactgccccctctccccaggaaccaagcctccctctgcagagaggcagggacagctcacctgcctggtgctactgctcagtctcagctgcttccatctccacctgccaggatcctggggtgtggagggtgctctcacctcttagccccgctcctggaagcacagggtcccaccgtcaccaaaggacagtgcttcctttggtgaaaaaagagaaaggaaatgaggaggggaaggaggacagaaggagagagggagagggagaaagaaaaataaagggagagaggaaggaaggaagggagggagggagggagggagggagggagaaaggactcttacccctgctttgcttagaccacctcctactctaagaaatgatggagccctttttggcctacttggggtgagtcaacataaggagtgcaggccaccttagcctttgcttctcaaaagtcatggggcaatgaaggacttggccaaggctgtccagcagtaggccaagttcagggattggctcaggcccctaatggacttcactgcatccaggaatggtaggtgattatcttttccgagaggccacctac

SEQ ID NO: 14465 - DNA, 2300 bp, Homo sapien
gcagctccattcctccacagcagagcttctctgtggattcttccgtgacctacacagggctgcctggtttccaagcccttccctagggctccaaactagggtgtgtgtgtgtatgtgtgtgtgtatgtgtgtgtggtgtgctgcatgtgttgtgtgaggtgtgatgcgtgtgtgtgtgcagcccaggtttggtctgtgggaggggtgtgttatgtggtgtgtgtgtggtgtggtgtgtgtggtgtggtgtgcatggtgtgtgtggtatgtgtggtgtgtggtctggtgtgtggtgtatgtgtgggtgtgggtgtgtgtggtgtgtaggggtgtgtaggggtgtgtgtggtatgtgggtgtggtgtgtgtagtgtgtgtggtgtgtggtgtgtggtgtggggagtgtgggggtgttgtgtgtagtgtgtggtgtttgtatggtgtgggttgtgtgtgtgtgtggcggggggtgtgggggagtgtggggggtgtgtatgtggcatgtggtatgtgtgtggtgtgtggcatgtgtgtggtgtgtgtgtggtgtgtggtgtgtgtgtggtgtgtgtgtggtgtgtggcatgtgtgtggtgtctgtgtgtggtgtgtgtggcgtgtgtgtggtggggtgtgggggggtgtggggagtggtgtgtgtgtagggtgtgtggtgtgtgtttggtgtgtgtggtgtttgggtgtgtggtgtgtgtgtggtgtgttggtgtgtggtgtatggtgtgtgtgtgtggtgtgtggtgtttgtgtatgcggtgtgtgtggcgtgtgtgtgtgcgtgtgtggtgtgtgtggtgtatggtttgtgtgtggtgtgtgcggtgtgtgtgtgtggtgtgtgtggtgtgtgtgtgtggtgtgtgtggtgtgtgggtgtgtggtgtgtggtgtgtatctgtgcgtgtgtggtgtgtgctgtgtgtgagtgtggggtgtgtgtgtgtgtgtgtgtgtgtgtgtgtgtgtgtgtgtgtgtcgggggaggggtatacgcagtttccgtgcggaaagatggtgtctttccttcacagggctgcgcgggcacccatccccgctgcaaagcgcccgggccaggcgcggcttgctccgggtcggggcgagctcgctgccctctgcggcagacagcgatgcgcgctccccgccccagctcccggctcgcccggcggcccgcgcgccctcccggtgcagcatgcgggcgctgtgacgttctcggataaatgccgtgtaactgtgtaggcgaatgagagctaaaaataagaacggaaaatctatcattaaggtatcattgcgccagcgcagctatttgaaggctcccatggtccccggcgcctgcgtttgaagcccgccttcaggctttggggggtatttgcagaaaactcccagcagcggctcgccaaccagacctcagggtgcacggggggtggcgccggtaattatggcaactctcaaaataaaataatataaaataaagtaaccaacgttcaccaaccaccaccccatctcaccccctgtactgtcctcaggtagctggggaagccgccgggagtgcagccggatgctggaattcaatgtgacccggctgactatgcaaagactaggactggacgcttttgcagctctatttcgccacccaccttcctccttccacctcgtattagaaataaagtggggggggggggcgagcctttggaggagaaaatgacaactggcacttaaccccaggtctacagtgcgccgcggtggggcgcaaagacgcaaactcccgggatggcgagccttcggggtttcattgggttaaacgaaaattgatctgatttgctttttaacatccgagggagagaaggggagatgaggggagggagggcagggtttgagtgtgtgcgtgtgcgtgtgcgtgtgtgtgtgtctggggagggggaggaggcaccaagttgcagcctgcgcgcggctctgcgcctcggcggggctgcgtgcgtgtgtccctgtccgcgctgctgaaacgggctcttcgagggatcggcgtcacatgactccgcctgcccctcgccagcgcgcagatcgccagtccctcagtttgcccggcaccggaggagggtcgggcggcatcttccgggtactggggctctgcggagcggagaagaggttccagcggggaatggtatatctggattcaagaagccgcggctcggcgccagatcctggagtgtagatatttggggggaggggagagctagagggagcgagcgagcgagcgccagagagaggcagcgcgcagcgcg

SEQ ID NO: 14466 - DNA, 2300 bp, Homo sapien
atacattaaaaaaggtagatgaaatgaacttttttccaggtaaatataaattacccaaaattgactcaagatgggtcagatgatgaatatgccaacaagcatcaatgaatttgaaaagataatcaaagatctatccttctaaaatccatcaagtccagacagtttcatgggtatgttctattaaaccctcaatgaactgatagttaacttgataatttaaatattccagagtgtaggaaaaaacagaatgcgtccaaaatcattctataaggttaccataaccttgcaccaaagttgaatgagaaccctcatcccctaaaaaggaaaaagaacacaatttttacttattaatatagacggaataaaccttatattaacataagtaaattattgcaatctagcagtgtatttgtataaaataacatacattaaccaagtagagtttgttttgagaaatataaagtgttataaaggtggcattcacatcagtgagcgaagaatggactttttgaattggtgttgggacaattgggttctcatctttgtcagttccttaccttaccctgtgcacaaatacagtttccagatgaaatggtaatctaaacaacagagctatacattactagaacatttagggaactgtatggtgattctggggtacgaagcctccctaggcaagatgggaaatctagaaaccatgcaagataagacatgtgtttgactacataaaccttgaaactgctttagagagaaaaactccacaaacagtaggcagtcattataaatattgggtactaggagggtacatttctctaagtgatactatagacacactaagtgataaaggcaacttatggaataatatttttgcccttaaaagataaaattgataatcctccagcaagcttgatttaaaaaattgggaatggagcagtagaaaacacaaataaataatatcagcaataaggaggcccagaacagttttagagatgaaaataaatataaggtgacactatttgtaactttgtgccagaaaatttgaaaatgtaaatgagatggacaatatcctaggaaaatataaattactaaaaatgactgaagaagtagggatttaaaaaacatagggcaaatagaacccctgtgtgcatatacatgtatctagacgaaaatgctggttacctctggggaactgattagtgggggaaggacactgcagggtaggggaggagggggcactcactttctattttttttggaaagcattttagttttttttttttttgtagagacttttttttttttttttttttttttttttttttggtaagtctcactatgttgcctaggctggttttgaactcctggcctcaagcggtcctcctaccttggcctcccaaagcgctaggattacaagcatgagccacttacttcctaaatacaatgccttatgctttcaatcatatgcagcaactattaactactttgtaaaaaggaaacgaagattgtccgcgaacgactccacaggaggccctgggaataggtagcgggtgggctaaaacattgatttggaatgaaatccaacggccgtggaaccagccctgatcatcaaattattcccagttttgaggatcgcactgcaccctcctctctccctctctttcctacaccttggacagacagcctgagattccagggcgtgtgtgaaggaaagccgaggagggcagggccgcagagagaacaaaggggacacgagttcaaattcctgccagggtctgagacctgcaacgtcagactttgggagcgtcccctcacttctccggaccccaggagtggccgcgcctgctccgcgctcaccctcggggagtctaggagccccctgctaagttgctgagcgagtcggagccccaagagctagggtcgagggggtggggcagcaggcgcctctgccgaggctgcaggtaggcacttccccacccccgcggccccctccttcctccttcctcgcagctcgcacacccacacaaccctcgcccgtcgcggctggagagctgctctcggcgccagcgggcagcagcgcgtcgtcagccagcacagccggccgaagaccaagccggaggtctggggctgcgcagagacctgcacacccgcagcgcggaaccgggggcgattcctatctttctttcatgcttctttctttttcttaaaaccaaaccaaaccaaaccaaacccaaaactcccctgctcccaccgcaacttggaggagcggtggaccgatttgaaggaactgacgcagaggtttt

SEQ ID NO: 14467 - DNA, 2300 bp, Homo sapien
tgtggattcaactgttctcggttttgggagaaatatatacttgttcaggtctcaaataatctgcccctgaactcaaaggacaatgaggcccccaaacagtctttagctattaccaaacaggcttcttaccctggggaccccctttactccttaagcttatgctcccttttgccacaaacaatattgggacccaaagacagagccagcactacttacaaatttaaaatcactaggcaaggtacagtgaatcaaacaaacttcactcctactttacattttcaaatccgtttgcccttactagaataggtttgaacttgcctcacaataaggtaataaaggcaaatggattttaaaaacttgggcagagaggagctctgggaaaatctagttgtcaacacgtatcaccctgatagggcgttatttaaagtatccatttattagcaagttcacttttgtttgcttgttttgtttttaaaaaactttttattaggtaaaatttgaacatgcaccaaaaaatagaatcagataatgaatcttgggactagctgcaagttcacttttaaagcgttgttgccacccacatccagacagctgagggaggctgagactgagatctgcgtccccccagggcctttgctccgatcacaggtagcaaatgtcagggagaagctggccagggaaaagccgccacagcccccgagagggctctgtccctggggaggtatgctccttagcagctctgttcggtaactcggtggcagggaaggaggtggggtggtgggggtgggggtgttgctttccttttgaaatgagattccatggccccgaaactatgattccctccctcaccctttttgtttgtgttgttcttgtcttggggatgcaaagtgctgttaacgtgagcttccccagccacagggacaggatctgtctagatggggccaccagaggcagctgctgtgtttcggctccactccagcacacagggtgacacggaaggcctccatttctgatccatgtatccagtaagcttttggaaacccatcccagtttcgtggggtttgggggtgtgtgaatgagtgagtatgtgtgtgtgtgtggggggggagagaaacagggaggggtggtcacgtgacagtctttccaatctggatcccaattaagccgacaccagccaaaagaagaaatcagtgagtgaagtgaccacttggccctggccttgcaaaccactgcagagtccgaagccccgagtgctccctgggaagaggagagccgaggacactcttcgcccctgcttgccactgggggccgcagtcaccttcagcataggggagtggggagacgcgaaccccgcgggtggctccgggtggtgggctccctccagcgcgcagcttccgctcgctttcccctcggcgctgcagccgcgacctgggaccgaacggacaccgccttcccggggctccggcggcgctctgactcccactttcctccgccgcagcctctggcagggcacccccttggcgcgacgccgcgcccctccccgggaccgccccctcggtcccccagggtgcgctcagttgctgcccgtgcgccccgccagcttgagcgccccgggcgggcggcggtggagaagcccagcccagctctccccagccgcgttcccggcccgcgctgctcccagcctgcaagcccatgacgtggcgacgccgaccgagacacaaagaccgaggctgagaccgccaggggttgagggtgaggccgcgtcccggggccgctggagcgcgggcgtcatgcgagactgtcccggctgcgcgccgccccagaggagtccgagcgcccccttcagccgcggcgcgctggccctggccgggactgcagccaggtgggcgccgcgcgtgtgagcgccgcgcgtgtgagcgcagacctggactcgggcggcggaggcgaaagtcgctccatccgcggggtgcaaccctgggcgcggaatccgggctgccgggtgacagtgaccagctgactctggagcctaccggaggcgcggcatcggaggccgtgcggaccactgccgaacagccgctggagacccgcagagaagggcgggccctgcgcccggggcgcctcggaggtaagttcggagagcccgggccgggcggagggcgggagcgcacgagtgtgtgtgtgtgtgtgtgtgttcgcggtgtgcccgcggctcggtgcacacgcgcgcgggttgtaaagtcaggagctgcgggagcgcctccctgcctcggcttggccccggagcattgcgggccgcggag

SEQ ID NO: 14468 - DNA, 2300 bp, Homo sapien
aatgttaaatttattctctcataggaaaatggctttgtaaagaagcttgagcctaaatctggctggatgacttttctagaagttacaggaaagatctgtgaaatgctcttctgtcctgaagcaatactgttgaccagaaaggacactccatattgtgaaaccggcctaatttttctgactcttacgaaaacgattgccaacacatacttctacttttaaataaacaactttgatgatgtaacttgaccttccagagttacagaaattttgtccctatttaatgaataaattgtatgtatttttctctatatgccatttttgtcttcagttttggagtctggctggaaattcagccaaagggtaaaagctcaacacaggatccaggcaattaattatgggatgatgaccaggaaggcggtgtcttttctgccccaggcagacttttaaggtgtgccattaccccaaaagtccttttctgtgtcactaggctagactgcagactagactgagaagcggactcaggctagaagcagactcaggtcggcttccctcttccctccttccttcccatgctttctgcagtttccagtgcccctggctgcttaagagtttccattgatgcctcctccccagccttctctctctggcttgccatttggggttgatggatatggcaacctgatatgcaggatactctgggatattctgaacaaagaaaattggtaaatgattcaacgtggagctagtgttaattttaatttttattttttggtaaaaatgaacagattagaaaagtacgtagtttgttagacctcgtgttctaacttttaggtcagcaaatctaattgcactatgtatacgctgtacctgcctggccttccctttttcttacaacacagtccccctgggacttgcattagctttccctggaagctgttgatagattccataaagaagccagaactcccctctcaagccatgtgcattctcaccgggcacttaattaatgctttacctaggaggtgtgattcttaacggtggggattaagacactggggcggtcagtagggacgtatttttggcagagacagctctggttttcttaggaagtcacatctgagaggcaaccgtctatgccatctgaggcgcctgtctactgggagcagtttaagacttaacagtttcttttacctcttcctgcaagtgcctcacccaccccccaactgcttttagttttaattcatttttgtgttttaatcagagctgagtggtgggaatgaacagtcactgatggttataacaggaagtacctatgtgggcactattacctggaatacattcacactagaaacccgcaaaatttggcttttacactacagttattgctttagcagtgttcccgattatgtatcatctatacattcatcacataaggacatttccatcaaccactgtggtcccttaagattataatggagctgaaaaattcctaatacctactgatgtggtagccaaccaacacattaccttttctgtgtttagatacacaagtatcacggtgcttacaattgcctacagtattcggtacaaaatacgctgtacaggtgtgtagcataggtgtgtagtaactttgtgtaactacactctgatgtttgcacaagaaggaaatcggggcatctgtcagacctatccctgtagttaagcgactcgtgacgatttcgctacatgtcctgccttgcccttcttttctggcccctgaagtcccactactgaacagtacaagagatgccaggcaccgtgggtactgccggccatctttaccatccccgccagtggcgctgccgcctccgcggtcccggtgagggcccaggctcagggaggtcaggcggcagggcagcgacggcgcctcgccaccgctcccctaaccggggagggcgagccggaccacggggaccgcacgagggctgggtcccaagggccagaggcgaggtaagcgcgcggcgcgccgcgggcccgcgtcccggaagcggggtgggggcgcttccccgagccccgacccgcccctaggccgcggatccacctgggagcggccaggggcggagaccgaacccgagggcgcccagggcgccgagggcgggactggactcggcttgggcgtgagatggcggcggcagcggtgagcagcgccaagcggagcctgcggggagagctgaagcagcgtctgcgggcgatgagtgccgaggagcggctacgccagtcccgcgtactgagccagaaggtgcgaggccgcccgtagcgga

SEQ ID NO: 14469 - DNA, 2300 bp, Homo sapien
acataaccagtgtaatcctatacagcttactattactattgcaacatctgaaaactcctccccttcattaagtcataatatgggaactgacatttcagaaaaggatcctaaaggaatttttaaaataagctttattgctccttcaacctctccatcaatcactcctcccaaacatagtgtcaaaaccaaagtctctgtagtagaagtaaaaaatctaaggcaaaccatagcaattaagacagggtatcaggatgtagatgcctagctaaaatgggttaaattttccctctgcactctaaataaaagccattattatgcttgtgcacacagtaggccagaggctcaggttgtctcctttccactcagatggtcctctaattaacaggacatggactgcatggtagctctttttcaaaatcctacagcctaggatagtaaactgtgccaaactctctctgctgtttcctaaagtgcagtaccccaagggccattcagcctccatcttccaagaccaattttatctcgtgtctccaatgacaaggggaaaatttggcattccttggagacttaacaggatgcagtaaggtcaggcacttccaaaagctgacccatcagtccacccttattcatccccaagcagatgtatggtggtattataaaggacctttgctgggcactctgccaaataattaaagcagtacttgctctctagttcgattggctatccctgttgccctcacatttcatcagccataaaaaccttttcttttaaaaactcaagcaaaacaattaagccaaaacacgtttaaacaaaaaaaaggtttaaagaaaaatacaaaatcaagaggagggaattgtagaaagtaaaaagtttcctcttaaaaatttcccttcttgttaaagaataaatcattaagtgttagaaataatagtttcttttaaagactaacttccttccagcctcctctgctctgtgctaataactcttcattaagccctatcctatgtagctgttagatataagggaataagtatattctatgtccttgtactttaaccaagatatttgtgctggacatgctcacaggcacgttccagctcgcagcctatgccccttccttatttggaaatattattacttttctaagtccttttgcaagcaacttcctcatttcctttgttctctgttgcctttccctatttaggaaagttttaagttgttagccagtcaggtttaatttaaattgtgaggtccagctccagccaatggagacaggacacagtagcagggacaagctgcataagggataaaaattgcttccctcctttgtttgggtgtgctgttgccattgtttcacctgtgaggagcaccctttctgcagaaagtaaaattgccttgctgaaaacactttttgtctaaatgctgatttttccttgcagtactgaggagcaagcattctgtttctaaataaacactttacttataacaagcccactttaaattatgtattagaacacattgagtccacttggaaaagccgattaagtcttgggctgctgtggttcctgagcatgagctttgttaagctttgtcaagtcttcctaaatactatgccaggagtttcttttgaccagatgattcctgcttattgctttgatcctggcttcatatctagatattatagatgtcctacactttttctgagaacatttgtgtgaattgaaagttggataaatcatatgtaaaatgcatgaggcatgtgtgtagggtaaaagttatagggggtggatgtcagtggcaggaagattcaaagttgagatgtttttcttcttagcaagctaagaatctaccttctataacttctagccattgcatcttctttttcatctagaggaatgtttcctccagagtgtatatgctgcaaagtggtagttctgaagatgtcaataaataccatgtaggaaaaaaaagtgggtgggttctggagttgaataaatgtgggaaaaaactggattcaagaaagataaacaggtttctttaatgctgggctcttggagatgctaatgtgtactgaacatagtaaatctctagggagtatggtttgttcctaaatctaatcgagctcccaaggaactagtatcttatagaacacacatagaaaatagtgctctacagtagtcactttcacatttttttcttggatccaacttcatgataagaaatacattttaactcataatctattcacatgtatatgaataactgaaacagaagtttcacaaaattatgattatgtttg

SEQ ID NO: 14470 - DNA, 2300 bp, Homo sapien
tagggcttaatgaagagtcattagcacagagcagaggaggcttgaaggaagttagtctttaaaagaaactattatttctaacacttatgatttattctttaacaagaaaggaaatttcgaaaaggaaactttttactttctacaggctgatgagtgcagctaatcctcattattataagcatcactattatcatcacttgcaagagccatgtgacaatatttagatgattctgggttcttttaaagtgcatacatactcaggattcctttgggaggatgcaatttcatttatatgaaaaactgtcactaccacagtcagctctaataatatttgatatcacctggtaataaaggtttgtcggctgggtgcggtggctcacgcagcactttgggaggccaaggcgggcagatcacgaggtctggagttcgagaccagcctggccagtatggtgaaactccatctctactaaaaacacaaaaattagctgggcatgggggtgggcacctgcagtcccagctacttgggaggctggggcagaagaattgcttgaacctgggaggcggaggttgcagtgagctgagatcatgccactgcactccagccagggcaacagagcgagactccgtctcaaaaaaaaaaaaaaatagtaaataaaaaataaaggtttgtcaccatatactcaagagtacttctgttattcaaatctcctaactgggagttacaaatatctctgactctgctcttgtagctgtcagagcataaaatgcccttcccactctttcctcacttccagactccaaagcctcctcctcaaagtttggcccctctactttggactactgttttcttcccagttactgcgcactgacagtacttttgttctctctttcggcaattcaccatacactttctagtttatttatctgcataaaacttagttctcaacaagactataactgccttatgaacaggaatcaacagttgagaatcttcagagtctcctataacatcatgtaagagctcactaaatgtttgatttaaataactaggcttaagagtaataggctgggcatggtggctcatgcctgtaatcccagctctttggaaggccgaggcgggaggatcacgaggtcagatcgaggccatcctggctaacacggtgaaacccgtctcttctaaaaatacgaaaacaaaaaattagcagggagtggtggccagtgcctgtagtcccaactactcgggaggctgaggcaggagaacggtgtgaacccaggaggcggagcttgcagtaagccaagatctcaacagtgctaaatgcatacatggattatcttactaaattttcataactctatagaggtaagtgctatcattattttctccatcatagaggaagaaagtgaagctcagaataacttgctcaaggtcatacaggcctgggcaaacccagggcctgaatccagcaaagctcttaactacctcagaacactgcacagttcgagccctgcaatactacagtctatgaatgatttcgatttcactaagttagaaatttgaatttcaacagagacattttagctaaaaggtaaaattttaaagaggatgaattaagagaatttcccacagacatctttataataaaatgaggagaaaagcctcccatttcctatttatgaaagtgatattaaggtgtgtgtcacaatttcatcaagaagtggcttatgacaatacagctttggtttaggtattaaaataggactcttttctgcccataggaggacatggaaatgaaggatagatgtgataaatgtcaattcagagctctgcaaaatgccagactcaattcttgttttaaaatatcagagccagggctcttgtttcacccttgattcttcacacaaaacaccaccatcctctgacctcttcacacagagcaagctttaccccactacctaaaggggagtgctgatccacatggtctccccatccacgctagaaattgatcccaaacaccaaccgctgcatagacgtcggcgactttggtctgcaccccccgaacttggtgatacctcatcaagccaaacccctccccaacatccaaaatgcccagaccagcatccgaaagctggtctcctatacaaagcagaatccctgcctacaaagcagtttcccacctccgactcctccccacggcgaacagcccttctggatccaaccaacccaccaaccccaatagggcccagcacccagagggtccacaatccagagaaggagctacaagccctgtacttgcaagcct

SEQ ID NO: 14471 - DNA, 2300 bp, Homo sapien
ttaactttcaacaaaccaagtattgagtatccactgtgtcagtgtactagacatggtaaacaaaaatggtgtctttaaatcaagtaaacagacaaaaacaaacaaaataatttttagaaaataatgcaattttttaaaaagtgcaaacacctattgaaaactatggctcgggtaatgctagaatacaaagaataattagatttttgtggaattttcaggaagaggtttcctgaatgaatgagcgagtacgggttttaagaaaacgaatcagctatggcaggcaggatattctaggcaaggaaactaaggcactagaaaagctaaagggtagaagcaaatcagtcgtggcatgagtccacacccaggtgtaatagaactggatcactggccaggcgcggtggctcacccctgtaatcccagcactttgggaggccgaagcgggcggatcacgaagtcaggagatctagaccatcctggctaacacggtgaaaccccgtctctactaaatacaaaaaattagccgggcgcggtggcgggcgcctgttgtcccagctaggcaggaggctgaggcaggagaatggcgtgacctcgggaggcggagcttgcagtgagccgagatcatgccactgcactccagcctgggcgaaagagcgagactccgtctaaaaaaaaaaaaaaaaaaaacacgaactggatcactgttattaagagtggaggagggaacctccactcttaataacttccacttgtgtttagtgagtggcgttaataactccacttgtgtttgtggctgcaaacacaagccaaagcagcgcacaattgacatctgaagcccaatgaatgtgatcaaaacaaagcacttaaattttgtttggatttgctgccactagtacacatcgtaaaggcagattttcacactcatacaattttctgcattcttcagtatctgtcagcgtgttcaaatacttttaatacacaacttttaatacacaagacacactttggaaaactttttccgaagaaaatgatccaaagagcagaatgtgagtcaataaacggagaaaggcaagcagcggttttccatcttctgcgccagtgtgctgtaaacttttaagtccggaaaactatgttttaaccgatgagataatgcctttcaaagtgattagcacgaccgggcgcgcggtggctgacgccagtaatcccagcacttttgagtggctgaggtgagcggatcaccctgaggtcagggtcgagaccagcctggccaaaatggcgaaaccccgtctctactaaaatacaaaaatcagcgaggcgtggtggcgcccgcctgtaatcccagttactcgggaggctgaggcaggagaatcgctttaaaccgggaggcggaggttgcagagccaagatcgggccattgcactccagcctcggtgacaaaatataataataataaaattaaaaagggcttagcatagtatctggccagtaagaagaaattatgattattattttgaccttagacctctcttaactgtctgaaattcgggtttcttaaaggacacaggcggtctctgaggctcccgccagcggaaacaatctcccattaaaataggcatcggttaaatatttgctgaacaaagtaaactacgtctccccgaatcccattgagcgcctactcgagatccggaccggagccgggcaggacgggcccgtcggtcccacacgccgtataagtgggtggagaataccccacacgcccagaccaataggcggggtgaacgaggaccgtgttcaccaactcagcccggctcgcggaatgccttctgttcgcctccgggcttgcagtggctttccgtcgcaggtcaggccgcgttccacttccgccggcagtccagacacgcccctccgggtccaatccccgcccctcacacacctggccccgccccgtcgggagctcggcggtcctctctgcgctaggtcttcttagcgcccgacggggccacgcccatccccgacgctctgaggtcacctacagggccgaccctcggtgggcggagggacggagggaagatggctgcagagaccggatattggcgctgcctccccgaatcccggacctgcgctgaggaggcggttcatctgtggccagcggtgcttcgggacccgcgctgggggaaccctggcgacggggcctggccctgctatatgcgggggcctcggctggagtgagcggcgtggacgcctctttcctccggctcttcccttgttgctgcgagagcgagagggccgcgggcggcggaggc

SEQ ID NO: 14472 - DNA, 2300 bp, Homo sapien
gactcaaagtcactccatatgtggatggaaaaaaaaagtgaattcaatttctccagcgaccatgagttatctcctttttcttccatccactgcaaaccttttctcaggattgctgccatagctaaatcaaatgagatttgcatttcacctatgaagttatatccttgataggtaaagagatgattgggaggccaaattcctcattagtccacaaaagaacaatgaggaactagctttgattaggcacgtacgttttaccaggcatggtgatagaggctttacataggtcatctctttgaacttcacctcaaccctctgaggtcaacatgtattgcctcattttacaaattaagcacagacccaaggtacatactgagtaaagaaagagagatttggctgggactgagtccaggccctctgactgtaagtccagtgctctttctggtcctgcaatttctaatccacacatcggatagtttacctgagttaaaaatgtgaattaagtcaggcttaaagcagaattttgttttctatcagaaattctagagtaggtggaaggtgaagaccaaagaaggtattttctttttctttttcttttttttttttttgagatggagtctcgctctgtcgcccaggctggagtgcagtggcacaatctcagctcactgcaagctccgcctcctgggttcaaaggattctcctgcctcagcctcccaagtagctgggactacaggtgcccgccaccatgcctggctaattttttgtatttttggtagagatggggtttcactgtgttagccaggatggtctcgatcttctgatctcgtgatccgctcgcctcagcctcccaaagtgctgggattacaggggtgagccaccgtgcctggcccaaagagggtatttttttcttccctctcggtatcatccttactcaattacaaatgatcaagggcggtactgccagagtcacctcgagaggccctgttctctgccacccaggctgttttgtagtctccattccaaattgtcgttactccggtttaccccgtggatggcgtttaagacttttcttaaatttgaaattcacagaaccattttaaagtgaacaattcagtggcatttagtaccttcgcagtgttgtgcaacttccacctctatctagctgcaaaacattttcttttctttttttttttggagacagagtctcgctctgttgcccagactggagtgcagtggcgtgatcttggctcactgcaacttctgtctcccgggttcaagcaattctcctgcctcagcctcccgagtagctgggattacaggcacacgccacccgcctggctaattttttgtattttagtacagacggggatttaccatattgcccaggctggtctcaaactcctgagctcaggcaatccgcccgccttgtcctcccaaagtgctaggattacaggcgtgagccaacgcggccggccttgtaaaacattttcatcacacaaaagaaaaccttctacccattaagcagttactccttcctcttctcagcccctgtcaaccaccaatttgctttctatcctatggatttaactgtctggatatttcatagaaatagaatcacataatgtatgaccttttctgtttggcttctttctattagcctaatgtttttgaggttcattcctgttgaagcatgtatcagttcttcattccttttttgggatgaataatgttccataatttatttatcctttcgtctgttgatgaacatttgagttgtgtccacatcttggctattgtgaatagtgctgccatgtacattcgtatgtaagtatttgagtatctgttgggtgtatacctatgaatggaattgctgggtcttttgacaattctgtatttaactttttgagaaactgccaacattttcacaggggttgtaccatttcacattcccaccagcaatctacaaggattctaatttctccacatcctgcatttaagacttgcaaagctgaattaatcacaggatgaggaagtggcttctctgaaacattttcctctttcacattttaaactttctctttcatacatgacatgaaacacagcctacgcacgaaagtgactaggaggaaggatattataaagtgatgcaaacagaaattccaccagcctccatgtatcatcatgtgtcataactcagtcaagctcagtgagcattctcagcacattgcctcaacagcttcaaggtgagccagctcaagactttgctctccaccaggcagaagatgacagactgtgaattt

SEQ ID NO: 14473 - DNA, 2300 bp, Homo sapien
tctttcttaggcaacttgatggtgccccccaccctctgtggacaccagtgggtacagtgcactactgcccagaactcctggactcgagcaattctcccagctcaccctcctgagtagctgggaccaccggcatgtgtcaccgcgcccagcaaattgtattctttaaaaatgggtaagttgtaatgatatgtgtgttaaatctcaataaagcttgagtttctagctttaataactggaaacatggtgtcaccattagccaaaattgggactacaggaggaagaatgtgtttgggggaaaataagccttggacatattgaatggctgtgataagcacacagtgaatgtcctgctctggaacacaggaaagaagatggggctggaaataataatgcatacacaatcatttattgagcatctgttacataccaggtgctgtgaatatgttgtttatgtacactgaccggtaggttgcgtatgtatactgtttattgtttctgctccctctcttcccctgtgtaagtcaatgagagaagggccttcatctttcttaatgctgtctccagcacctacagcacaggctggcagagagtcggcatatagcatttactgggtgaatagaaatgcagtatcttttaaccctcataacaatcctttgtggtaggttttcgttcccatttcacacaattttcttaagagcacaaagctagtaagtgacagtggtctgtctgcattccacgtcacaatgcaatactataatctctcaatctcccagaacgaatctggaacaaaggaaagcagtaaaggtcatgtaaacccaatttctgcaaattcataataactgcatatgaaaatccaactgggttaggtgctggagttaatacaacgataaactggacaagaatcggaagaaaaatacatttaagacaaaatccgtaagacttgacgcataaccttgctagttcaagaagctctttcacacatattatgttatttaacccccacaaatagcctaacaagtaggttttattaccattccaatcaggcttttgtcctccacttaaactgtactccccaaggtgacttctgtgttgctaaatgctcaacaggtactcacttcaggcacaacatttaagggagcaccaaaaaactaagtgatcaagatgaataacatttttattttttaaaattaaaattaatgcaaaaaaaaaatccatgaataacaaaataccaacatttaaaataaagaggattctcaggactgggctcgcctacctggatgccctaacggaactcctcattcacaataggattgaatgacctcgaactaaagtgtcacgtacttcctgctcgtgatgctcgtgagcccgaacgaaggctgaaaaacttcagggggagccattctgcctatcacccctagttccagcgcagcagcccagcgtgcaccacgcaggtgggaactgaccccgtgcttttggaacaggctggaactgggggtgcttgtgcctgtgcatgtatgtattgcacacgtgtgcatgcacgcttctcgtcttgcttctatttccaagtcccagttcaggacagggcagagaactgctttccagtatgcgccctgagctcggactttgcgcttgcagactgaggcgccggcctgcatgggaagacagaagctcagaattccttcctgcacaagtggcaggtggagtgcaactctttttggtgcctcagtccaagacagggacacgccattccctgcgaggtggcaaaggtacctgaacctacataaccaagcccttaaagtctccgcggcacctcttaatcgccttcccgtagctattggaggtagagaaaccgcggcgggaagcgccccagagagggcagtggagcaagggacactggaggtgcagaaggcggaggagcatctcctttcgctccgccccgcctcttttcctgcctccggccaattgccgtgcgctccgagccttgaccccgcctctccccgcctcctccggcctgcggccccgcccgcgccggtaataattagcgggcgggcggggcccgcgcgtcagccgcgggagccggccaatccagtggctctcctccgcggtcgcgtcataggccgaacaaccaaacagaaaagtttaataaacagcggacggaggggccggcggtggcggagccggagcaagcaggggttcggcggcattacctgtacccattcaccggcggctaccggcggcggcgcgcagcgtgtcaggcggagagacccgccgccaggtgaggagcgcggcccgcggggccc

SEQ ID NO: 14474 - DNA, 2300 bp, Homo sapien
tgctgctgctgatttagaaatgaaataagctaactcttaattttaacctgtttgctacctaaaatggtaatcatcttgatgttctttcaagcaggtcccagagatcttaaaatgatccggaatcactgagtccacagttctcttttctcttggttatgtatagatggagagtggtcttggtgttatattagtgtatgattcgtatttgtttcataattaacttcgaagtgaaaaattgatgcgagagcaaaggtttatttggtttccataactatttactaattttatgcttgccagattttaagattaaactgtttgccatctcttttttttttcttcccgtaaaacctttggccatctacagtcacttttcctcaaatcttatgctgtaattcaaactgtatattctttttgctgattgcttctgtacctcctctgcttccagtgttcttttgcaagagtgtccacacagtgggaagaaaacctgaacttgactcatgaagtgctgggcattcaaaacagtgaatccttgcaaaggatcttgggagtagacccctgtgaattggctctttcaatttgtccacttaaagggcataatagattatgcagctgtttgggcttcagcagggtattgctccatattcatgcctagttgcaattatgtgaattttcagtttgttacaaagacttccctttgtattcaaaacaattttgttggctttgtgttctaatatttgagttttctctgaggaaaaatagttgcaagattttgaactttgaaaacttcaaattaaaatgtttaaaggttttgtcactttttattttctgatgcaaaccatacattgaaagcatattttaagaagaagtcactctaataagctttaatttcgagtttatgaatcacaggatttttggtagaggtaaaaactatacttacaccgtaaattagacattaaatgccatttaatcagtcagataatgattaatgttagagtaatgtttgatgggccaagctgctaaaacataagcagttctaattaaaatatataaacttatcacgtaaaaatagcaaacttagtaatgtataaagtgacagtaggtcttttttgcttaaaaatcagagttcctgtgtagtgtctctttatgatctctgtagtaaaaatattatttaacgtagcttagtgagaagtttaagaggagtataccttttactttagggtgcccatgccactttgaagttatggagtgcaaagtagtttccacacattaaaaaaaaaaaaaagatgaaaaagacttaaacttttctaaattttatacctgaacatgtcattagaacatgtgccttttgcttttagatatctgtttgccaatggttaagcattaaccttggcaaaatactcacatgtcagatctgttaaatgtaatagtatttctgcccagtattttcttcagttttaagtagaaatatcaacctttgatgtcactgaaatttctactctgttgtgatactgagaacataaatgtcagtgagtttgatagcttagaagtgaatcttttgcattcagtattttagtgctgtatattttcacttaagttatagttttctctttaagtcttagaaaaaaacattggtttgttcctcttagcaacatattgtaatggattttctgttgccgttttacaattttcaggtaaaatgtgaactctattaaaaataatctgtctttaaagcataacttcaccttcattgctccataaaaataaatgatttagattaaaagcattgtattttaaacaattggtcacagctgcttctgtgagattttcatttttgttacttagtttatttttcacctagacaagggtaagcaaacagtatatgatgggaaaactgaaaccttatgtactgtttctttaagaaaccagcttatccaggaggttttagtgtgtctaacctaacctgctagcaaggaaaagttctttaaaataatggatattagccgtatccaatcacaattatcagtttcactaacagggaggagattttactcttcagccactagaattggagaaggtggagcttggtattcaggtttggttgctttggagtacagcttcaagtgaagttaatctgaggtgaagcaaacagaaaattgtggaggttttgttggtaggatttttgttctaatctttttatgatcctttattttataattttgctcctttatgattctgtgtgtgctaggttttgtcactgtttttattttctgatgcaaactgaacactaaaattaagcaggg

SEQ ID NO: 14475 - DNA, 2300 bp, Homo sapien
gaattgcttgaacttgggaggtggaggttgcagtgagctgagattgtgccactgcactccagcctgggcaaaagggcaaaactccatctcaaaaaaaaaaaaaaaaaaaaaaaaaaccatgctcaacttcattagatatgagggaaatggaagtcatgggacaccacttcgtatccactaggatggctctaatcaataacaaagtattgtcaaggatgtaaaaaaattggagccctcctgccttggtgggagtgtaatatggtgccagatactctggaaaacaatctcctagctccacaaaaaattaaaaagaattgtcatatgacccagcatttttctcctgattgccaggagaattgaaaacatacgtccacacaaaaacgtgtacacaagtgttcgtagcagtattatctataataaaaaatagaaactactgagatggctgtaaatagatcattggataaaaaaaaatgtggtatatccgtacagtagaatattcagtcacaaagaggaaggaaattctgatacatgccacagtatgagtgatccttgaaaatatgctgaataaaagaagttaggtacaaaaggctacatgttgtatgattttatttatatagaatgtctaaaacaggctagtcatacagaaagattagtggttgccagaaaccgtgggaagtggggagtaattgctaatgagtacagagttttcccttaatgtgacttaaatgttctgaaagtagatagtggtaatagttttataaccttgtgaatataataaaaaccactgaattgtatactttaaagagtgaattttatggtatgtgaaatctccccaccaccccaagacagtgaagagggcttttgctggaggatgacttgtgagtgcaaacgcatacaggtaggaaaaatgaaatttgagaaagagtgaaaagactgtttgctgaagtgatcagttcaggcagttatatgttgaaactaaagctagaaaggttgtttggaagttgataaggtattccttggtcttaaaactcacataaaaactgaggaaacaggatgatttctgggaatcatagacttttaaaaatagtactatatcatcttgtccgtgaattcatttggtgactgttgaaattcaggttgtcagctattagtttcaagtaagctgaggttaccttagcctcatgggtatataatcgacatttattggtcccacatttgagttatagcatataagcttttagatagccttctgatccttcactttaaagactgcatttgcctcagttaaaaagaaaccattggccttctttggggctttagggttaatactgtgaaatgtcttttgagatatgcagtagtatttgtatgcatagaagatagatgtattttcactcttctccatttccagatcccattcaaatttgtgtctcagtagttagaccagttttgttaaaaactataatcttgtgataatgttactgccattaaatgggtttttttgaatttttctggagaacaggttagatatggcttacaggtttcaaaaccaataaatactgtaggttcatttctgattgcaaggtaagctgtttttgagtccatatgcatagccagataggcttatctgatactgttctaggagctggagataaacagtaaacaagacattcagcccctgccctcttggagcttacattctagggatatttattcattgaaaataaaaggtttgatgtgtctatattctgtttcaaaaatagtatgttcacagtattattaatagaactgtcccctgtctggtttcagcatgtctgagtggagtaacatgctatagagtttgtcattagcacatatttacttgtttgtggcattctgccttttgtcatcttttgttaaaatatgagataatgatggtagcataagcaggttagaatcacagcaaatgtctgagcatgtattacaatgtgtagttcactgtgataggactggaggttcagatggggaataaggtaaccatccttctcaatggccttacggtgtagttggggaaatgaggcacataaataaaataggtaagtaattcaattcaacagatacttattgtcgaatgtctgctatgtggttggagacactgggataggcactgataatgggataaataggaccgatgtctcccctcaaagaattcaaagttaaaccaagttaagccaatgagggaattttaatatgaaaagtgctatacacagggtttcccaccccaaggttgttggagaggcagtggaggaagagctgattatata

SEQ ID NO: 14476 - DNA, 2300 bp, Homo sapien
atacatctgccccatgtcctttccctaaaatactttggttttctttctccaagggttttatcatttaggcttttgttaacttgtatgtattcagtagaagctcctggcctagcatcccccacacaacacatgctccataaaaacaggaattaaagatgtgagttgctggtgtatccccatggcctggcatagggcatgggcttattagttattgcttcatttccttttggtcaacagttttatattaatgacatgtatttatggagaacctattctgtgccaggtgttttgctgggtattgacagagttgcacatggaataagaaagctcgtggttttaatgggaaggggcagggcaactacagaacgtggaaataattcattgcgttgcagctgaggactagcttgaattaggcaggtatcaagtgctccctggaatgcctctttataaggccaccaagttgggatactctcctcttcttttcctctttcaggaacctaccagaacaaatcagaccaccttcattccctccccagggctgacttaaaagaactgaagccagtccttggcagagccactcagggcaggagatgagagccaagaggctgtgcccagattacactccttactgggtgatgatcactggtcacgcctggtggacaggcaccagagtgatctcaggggctaggaaggggggctcaacagcgggccctgcttgccgtactcgctcctctcaagccgtctggtttcaagcccacttagctcacattatcctgccatcttccagcctcttctccctaagctgaaatgcggagcagcctccctaactcagcagtcactgtgtcacattcctcaaggatcttcagggaacccttgcccagactatcgtctacttttctagatttcagccggcatcctggctgtttaaaagtgtacctgaatcattcacaccaacaataacacaacgacacactctccggtgtgttccaagtgtcctggctgtggcatggtctcaaaaaactgcagctgactgcacatgagtgattagataacaccttgaacccaccctaagatagtctgcctttcccttctttcctgtcttccttcttttctttctccctctctctcttctcctatttctcttttatctttcctttcctttatccccctcccctcctttcctctttttccctcccttctctctctttccacacacacataacctgtatatgccaggcactattctaggtgcttcacaaatattaattcattccattcttatatcaactttgtgaagtaggaactattatcatcaacattatacagagaaggaagctgaggtagagaaagtttaagtaacttgtccaaggttgagcatcttgtcaacgtcattttactactggcatgtgaaacaggtgagttatattttttagaatattaattctcattaattgaagccttccaaacaggcctaactgtccccttctctgacatacaagtggaagtgtcatagctggacggagcatcatggtatgaaggcagaaaggacgcgactgggtgttcttctgaagctcagggagcagctcttggggagaaagtgtttccaggaagcggacaagagttctgttgagctgaagagcagggcagcagccggggcgagcgaggctggagtcatgcagggcagagccttaaatgctaagctggggtttgctctcggtaggaccagctagctgccccgagcgggggctggaaccagatctcccccacgtggactcgcggacagggcggggatcaggacgggggcggggccaggggaggggcggggctcggggagtgaggcaagactggagggcctgggactctcgggtacccgggccaggggaggggcggggctcagggagggagggagagactggatgacctggggcttgcaaggcggggcgaggggaggggcggggcgaggggaggggcggggctcagggagggagggtgagactgtggaggacctggggctcgcggggtcggggcaaggggaggggcggggctcagggagggaggagagactggaggacctgaggcccacgggggcggggccaggggcggggcggggctctggaagggcgggcgagactgtggaggacctggagctggcgggggtcagggtaggggggaggggcagggctcggggttcgggggcggggtgttcacggtgagaccaaaagtcaggtaggagcctccggggtccctgctgtgtcacccggacaggccgtgggggcgggcaggggggcggggccgggcct

SEQ ID NO: 14477 - DNA, 2300 bp, Homo sapien
tagaccctccaagcctctcactctcttccatgacagcagcccctcctcagtctattcctctgtggttttccacaataggtttcatttgaaatctaggttcttatgctttcaaaacatgatagaccaggcacagtggtcacgcctgtaatcctgatgctttgggaggccaaggcaagaggattgcttgagccaggagttggaggctgcagtaagctatgattttaccactgcactccagcctgagcaacagagtgagaccctgtctgtaaaatacatgtataaatataataattacccaatttttggaatgctttcagatcaccctcagatagtggcttggctaaatggaaagcattatcctaactgcctttctaaagggtttcatggagtggaggcagctgcagggcctctatccccacccaaccctcagccccaccctagtcccatgcctgctgggactcatctgtcacctcccctgccccagtctggggaggcactggctgcaccctgctagagactctggtttacctacaaggtttcgggctgtgaccatgtgggtccatgtgtacccatcccctcctaccctcctgcagggtggtctgagcagcaagctctcggtgcaggggtagcagataagagggagcagaggttggtgccctgcaatcaccccaggcacctgaccatgcccctccttccccactgctgtggctgtctctgcaggggtggaaaatggtaccagtcaaacccgaggcggaggaggagcagcccgcagtcgctgccgcgagatggaggagcccacgcccgagcccgtctatgtcgacgtagacaaagggctgaccttggcctgcttcgtcttcctctgcctcttccttgtcgtgatgatcatccgctgtgccaaggtcatcatggacccttacagcgccatccccacatccacctgggaggagcagcacctggacgactgaggcacagcggctgtggggactggacctggcgctctgtgggtggctgtgccccaggatgcatccgtgtgttccctgccagcctgccatcccacagaggcaaggaatgaatctggccacccagggaaacagaaggtgcagcttagccctctcagccctccctcgagcaccagcgtggaatgcccgggtgccgtgggtgtcgcaaccatggaccagccaggggaaaagagccctggaccaggacccaggaggctggggttccagtgtggggagtccctgtgagatgatagggtagtcaccttcccaggttcctgggcaccttttggaactggatccagcaacagacaccccccatccatcacataacagtggtcttgtcttgaggagactctcggtcctttaaatgcaaagtagcaatggaggctcccaaccaagaggtcccacctgaaccccagccccctccccatggactagcagtggtgtggcagtgaggggggaaagcgggttgagggagtctcacctgaaaattcacaaaacgcacaggatatgggctgcttccaagcagtatttttttaaactaaaatatagagggatatatttttcctgttataaataaaatgtacattttagaaacttgggaaaatgcagataaatagaaagaaagggggaggaaataacacttataatcccacctcccggaaaccaccattttgatatattttcttccagcctttttacttgtattttttagtcaaattcatactctgtgcatgatgttgtatcgcctcatatgatagcaggaatacttccccattacatcaaacactcttcttagctgccagttttagtgaccgaagggcatcccatcggttgggtaggtcatggttaaaaaatcatctcctttggttgcatatttaattattttccactattttttcctcacacaaaatgatttcgcccggtaccctttttgggggtgcacagtccatgagatgaatattgaatggggagacctgggttctagtctcgcatttaccagtcaggttacaatgcgaccttgagcaagtcacttcacctcccagcgcctcagtttcctcattgtaagataggaaaagccttgtcatttttaaaattttattttttgcatatacctcatgtgaacgaaaggacagaaaggggagtgaatatactatgaatgtgctatagtcggagttggggggcaaggaagaagtcatcgatgatggctcttctcaggccctccctcctcccacctctttctgccctccaccccactcccactccatcacctacatctatgaccttgcagcaaaatcatta

SEQ ID NO: 14478 - DNA, 2300 bp, Homo sapien
gtcacccagaagtctccactttcttgcctatttcttttttggctggttgagacttttttgactggatctgccgctcctttatgaactgacctgacatttgcctcttacctgctacagagctcctcttgcctccaagccgctctggtctcagtgagaggtcaccccctcctgcttctcctccctagtgtatagtcgacctgaacctagtctgtattcagcaggctttccctgcaggcttggcgtgtgggagggaagattgcttcctgcaaaagtaaacaactcaaacagaatattatatccttgctctaagattcttcagtgactcctgacagggcatttctcattcagaatttgagccgtgtctactttgctctttctctgtcttgacatcaccacttccctctgtttttcaaatccatgtctccccaaagactttcccacaagctccaaagtcctcctcatttctgctgtcacagggcaggctcatccaggctttgcaaaacctaacatagcccacaagatcttgacttaaataaaagaactctcaacctcagcaaagactcttcccactgccctagacaccttctaggtgtccccagcagcttaagggttttgttgttgttgttgtttgtttgtttgtttgctttttggtggagtctcgctctgtcgccaggctggagtgcagtagcgtgatctcggctcactgcaatctccgcctcccgggttcaagtgattctcctgcctcagcctccggagtagctgggactacaggtgcacaccaccacatccatctaattttttgtattttagtagagaagggggtttcaccatgttagccagaatagtcttgatctcctgacctcgtgatccacccacctcagcctctcaaagtgctgagattacaggcatgagccaccgggcccagccaggattttttttttaacaagtttattttccccttccaattatacttattaatattgggattccttctagaattttagaaataggttgaccttcagacttattttctcaatgggtagttagtgctgggttctcgatctctctggtttagtctgcaagtattttagtggcaagtcatcaaggcaagtcggaatctgctcactagacacctgttcgcatcacacatccagagactcattcctagtcctcaaatgcatgtttgctgaaagatgtactggggactttgtgtgaggatggctgcttcatacctgcagctgactcagggtcatggtaaactatcagcttgaagtgtgtgacttctcataggcactatctaccccaggcagctattcagtgcagaagagctcatgaaatgttatggctgagagtgttaattgtcccccactatttgttctccctttaacaactgtctattgctgtgtgacagcccactctaaaacttagtggcttaaaacaagaatttagaatttctcacggttcagtgggctggctgggctcagctaggctgttctgcagaatgtggtatggacagcagacactcatgcagttacacttagctagtagctaaatctggtgccttagctgcagtggctagaataggtcggagctctctggccctcctctttctctctctctctctctctctgtctctctctctctctctcggcagtctctcatcattcaatcatcttgtctgagcttatttatatggagctggatcccagaatagtgacagagaaagctgccaggcctcttaagggctaggtctagaaacgtcacctgattttactggttaaagagagtcccaggacagcatcaacagaatgtgttgacaagagacttgttagcataatggccttgtgaccagagccaccataatggcctagactttttggagagcaaaataagtctctgtcattctgcatctttgttttacatctctgttgtttggggtgtctgttatatgcagttgagcttattttccaagtaatacacatgtgttctaatagaaaatccctctatagaaaaatccttctatttgaatttccatttttccttagctctgttttattttgtatttacacaaatttatttattatacattttatattttataggtatatttgtaagccgagttgaatgctttgtggagagaggtaagtacattttacaattagatcttagaagtaaaatcatttgtaaacattacagcaccatgctactctaagaagttgccattactccaataatgatagtttctcacatccttagacaaacttaagacccagcataattccccaagttccttctagatc

SEQ ID NO: 14479 - DNA, 2300 bp, Homo sapien
gtcagcggccagatcagctgggggttgggtcagctgagggctggctgctcaaaaaataactcagctgcaacagctggatgctgtctctacatggtctcttatcaaccagagggctgccctgggcttgttcccatggattctcagggtatgaagagcatcattgcaaccccatgcataaactcctttcaagtctctgcttgcgtcaggcttgctactgtcccagcgatgaaggcaatcataaggtcagcctcaacccaaggagggagaaagactcctactcttcaaggaacagcagagtcacattacaagggtgtggatacagaaagaggaagaacgtgtggccattgttgcatccaccacaattagtaaatgcaacccagtgtgttcaaagctatggcaaagggttgtagtaggtacaaaagagtgcacgtcacagggtgggaagctccatcagggatgggtcagagacagttttagcctgaaaatgatacttgagccagatttggaaatacaaaattgtggaaggaagaaatgatctgatatatccaggaaaccagaagagttctccagagggcacagtgcaaggtgaggggtgccttgggagggaagagcccgaggagaaggaggggccactggggcatttctctacatttctaactaagcccagatcttccctgttctattgtgattccaaccacttgtccctgtcctgccctctggagtcacacgaatcacacccctctcttccctggagagagcatgtattttcctctatatattcagcttctcccacccaccacctcaacatcataaaccttttctcaaaatgttcccacactttgctgcttcctgttctaaatggcctccaaaacagaaacagagtctgactcaagcagagctcagtgggctttccccaagtgtcttcctaacccctaagacaggttgagaacaagggtgctgagccccagtacttggttgtgaggccatgatgccgtcactgtctcagcagccccaaggaaaagcatgggagtgctcgctggagcttcacattgatccttcctaagggttcagggatggggctggggaagtatggagggcagtggcgctgggtccacacttgagggatggcaactcaggcatctaatcaaacagtcctgttttgcaccaatgcccataagggcaggtcttatgtgtgattgttattcattcacttattcaataaatgcacatggatacctgctctgtgtcaggcactgccctactctgtgggactaaggcatgaggcagacctggtctctgccccaaagttcattccagtcatttaagaggaaggaacaggtttgtaaaggagcctcccctgtggtccttgagtgacatgatgagggcttatcaggctctgaatccatagggcagggacatcaccacatctgggcaccctcagcaagctgtgacctgcagagttaacaacagtgagtgtttgcatgaccatgtcctatagcagccactgtcctagatgctttccacgggtccaccagtgaagcctcttacaaccctgcgaggtgggcggagtgctctccatcttaagatgtggggagggagcagggagaggacacttaggggtcccagacccccaggcctggggtggggttgggacacaggcagcagctggtgcaggcagctctgctccaccccaggttctctgagggagggcgaggacaattttccagtccagggaccagctgtgaggagactcaggtgtggagacctgaagggattcagggggaccttgtgtgactaagactagggggaagagtttcaaacagaggcagggggaggtttgggggaagccacaccccaccacagtctgtccccattccctgcagcatctctccttgagaaatggaaactccatgggagcaaggaaaggttcaagtccattttggtaaagaattatataatttcccacccacgttttccccttgccccaagcacctatcaccagttgccaggtgtgcctgtcgtcgtggcccaccccactggactaggtcagcaatgatgtcacacagggctctggaagcttggcgctcactcagctcccagaagttctcagagggtgagggtcccacatctcctgcaggacaggccctagctactgagtcacagaaacccagggccgaagcaaagtcccaatcccagagaggctggggcacacctacaactgaaaggaggcttagaaatccttcagagaccaccctatcggttctcctccacctggacaggatgagccagcaacacagaag

SEQ ID NO: 14480 - DNA, 2300 bp, Homo sapien
tttaaagatatcagccgagtaacatttagaaaaatgggcagaacacaacagcagagtaagaaagtaaaacttgtcaacaaatttgtatggttaaatgtgtgtgtgcgtaagagtcatgttcactcatattttattttttagggatgatattagaactgtatttggagacaaaatgagccatgggtcctggctgaaatgctaaactgatacataaacaccaaggagaggaacttgcttccttctaaggggtgtggaaagttggagaataaaagagcctcgtgggatagggggcagtgatgccaagtgctatttatgggctatttatgggccaccagagattgaactgcctgtggggagaaggatccagaagggactctgggtagcagaaatatctgagatggagttttaccttttttgatgtggagtgagtgaagagagcctcctcttttactttccttaagaaatcttcagtccagtatacgttatacattaattaagttggtattttgagtgtgttgcttttcggggtatgtagaagagaggctgaattctcatttggcttgatgttggaatcaggaacagtcaactttgatacggggcacaagagcgggccatagctgataccctggtttctctgtctgggcctggcctatcttgtggctgggtgcacacctgctttattttttacttgaaatgtcttctttttccacctgtcctactcatgtcttcaaagcctaattttcattttccctgatcactccacctcctctctgccctcattcattcattagtgactacaggctggagatgccaatttcagggcttctgccctaagcccccaagggagctgtgtgcttcttgagtgcagatactttgtttcactcttccccactctaccccccaaaccagaagaacagagctcctgtttcttcctttccatggtaggcccaacacctggctttgtgcctggcacacagcagacattcaacatttgtagaactgatagactattagattagtagtgacaaatactccccgaagaaaatgcttatttgaacatacatcccaaattttctgccctccagaaaatgcttccttggaaggatttaagacagtttgatgtctctgcaaacattatctgcgtttagggaccaacttgcccttctcagcgttcacctgggatgtctttattcttccatttaacctttacaggggaccccgatggtgacgtgtccttcctaggggccattacctctctcagggatcctagtgtctggtagaaaacaacagctccaagttctctgcatccaaacttcgccaggatacgcagataaacctatttaaaaaaaaaaatctttttaaattctcaacttggtggtgtaaataaggcccttgcagcgccctcaagtaataatcaacggcagtcattatggaaggagggtagagatgagcgccttactcaaagccaagacattcacaatttctcgggccggctgcctgtgcctgggcgtgtgcactgtgcactccgaagctgtgtgcggcggtggccttggaggtgcgcgtggccttaggaattcccgcggtcgggcaccctccgcttaacaccgggccgtgtccccggcctgggagccgagcagcgcggctctggcatgctaagtgggcagcactggggcgcctttgttcctcgcggccgtctcccaggaccggcttccctctgaatctaaatgggcttctccctcacccgctccgccctggcctcctggcctgggcacggcgcccctgggtaaagcgcgcccggacacctggggcgtgggcgtgcgggggcagcccgggctaggcgagcgcgggagaggcgcctgcggtcccagcccggccaggcccgagcacctgcgcgagcccgagggagcgcccggccctctgcccccgccagtcgccggcgcccaacttgggggtcccgccgtccgcagccccaagtctcgcggtgctaccgctctgaccggggagccgcgggccgggcgccccccgccgcgcgacaaaggctgaaccgggaggaggaggccgaggagggggaggaggaggagagaaaggcggggacggcgagcggccgcggcggcggggagagcggagggagcgccgcccgcccgcgccgtcctttgtgtggcggcggcggcgcctgggcctgaccgggtccccggggctgagcgccgggctccgcgccgcccctcccgcgcccctgccaagcgggcgcctatcctctccgagcaagatggcaaccccggcggcggtcaaccctccgggtg

SEQ ID NO: 14481 - DNA, 2300 bp, Homo sapien
aagccgagcatggatctgcagtcagagttctctgattctcagtctaatgattttctgtacattgtgctataaaaatgctaccccatggaggccctttgggaatcatgtgccctgtcttcattccagaagtaagagggaccctcccttgcttggacttcaagaaaaatcctttattatctctcactaaaatgtttggataagaatctagatttttcaaatatgcatttgttatggtttcataggaaatccaagtaaccgatttttcagaacctaagcagttaatgctagaaattttgctgcaaataaattgatcagtatgcaagacagttgtcacggctgaatcatggtccacagttaaggtaaacagatctgtgatgacattttctcagcagaatacaaatgcagctacatttcctcccagaggtttctgacatttcttctacacggataacagattctcctaagaaggtgttggtcacaaggaagaaagatctttgtttaatccctctgaaaaggtagggctgtgatatttgatgtgctttctgtgaagagaattgttctaagagagatgaatattgagaagagcgtttttctttggttagttgcctgccctcacccccctcccagccatggaaagagccttttggtttttcatttatttgaatggccattaaaatattgtgtgttgtcatgttgtgaaagtttgcatgtaattgattttttcccaatgtaaagatcaggggatatttttcttacttggattcacatgaaatgtagggagagcaagatgtctttttttccatttcctcctgttcctttcatctgtaatgctctcaagttccacgttttttccaggttttcgctgcctacactgtattataggaattctacacagtacgtctgcatctgaaatgtgaaatagtctgtagctagatgctgcattataagccagatatgttttctgtgttacggtgaaccttacaaaatctttagcttgtactgatttttaaatgagctccaaacctcattccaactttgcctaagagcagacagtcatttcccctctgtgtgtaatgggaaacaatttcctgaggggatatttgcatttggagtcagactgctgcgaatacagatatttctgtctatttgtgcatttgccatcggttatgatcagggatctgagcagagatctagacaagagcgttgcatttgagtgggggaataactctcgatctgtagggagttgcagttgggataaaagaccagaaatctccagggactggaaatgaacaagaaagcatacccctcagagggggctaaatgactctgctcagaaattctggagcagtcaaaggaacgctttttaggaaacggcatctttcccatcgtacttcgttcctcccagagcattttttgcagtccattgccaggttagcataggggtggtgtcctccaggaagccttctcagatcttcccagccttccccaccacatggtatccagcatccctcacagcatgcatttctcagtgtgaaattactaggctctgtgcctccatcacacttaagctgaacttgtcagaggcaggattgggtcctttcatctctgaccatcgttcagcttctagcacagcccctggctcaaaagaagagctttgcaaatgctgcttataattgaaacagagaccactttctcacagcaacctctgcaaaaggaaataatgtcctgataaactccatgtcttagctgaggagaaactgaggaaaatagtgatgaagccagagctagaagtaggctgctactgaatgtgtggccccctgattcaatgaaccgaggaatgtgtgagcacttgtacctctactttgctgcgaaagtcctcctgtattgagcatgtgtggcatggtagttgtaaatatgcaactggcccaatcatatttttcttctgtctctaaaattttttttgccctatacagtgtaggaggatcaggtgaccaaggttttttagaattttccctttttgggatctgacgccgacacactattttgaggcagtgacatcatctctttcctctggcgtgccctccttgcggctccatcattcaggccttgtcatctctcacctggactgctgtgaccttcattcattcccaggagaagtccaggtacagtaagaatgaatcaccagggaccagacctggactgggtaggggaggggttgttcagagacaggcctccttgaggagtgatatttgagcaaaatctaaatgactgtaaggaactaatgaggtgaagagagagag

SEQ ID NO: 14482 - DNA, 2300 bp, Homo sapien
ccctgacacacagcaaacacactccccactgtcctggacctaacacagacatagcttctcccttgctgtgatgggagatgagaggaagggtgtgtgtgtgtgtgtgtgtgttatatgcacagaaaaaagactagaaggcagatagaaacacactaatatgttaaacttggctattcctgttgtgagaattataggtgggttttattttatcctaaaagctcttcttgtttttttgaatattctaattttctcccaatgcatgtgttaatttaatgatatgtcaattgagtgatcacaaatagaataatactttttaaagggtttcatgtggaagacacaggagaaagtatatataactggtgagaactggaagcaatgaatgaatgagacagagacagaggaaggggaagccctttttaaatagtaagtgtccaataatgggacggattggcttaagaacaatgataaaattttacctaaactaagatttatgttgggtactgactgtgtttccagcactctgccatcttctttgcacaagctttacatccaccctataaagtaaatggaaattcatcccattttacagattaggaaactcggcagggaccggtcagccctgtaccctgtaacatggctagtgaagggcagagcaggctcttacgtgtttggccacccactgtggggtccctgtcccttgtggtgcccaggcggaggccaggtggctaggcagatccttccctggggtggcaagagatgtgctaaggccacgattctcaatcacaggcccagatgaaagttgtatggcacgtaggacatgttcatgctttggggtcactccatctagccatggggtccgtgcgcaagctattgaacctcgctaagtttcagtctccccctctataagatcaggaaaatacttacatcacacggttattgtaagtattaaggaaagccaattatttatcatgtctagtagaagaaatgttccttctcctctgttactttcgcctagcacagaacgtcttttccaagcagacattatacctgtatgtacgtgtgatctttatataacccttgagcaaattacttagcctctctgtgccttggttttctatctgcaaaatggggatagcaacgcacctcctggagttatgaggattaaagaagctaatcgttgtaaagcacttagaatgatgcctggcacagcgtaagcacatgtaagtgttcaataaaaatacacacacacagatgctaacaccacttagagtcattttgctatggtaaggacttgagtcactttgataatgttgcttttctggttctaactcacaggagtgcaagagagatcagaggggcagagggggcagaaggccctctggactcctcagcaccccactcgtaacacgatcccccacgtgaggctgtggccagagacagaaggaggagctgcaaaccccgtgagcctgagatgaggtgctccatctgttccgacctccagtggtccctctacccagagtcctgtctctgcatcagctgtcaggcccacccggatctcaggagggagtgcagaccccactcgggtctccctgtgcggagctgagtcctgagctgggagcctgcacccagtccatgctgcaccggcctcctccatcctgtctcccacccacctcctctcagggcttcatgcaccaacacacacgtcacacaccactcacacacacacatcatcacatcaacacacatgcataccactcacacacaccacacacccccacacacgtcactcacatcaacacacatacacaacactcacacacaccacacacatccccactgctctcaacacacatacacgacacctgcacacaccctacacactccacatacaccactcacatcaacacacaaacacaccactcacaccacacacccccacaccactctcgacacatatacacaacacctgcacacaccccatatcaacacacatacacatcactcatacacaccccacccctccacaccactctcaacacacatacacaacactcacacaccccacacaccctgcgtacaccactcacatcaacacatatacacaccagtgacacacaccacacacactccatacacaccactcacatcaacatacacaacactcacacacatcacacacaccactcacatcaacacacgtacacaccctcacatacatgccacacacacatcagtcacatcgacacacatgcacactattcacacacacacgacacacaccattcacacacaacacatca

SEQ ID NO: 14483 - DNA, 2300 bp, Homo sapien
aggctgaggtgggagaatcacctgagctcaggaagtcgaggctgcaatgagcccatagtgccactgcacctcagcctaggtgacggagtgagattctgtctcaatttaaaaaaaaaaaaaggagaagaagaagaaaatgtggtacataaatgacacaaaatatgcagccattaaaaagaacaaaaccacgtcctttgcagcaacatggatgcagctggaatccattaccctaagtgaatgaatgcagaatcaaaaaaccaaataccgcgtgttctcacctttaagtgggaactaaacattgggtactcacagacataaagatgggaacaatagacactgggaggactactagagagggagggtgggagggagggaaggggtgaaaaatcacctattgggagctatgttcaccctttgggtgatggattcagctgaagtccaagcctcagcatcatgcaatatatccatgtaacaaacctgcatatgtaacccctgaatctaaaattaaaaaaaaaaatccaggtcattggccctctgagggttctctcatgggcttgtctgtccagctctgtgacttctggcccaggagcagggcagaggctgaggactcagagggtggtgttgcctggaaagaaggttactttgtggggcccagatgggaactcccaaatccaaggggctcagagacggcaacagagggcagagccaggcaagttctgagagtgccagtaggctgtggtgaccgcctggaggcttcagaatcccagggaggctaccgagaagggatgtcagcagatgaggaagaagaggtggtagggttggaaacaggtcccccgactgagtgctgaactggggaaaatgatggatgctggtgccactgactacgatggtgagacatggggacagttctccggatgccagcctcatctcatacccttgcatgctacagtcctcccgacacactggccatggcttccacatgcttgcgtttgcttggacatccttttgtccaaatgtctttgtgttggttccttggccttgtatttccttgagattaaatgcagaggaggcatgacctgttcaaggtcatgctcactgtgctggaagttgaaccaagtgtctggcctgtagcttgacttcatttaatctttacagcaaccttatgagggaggtgaagagaggaagtgacttgttcaaggacgcacagccaggaagtggtgtgaggtctgctaacatgcatggaacacaggagtggtgattccagcagagatcttgggatcctcggaccctgggcagggaggaatgcttccacggctgggcagcagggaaatcatgtgtccttgaggtgcctacacccaggccacctgtcccattccctagagctgccaagaggctcagcctcccttcctccacccccggcttcggtaggaccaagaaaccaggcacaagcagctgctgcaacagggagcaacaaggcggggcccagcagagctccagttggctgaggtccatgctcagggggaagaaaagaggagcagaaactggagcaccttgcaccgaagggaagggagtgtcatgattatcactcattcttttgtttctcacaaatcaggagggaaatgagaaggaggaacatgggagggagacagtgatggggacctacagtctcctctattcttaatcctacagggatttccagctgcagggagagccggcagggagaaagaactccaaataaaattgccagctctggacccaagcaagcgcatgtggattccaggagagggaaatggcagtgtacgtacttgacgttggtgttggtgcagatgatgtactcaatctcatcagaatagggattctggaatgtgaagctgctggtgcggatcaacatccactcccggttcttggtgcgaaatcgatacatgaccgacaggacttggcctttcagcttaaccacctgagaaaacatttggagaaggaagtcagcaggaggaaggatggtgccaaacgggaggagggagaagctgcaggcagtggggttgcggcaggggccagcaggacctcagaataggggcattgtggctaaaagacagtaagagagggagagcagttttgcaatgggaactcctccgtctaccttctggtgaaatggggtgctgcatctgggtcattctgtaaccacggtatgagaaagcaaccactcaatgcctgctttatagcagaacttttaatttagcttttacaaatgagatcatgaaaactctgcaagccagagcgtttttctttttgcctcggttgct

SEQ ID NO: 14484 - DNA, 2300 bp, Homo sapien
gctgcctgccttagtgtggacaggcaggggccaaaactggcgggaccagagagggaggactgtgggtgaggatgcacttcaggtgccagcaacaccattctgcaagcggcccaggattccctatggctgtattgggccccagagtccttcatcccacagcctaccccatcccaagccagctcagatccttcggatatacaggaaattctgcccattccacaggctttagccctaacaggcatcctttaattaactcagtcatttattcattcattttacagactagtactcagcaagtgccttttctatgccaggctctgcacaggtgttcggacgttccttggattccttccccacactgccagctgccccaaacctgcttttccttccccatcactcatcactgccctgtgcaccctacatttttgtttctatgacaacagcgttacccaggctctgcacctcacgctggactgtctgccctgagccctgtctgcagcttcactcttctcccaaaggtcatcagtgatggtgtcctcctcctcagcatggtccccacggctgctgctgcagacacagctcagggcagacagtccagtgtgaggtgcagagcctgtgtgaggccgttgtcatagaacaacgtggtcatcctctgtttctcccattagtgaggcctcctccaacaacacctcctccaaggcttcactcagcacacccctcaggcccttgcacccctgccctggtcaggaggcagaacctgacttttgctttcaggcctagctgaagagtcagccagaccttctccggtcatgccaccttgggctgtccccttgcctttgaactgtcccctccttacctcctgctgctgtgctctccctgatcccctttgtccagagtggaggacaagcagcaagtgtcacaaggaccccatgaacatgagcacccaggcagggctggcacagggcttggcatcaacggagatcggtcagtgcgtgctgagtagctgagtaactcagcagccaagagaagtctggagggcttgactattgctcagcagagcagcgtgacctgcggtgatgatggttagggactgctcacagagggctgccatcttgtctgctgtccccagaccagaggccctgcctgcagccagggctccccagagcctcagagcagtgtgcaattcagcaagactcagctgcaggcgtggccagagcccctgcaatgtctgctaatctgtctccaggaggtctgtccttgaaccagtgtggaagcaaaatcctcattccttgtggctagggcagtcccgtggcaggggcctctctctgggtggccggccccacctgccctcctggcctctgcatctggaagctctgcttagggtctggccaacctcactggagaagccctgccctgctgggcatgaggaactttagggtgtctggtgggcacaggtgagtgcccacataccctccccaagagctgccagcctcttctctgaccgttcttcccagttgatgcttctgtctccccagaagtcagtggagccaggccttgcctccagtgatgatgtcagggcttcctcagtgacctaccagatgcccttgatgctaagaaccaacccttgggaaggttggacaccctgcctgaagccttgagtgccctttaggatgaggctcagacgtggtgggctgagctgaccagtcttccttggatttggctgtagcctctgggcaccagatgacaggatacttcctgctaccttgtcagctgttcccagctccagctcacttgggtcctggctagagggaactcactcccttctccctggcaatcactgccacagaacacagtggctggtgctgttcacatccaagaaagagtaactgacaccaggaatctatggcaactcatagagggctcacagagcagaagcagagccaccagaatcctcagtttagtccaaggcctgagcgccagtaaccactaactcatgcttacagcccacagagctgtgctctgagacccagggctttcttggtgagggagcatcttcccacgccattgtccccctcgctggcacatacctgaaggccttcccggagtgtccagagggaaatgggcttccttgggagtagatctgctgggttcctgctgcagaggctgagctcatcatcttcttctccgctaggaaaaccagagcaggagtcacatgcgaaggttccctgctctgcagaccacagaggaggctgccccaagaagaggtgcaggggtgggcgtgggaacgggaggacacaagt

SEQ ID NO: 14485 - DNA, 2300 bp, Homo sapien
ttttttgagacatagtctcactctgtcacccaggctggagtgcagtggcatgatctcggctcaccgtaacctctgcctcctagcttcaagtgattctcgtgcctcagcctcctgagtagccgggattgtaggtgcacgccaccatggccggctaatttttgtattttcagtagagacggagtttcattatgttggccaggctggtcttgaacttctgacttgaagtgatccaccctcctcagcctcccaaagtggtgggattacaggcgtgagtcactgtgcccagctgtataaagcttttttttctttttaaaggattttcgcagaaaaattctttttttaaaaaaaaaaaaaaaaaaaaggaaatgcaaacctgcaaagctagaattgggctttatgtgaagagtttcaccaagtgtgaaaaccttcaaaacagacttcaaatatgcaatctggacaggctttgttaccaggtttttaaaaatcaagtttgaatagttcaaaaacaagtaaaattgttttagtgaagaaatggccttttaaaacccaggtcctagctgggcaaggtggcatgtgccggtagtcctagctacttgggaggcaggccggagggtcatttgagcccaggagttgggagtccagcctggacaatacagtaagaccctgtctcttaaaaaagaaaaaattaaaagcgaggtcctgaaggttaatgaaatcagtatcggcaattcatttagatgacggtgctcaaaatattcgtcctgtggaaagtcacaacgaaaggtaaaattctcaggacatctgtgagttaaaacaacagacccagcgtagggattgtgccaacctcccagtctctagctgccctgctggcagtccaggaagggtatctcctgtcagttcctgaaagggaattcttcagctgccaaatcaggcgggaaaaaggaagtatagaaggctctgtggaaactggcaccagagcacagtttcaaggcaccgagagttatatttgaaaaatcatgtaaaggtggctgccaagattacagtagatttaaagcagtataagaatcgttcatgactaagaccactgaaaaatcctggacccaaaacaactctagagacacaaacactgtaaacgatacctagtatatacttactaccggaaaatctgccacacgtgggattagaaatgacaacctcaacatggtttgttgctaaatacagtaccctcctgttctaacagctgacttttatagatacagaaatgtactaagggtaaaaccatgcccttagaaaggaaacgctgttgctacctatacagaaacagcctctcctaataagaaacacactgatgaccaccctatcccacaaccccggtaccccttacggtgctgagaacttttggtactgagccagttcagaaagcagcacacacgagagccaaatatttcgggcacattccaactcttgtccaccccttagtttccttttcagtagactcccaagaacctccatccacgggagaaacctggatttgggggagggaatcccagggggaggggaggggagcggtccaccccgggacacatgcaccccctccagggtcccctctgcagatcggcccagctgtccgggcgcagagcccccagccccggcacccagcttctccgggccccggagccgcctggaagcccccgtcggccgcaggtcgagaaggtgcttcccaggccggggaaggtgcccgcgcccttgcccgcagcgccccgccccgatgcccggctctgcgccgcgtcccagcggcggcgccgccgcgcggtaacccggaagtggcggcggcggcggcggcggcggcgggcgtgcgggagcgggaacgggagcggggggcggcgcgcacgagccggccatggacgccgccgccggctttgtgtgccgcgcgcgggcccgggccgcccgcgcctcgcctgggttccggggccgccgctgacccgcccgggctccgagcgccgcgcccgccgggccggccccgcctcctgccctcctccgcctccgcctcctcctgccgccgggcgggcgggctgcagccgccctccgcgctcgcctgccagctccctcgccgcgcgtccgtcctccgtcctcccgggccagccagccagccagccagccgggccggcggcgggcaccaggccgtcccgatgcccgagccaggccccaggatgaacggcttctcgctgggtgagctgtgctggctcttctgctgcccgccctgcccgagccgcatcgccgccaagctggccttcctgccg

SEQ ID NO: 14486 - DNA, 2300 bp, Homo sapien
ttccttcatttgaccagtaaaccattaaacataggctgggtgtggcggctcatacctgtaaacccagcaatttgggaggcctaggcaggaggatcacttgagcccaggagttcaagaccagcctgggcaacatagttgggacccccatctctacaaaaaatttttaaaagtagccaggtgtggtggtgtgtgcctgtagttccagctacccaggaggctgaggtgggaggatcgtctgagccccaaagtttgagactgcagtgagctgtgattgcgccactgctctctagcctgggcaacagagtgagatcctgtctcaaaaaacaaaacaaacaaaaaaccccaaactgttaaacacacatttatttatgctctgcttgtgccagaccgtgtactacgtactcttgaagtatcgttaatcccaagctgtttctttttgttgtaaaaggatggatagatttcagaggcattttgaatacgtaactatgatttgctgttttataacttttgtgtcggtgattcacaggatccataattggaaaatccatgtcacagcaaagctgtagtggcatcctctcaggtcgtgggacccttgaaaaacaccttctgttggttgtgaatggtgttcacagccagcagtctcagggtggaattctcctccagtagcaagttactttcctgggcatgttgaagttaataacctaacttctttgttctcagtgttctcagagggaatactatgatgccactaagggaagaaagcttagagtttctgcttgagtttgactgattagggaacagaaaaacagaaatatgtcggccgcggtggctcacagctgtaatcccagcactttgggaggctgagacgggcggatcatttgaggtcaggagtttgagactagcctggccaacatggtgaaaccccatctctactaaaaatacacaaattagctggtcgtggtggcaggcacctataatcccacctactcaagaggccgaggcatgagaatggcttgaacccgggaggcagaggttgcagtgagccaagattatgccactgcactccagcctgggcgacagagcgagactccatctcaaaaaaaaaaaaaacaaatgttatgaatactgtttgacataaggggaaagcacaatgatatttctacaaaggaaatagaatgttggcttgcaattcaaggcagccagtatgtgaacaggaagaatgtaactcttaagaacagacctgttgaaattgaagtaggcatagtccgttttggggatccactcagagcccttctctttggtccaccttcagcctgtttccaagtgctcttttgtcatacctggctcttccggcttgcctcaccgtgtggttcggcaggttttctctctttatcagtaccagaagctgagctctcactctcctcttgccacaatttacttacccgtggttctgttttgaggggccttgcttttctccagtaatccagttgcaaaggatctgacagatgacttcattttctgtgttaatgggcaataactccttaatgtgttctcttccgagcacagttgttttcatttagtgcactcttagaggctcagtcttctctaaaattcagtcttaggtcaggcacggtgacacagcctcactgagacctccctgtagtctcagttactgggaggctgaggtgggaggattgcttgagcccaggagtctcagaccagcctgggcaacatagtgagaccttgtctctacaaaaaataaattagctgggcatggtggctcatgcctgtagtctctgagcccaggagtttgagaccagcccgggcaacataacaagaacctgtctccaaaaaccaaaatcaagtcttaaaattctaataatgccatgtcatattggtgtagaaagcatttttttcccctgcagaagtcacttaaatcatacagtcctgagattacttagagtttccctttaaggtcattccctaccttatattactgcttctattcctcactctgtctccaaatttagtaacaactctcttcagtgttgataatcccatataagactccaaaatctggctttaggaattgcagtgttcattttgatagcagctttaccctctgtactggattttgcttaggctcgtgttgaaactataaatctgctctactttaagaagcctgtgtacaggaatccagagtctcaacatatacagttaggagattattatttggataacagagtgctttttttttgttagggctgctttaaataataggctttctaatttcatctaaa

SEQ ID NO: 14487 - DNA, 2300 bp, Homo sapien
caatggattgcgaaagtgtgggcagtaaatccaccagtgtcatgttgctatatttatccataaagaattacgcggcacgccccgttcatcactgagtgctgaatggcagtgctgaatggagaactggctggagaatctggttttagacattcggagcctgtttgtaattcatcagcactgctcttttcccctgggcattggtctgtgataaagaaaactggataccagaggaatgtgctgggcatttcagtgctttgagaaaacatagccaagcacttctcagggcccatccctagacaggaccctgcctttaccacttcatctcccagatggctgtggagccagcccctcaccagagagctacctggctccactcaggcctcaaatctactgtctgttgatggaaaatcctgcatgtcgtgccaagccaggctgattcaaggtcgacctttctccatttgggccaaatgcccagcacccccaaacccctaacacacaactctttgtgggtctggtttctgggagctccttaaggaagaaaaacataaacaggaatcatggtgaggactggggagaggggccctgggtcgggggggctccattttattcggctggaaagaaaaggttggggaggagggcttgccattggatccagttcattacttcccaataaatcaaagaagggctgagaatcctgaccaccacccccagtaaggatcaagttccgctttctggaagaggcctagaggtggattgcaggacttcccagtttaaccaggtgacaaaggcttctgcttcagcccagatgtgatcacagacttccacagcttctgccgaccacagcctggccttaaagtccagacctagagtcccggagctagtgtgtactacacagaatggagaccttgcctgaggagctggttctcagagaacactggcaggaaggaagaaagaaatgtatattctaggaggcctctgctaaccaggaaagggggctgagtcacactctgaaaggtggaagaggcagagagcaggtatcaacgccctcattttacagattaaaacaaaacaagaaaaacaaacactcctcacctccctgcaaaaaaaccaccctgaggctcagacaggggaagtagctggccctggtcacacagtaggttagcggcagagttgagaggagactccatatgccctagggatgtgttgtgatgaacttttcctactggtactgtttcctcccgcgagggaatgtctagaccagccgcaccttcttgctttgacccttcagaactttggcctgtccagttaaagaggcacagagccctcctacccacagggaatgtttctaacttaccaagcacctattatgtgcttagaacttggactttcctgatctcatttaagcctcaccattctagtgaggaagcatcacagaacccattttcctgatgaggaaactgagactgggaggggttaagatcctgtacacagttgtaactggcatgtctgaatccagtttcaaaccaaggtgcctttcagtgaacacccaagcatcttcctctcggattaactgctaggccaataccaaaatctctttctcgggctactcttttgctgctgagttaaaaagagatcctgagacttagcctgggaccccgactcgcggcgattctgtggcaggcgcagaccttttctcctgtcctccactgcctctttgcctcggagggcgccccggggcgcgagcggggcacgggcgaccctggctccttggaggcccggggacttgctctccgcggtccgccgcggccgctccaccgagtcctggcctccagcgccctcacctggctgctgcgggcgggactctgcgcacccgggctccgcgggctcaggtctgcgtctcccagagccgccgccagagcccgccccggtccggcccgggcacagggcccccgccccacttgggcaaggcgggggcgcgtggagggaagtttcatcggggggcgagggagggagcttcggtgccgcgcgggcgtcaggggctcctcgggggaggagtcagtaaaagtggctataaaagcggcctctcggctgagggccggggagctagcgctcaagcagagcccagcgcggtgctatcggacagagcctggcgagcgcaagcggcgcggggagccagcggggctgagcgcggccagggtctgaacccagatttcccagactagctaccactccgcttgcccacgccccgggagctcgcggcgcctggcggtcagcgaccagacgtccggggccgctgcgct

SEQ ID NO: 14488 - DNA, 2300 bp, Homo sapien
tgagcacatgagactatttagtgtttgctgaatgcatgaatgagcacatgaataactggatgcttggtgaaacacccctgtcttgacccctgcagatcaaggacgttgtgggctataactctttgggccactgcttcttcacggaagatgggccggaggaacgcaacacttttgaccactgtcttggcctccttgtcaagtctggaaccctcctcccctcggaccgtgacagcaagatgtgcaagatgatcacagaggactcctacccggggtacatccccaagcccaggcaagactgcaagtaagtgcctggacccctctctgtgtgctggggggaaggggtgtacatgtgtgtgcatgtgttcactcagctcagcccagcaccagacttctgcacttcggggctctgaggagcttgggcctcacagcccttaaccacctacggctccagcttcctgcaaagcaggtgggagggagggtgtcttctcccttctcccttctcagtttgcctcatgtgcatttttcttgtccaaagaggatccctgttctcatctgtggggcttctcctgatccacacagtgctctttgatgagaggaagtggctgacacctcgcctgccacagaggccccgaccacacagacccttttctagatattagagagacagagggacggggtgagagctctctgtgcagtcagccttccaagtgcagggcccctcccttagaaagggctactttcctgggttcttctgacctgcatgtattttagagtcaatctcagacatcacttgcacactgcttctattttcaggacccatgctctttttaatttctgaatattttaagtgcttaaactagcaccacactttaattagaaaactgggtttcagatcaacaagtcaatgatttctcagatctctgataagagactatcaggccaatatcagagtgcccaacctgcacctgccatgtggcaggatgacccctggcggccctttatctgatctcaggtatctctgccctccctgcagtgctgtgtccaccttctggatggccaatcccaacaacaacctcatcaactgtgccgctgcaggatctgaggtgagcagaaatattccttctttggcagaaagtgagggtgggggctggagtcagggagacagccgaggcttaccttgaaacatgtgtgctctgagccccaagcccagatatccatgcagacgggcttagctgtggtgaagaggaaaacgacagactgggggtggtggggcagggggcgttctttggacttggttttaaaggacagccctgtcacttcataatactggtgaccatagttagtgaacactgaacgctttatgtataataaatcattagaatgccatgattttagcttagaatggtacctgacacatcagtgttgtaagctcacataatttgatttttgtaagaacccagtgacgtaggtattattattatccccatctgatgggggaggaagctaaggttaggagagctgacatgcccaggggcacacgtagctgggaggtggtggccagagtggcagcacggcactccatccacacagccctgctctcacccacccgtccatgctgctggccttccatgggaccctgaccttgacctggaacttagcttccttatctgtagaatgaaggggaaagcagagaacactcatgaaatccccccattgtgtgtcaggaagaggagtttcagccctgcagtgattgaaacgcagcatttctgagccatgtctgatagagtagggcccatcaagggctttaactgtcatggtgggctctacttttcactgttttccccccagactggaccacatggaggtgtgttgggggtgggcaccgagggctcctgtgggtgacggcagtagctactagacccatctccggcgtgggccgcgtggccaccttgcccaggagctctctggggctgaacgctgtggcttttcccttgtgtccttccccaacaggaaactggattttggtttatttttcaccacgtaccaacgggcccctccgtgggaatgtactccccaggttattcagagcacattccactgggaaaattctataacaaccgagcacattccaactaccgggtaagtctttccaggctgcgcctctctggccagcctctcggtccccttcccaggcctgcagatgattagagccgggacagccagttggcgacagctgggaacaactgcattcttaatgctggtctcgaagaaaatggagcagccttgcgaggcctcccagg

SEQ ID NO: 14489 - DNA, 2300 bp, Homo sapien
atccaaatgttgaaaatgcaattgatccagatgttttcatatcagtggattatatgccgaattgatttcctccttagaggaaagtcagtagccctgaaactttctacacattcccaacaatttctgtaaaactttcaatgatcttattctctataactagatatgtgggccaagaatcccaacacgtttgccccttaactttgaagctggcaatatgaattaccagggtgacccctcccagtagagcacatgatcagccacagctgtgcatgttttttagtatgactgcactaggatagggctccaagccactgggtggagcaatgtgctctggggagaaagctcatgacatttcccctatgatttcacaaaagaaaaaatctttttcttatgagttgtttctgctcaacgtcaataggaaaggtcatagcttagcgtgtttacatacagatgcatgcatgaatatgtagaatatcagccactcctacggtgtgagagaatttaaattgcactggtcctaagagtgaaggaaagcaggcgtagttgcctactcaacctccactttattcttttccctttataacaatcctaatttcatttgagatgacaatgtatacagctagaagacaatttctcagcctcccttggagagctaggttccagccaatgagatgtaaacagaaatgtatgcaatgttcaagtaggctgcttaaaagaagttgactccacttgaaaggtgtgcttggtttggcctgccttctcccttcctctggttgaatgtcatcttgatgactggagctccaggagccatcctggaatttctgaccttgagggtggaagccacaggctaatatgatagaaggatgaggaagaggctgagtaccagatggctgagaagccactataccagccctagtttcgagtttacactgcttctgtgaaagaaaagtcaatcacaataaaaccttttatcttgtttaaaccaccttaaaaagtcagttttcttttatatgcagcctactaatcctatccaaacaaggcttgaataaggtttactacagctcttttttgttgtaatagcagaaaaattggtaataaatgcccatcaataggaaaataaactattaatttaacaataccaaataaaactgtgcagcagtataaagaatgaagcgttttttgttgttgtttttgagatgcgggtcttgctttattgcccagtctggtctcaaactcctaaactcaaattatcgtcctacctcagcctcccaaagtgctgggattataaaggcttaagccaccgtgcggcctttggttttttttgttttttgttttttaaggtcttatgtaattaaacattttaaagacatcagctgatgagccgtttaaaacaagaagaatctcaaagcatctttggccaaaatctttttaagaaacaaaaagtagcgtgattcagccttgaaaaggattagttagagcctacagtattaggttgaaatcaaagaaaggcaagcttttttttttttggatgaatagtaatgatctttttggaaaaaaaaaacaaatattgaaagctggttgaactgaatcctctttattgatgaggaaagcagtggactcgaactatttatgactttctgaaaaaagttgccctacctgccactcacttctttttaactggctgttctcaaaggaaattgcaagagactgaggataaacgtccgacatccagaaatgggcttttttagagccgaggcagcctccagaacttccagttccaatttatttcacaggcgagaaactgaggtcaacagggacgttggttagtggttcctggaggccctgaaggaacttttggacctggcttgtgcgttccagagaaaaaggtcggcctctgacggaaaacgaaaaatgagcactcagggacccacccagccgggacagagcgcctcagccggaccaagaggaggagccagtggggcggggccaaaatggcggaggggcggggcttccagaggcgggggttaggaaatggtacggggcggggcccggtaggctagcgagggccgggaggcggggcctcggaaaggcggacaggaaggcgtgtgcaaggcggggtccggcccgcgcaggtcgggtaagcgcgtctagggcgctgcgcggcgcagcgaaaatggcggcttccaggtgggcgcgcaaggccgtggtcctgctttgtgcctctgacctgctgctgctgctgctactgctaccaccgcctgggtcctgcgcggccgaaggctcgcccgggacgcccgacg

SEQ ID NO: 14490 - DNA, 2300 bp, Homo sapien
taaagatatttaaggatactttcagttataagtaggatgactatccatccaggtttgaacctgctgttcatggttaatttattaatagcatgtctcacagttcattctcagaaatgcttggatatggccgataaattgaaacgtcatcctagttaaaagtaacgtttttaactggctggagaaaggtgacttggggttctaggaagggacagaggaacaaacattctgttggctcagcacgcccagcctgtgttgggctgggcaccttagaggacctgtttcaggactgcgtgactggcgttttgctgggagtagcccaggtgttttaaccacttcctgaagaacaaggttcggtaaaaagaggctggggcgtaggcgtgggttcctgtccctgccatatgctgtcttcctgatcttcggaagtcacttcaagcacctgatcatcagtttccttatctgtaaaactggagtagtaatgtttccctccaaacgccgtcgtatttaattcatttaacagcagccactattattccattatacagacgaataaatagacgttatgagagggcaaagtgcgctgatcagggctcataataattctaacagctactgtttaggaaccaagtactcaagcagcctgtgcacaatctctaatttctagaagagaagacggatacttggaaagagaacttgaacaatgtcatggaactcataaatggcttgagaaaggctgatcctaggaaatctgcttcagaacccgcgctctcactgcataaggcgtatttcaagggaggaacgggcaggcatctagcaccactcttcggactccccatccagtgctcttttcctcttttcgttacactgcactgctggtcggaaacccatcgtggaagtggatcaaacacaacaaagggcagggggcgttggaaaaccgggcgaagtcgcgcagaccgagacgacccaccggccccagcaaatcaccaggggccgaaatccagtgtcctcctcccttcagcccagaagccaggtcaccttttagacttgctctcttggcggggaggaagcgtggagccccctggtccggctaagagcttacgtaaggcccgcgggcggctgcgccccggtctcccatgggtgtgcgcagagcccccgggccggagcaggccttcccctgtccgctcccccagtctctcggcccaggaccacgggggagttcaggaccaccggccccacgccggcagcgtccgcgttgggcggcggcgtcccccgcagccacccagcttcccgggggaggagcagcgcatcgcgcaagcatccgggagcggcggagggggcgggaggaagggcgagaggaggaagcgggatttaaacgaaaggcggtgacgccacacaaaagatttctataggctccagggaggttacggccgaggcggcggcggcggcgagcccgggggcgaggcgcggacgggaacaggaaaagcctccggcagcccctgcgggcggcggcgcagccacggccgcgctccgaggtgaagccgcgcgcggagaggaagcgggtgttttcccctctgcctttcggcccccgcccttcctttcagtttctgcccgctcgctcggaagttggcggttgacaaaaatggcaggagccggggcccgggccggttgccgcagcgccgcggggaccttctgagttggcccggtggcagggagactcgtgcaggggcgtccgatgcgcggggcccggggcctcgggagagctcagctgctgcgggccccagacgaggcgacagggatggacttgcgtagacagccagcgccgggccgccgggcgcgcggtctgggagggcgtgccgccgcggcgccgggccgcgctctgtgaaccggcgaggcgggaaggggccgccgtggtgctcggcacgcccgggcgtgtggcgggcgggcgagagcttgagcgcgatccgggcggccgctgtgcgcaatcagtgcaggctcccgcccgactctgactcggcgcggccgcgacagtgccggccacaccctctgccccgctgccgccggcgccgcttcccaagagctggaggcaggagatgcgcccggggcggccgcgcgtcccagagagccagccccggccgccgtcgcggggaagtgccgcctggtggggtcacggcgcctgaagcccacgtgcgccgccgagcccgaggtggcctcgagcgcggcggctgacagcacagcccgcctgagctgcctcccgcgctcctccccgaggaaaggattttgatttcaaagaaaggaaggaagga

SEQ ID NO: 14491 - DNA, 2300 bp, Homo sapien
atgttgcccaggctggtctcgaattcctgggcccaagaaatcctcctgccttggcctcccaaagtgctgggattatagaagtgagccattacacccggcctggaggtgggctttgagatcggatattaagcagacttacaccaacttttctttcttttaggttctcaaggcatctcttacaaatgtagagaaagccctggctatgggccacgtctcatttccttgcagaaaccccttctctctgaaatacggtggaatgtaagaattgcccatctgaagacctttgtgtccttttccaacactgctgttggagatgctgctcattgtgtgacctcatgtctgttatataaagatccacttgataaatttctccttaaacacagtgccaggaaaattttctttttccaatcggattccaaagttattgtacaatgagaagtatatgagccagtgtgtttcccttttatccaggaaactcagtgataaatccagggtttaactgtagtaaacaacatcccaggtgccttgaaacgtattgttctctttttactctagctcattggtccttgagttgtgttctgtttttaatgtttccttagactcctttgggaaatagtaaggtgtaaattttctccaaaaaaaatccatgcatacaagcacatatacatgagacagatggcctcttcctgtccctttcttaccatcaccactgctatgtccccagcccaggctaaatgccaggcactgggaatgcagtgatgaaaggcgctgcctgtgaatgattcatggttagtctattgcagggataagctggcacagaaagaacgcgaatgtaaggcggaatagggtcagtgccgacatcaaggaacaaagaaaaagctagaggggttcagaaggagagcaattgattctgcaaagagacatcagaatgtggaagccttctgggatggaagggaatttcaactggactgggaaggatggaaaggattttgaaggcagagatagaggaggaacatctctgactgagaaaacagtttgaacaaagacttgttctggaaaaaaagtaaatcgtcctccacatttggcaaaaacactaactgagttggttggcaggtaggatacatgaaggagacagtgggaactgaggataagattctttcacatgatatctattttgcaatttataaatggaatttgggttcaagcctgtagtcccagctaccgagaggctgagggaggaggattgcttgagcctaggagttcgagaccagcctgggcaacagagccagaccccatttcttaaaaaaaaaaaaaaaaaaagatcttgggttcaatatgtccttttgttcaacaaccctgtgaagtagcagaggaaataggattatttcctgtaatggatcaggtaacccggttacagggcagttaattcattctaagtgacacaggctgtaagtgagaaaaccagcaccaaatttcacactaattttactacattaagtttcatctctggaaatcaagaagaggtttgcagggccaagctagttgaagctcaccgtggactaagaatcaaagttggtttttttttcctttcttttcttttcttaagaggtgggtgggggtgttgacaaggaggaaagggaggaacccacaaatgtaatttcagcaacagttcccttaacaacgcccgcagatggatgaatttccgcacagtctggttctctgttccttttctgttcctgaagagaaacaattgagggagtgagggatatgcagtgatgtttatctttccagctctgaactttcaaattctggaatcccccagggttggggaagggtgggtgtagtcacttcccaccgttgcagagggatgggagatgtagcaactcctgttggggcatggggcggggtgtgtgatttcctcccaaatcggaaatttatctcccgaatgggaggctgcagagagtcatcaaggacttatctccaggagcagacaccagagaggagccctgcccaatcctttaccccaaagggggcgtgcttagcccgaggaggaagaagagggtttccagctaagagtcagcaccaagggcacccgctctcattcatgtgtcaatgaagaattcctgccagacttccagtactgtcctcgaccatgggcagaatcccagctgcccctcccagaacactccatgccactggaactcaggagcgcaggtcagttctgcaattgaaagcaaaggggaattttggtcctttccttggattgagtccagaattctgggatgaacagctcagctcct

SEQ ID NO: 14492 - DNA, 2300 bp, Homo sapien
ggaagcagaggttgcagtgagccgagattgtgctgctgtactccagccaggttgatagagtgagactctgtcttggaagaaaaagaaataagggagtccagaggtagtaggatggcatatttaaaatattgaaagaaagaaaaaaacgctatcaacaaagaatcatgtatccagaaaaagcatcttattaaggtaagcaaaaaccaagagaatgtgttgctagcagacctgatttataagaaatatggaaggaagttattcaggttgaaaacaacacaaagcagtaatttgtgttcatagaaaaataccatagagcaccaataaagatatttcttctcctgagtgatttaaagcaattgtataaaacactatgtataattgtattattgggtctattatatatagaaatgtaatatacttgtcaaaaatagcactaaggaagtaggtgggagcaaagctgtatcagtgtaaggacttactgaatgacccaatcattagaaccttgttaaaaatgtagagactagagctgctttgttttattcttgattttatgaggaatatgaaaaatacttaaaaggaaaaacaaacaaacatgactttggagtcggaaagtttggactgagtcctttctttgagcaacttttagcagtttgaatttagactgctagcttctttgagtctcagtttctgaatttatcaaatgcagttagtggtatactatctgatctaactgctttgtcctatgtgtccttcagaagtatcctcgaatgtggtgatatattgacagagctggtggattcatcagaatgtgggaatgttcctatttttattctacacttcagcctgccagttcaaatccttcccagttcagctccaaagcagcccctctcccatcactcaaaggccatccaattcccattctcacagttcctcaagacagaaaggatccttcaactccatggcccttcatcagcatatatatatatatatatatatatatatatatatatatatatatatatgtatttttttttaaattggagatggggtctcactatgttgcccaggctggtctagaactcctgggctcaagtgatcctcctgcctcggcttcccaaagtgctggattataggcttgagccaccacgccagcccatcagcacatctttaattgcatttttccacagtcttccttaagtaattcgttttcatgaactatcttttcttttagactgggtttgctgaagggagcggaggctcctgtcttccatttcagtcatgtcttactagacactaaatagaggtaaattactgaatgcattcaatctgcatcaagcctccggtagtcctacagtaactggtatccctcccctccccagaaaataatattttgttttattaatgctggctacagcagagtctggttttcttaagagttcctgcaaatcacaggttcgtcctttaactttgagacccagggaaggagggagcaagggagggagggagggaggatgctgtcaagtccgcaaaaatatggacaacctcagaaacctataaacagaaatatactaacatggtatatttcttacttttaaggccctgaaattattaattttcctttcttctttctatgcgattttggtttccaaatgtgtacattgagcaggtattgttttatgattagggcgaaattgctgctgctgctgctgctgctgctgctgctgattacaaaaaataggctgcaagcaagccgtgcttccatttaaaagctcctctttgttgcctcgacaagcaaggggtactcgatagcacttttcggttagattctaatagaaagaaagctttaaatttctctctcggaagcactttgtcagccagggttttccctctcgcccaccctgcagttaaggaaatctaagaggtggaagtggggcgggctggagggccacagacagccgctgacccagacgccccatctcccgccccagggcgagggtgcgcgctgtcgcttattggccagcagggtcccagaccttgaccaatcgcctggggccgggtcgtcatggcgacgcgccacgctaacgcatggtgtcggagggaggcccacttgctgaacagcagggagcgatggcgcagaacgtgtatggtccgggagtccggataggcaactggaatgaggatgtctacctggaggaggtacgcagggtgtggccaggcgcagacccgcagctcaggaactcccagaccctgctctaagttcagtctcctactttgagcgcctcaagcctcctctctctccc

SEQ ID NO: 14493 - DNA, 2300 bp, Homo sapien
agcccaaagggatattgaaaagctcatggtgaaaataaaaataaaaaactcaattttattctccagatctgatcttgtttcatgtatgtggatcgtatttacaccatgtttttttgtaagcggttttattcacttaataatataatgcagacatctttctatggcaatacatcttattttatcacatcatcttaatttcttttcttttctgtctttcttttttttttttttttgagacaaagtctcactttgtcacccaggctggagtgcagtggcacgatcttggctcactgcaatgtccacctcctggattcaagcaattctcctgcctcagcctcccgagtagctgggattacaggcacatgccaccacacctggctaatttttgtatttttagtagaaatggggtttcgccatgttggccaggctggtcttgaactcctgaccccaggtgatccacccaccttggcctcccaaagtgctgagattacaggtgtgagccacggtgtctggcctcacatcatcttaatatctgcagagtactcccagaatttatctagcctattgcttattgttgctgccattgggtacgactaaaatgcaaggccagtttctggccctcacagtgctcctggcacagctgcagcatcctgcagtttcagagcctaggcagttcattcaataatcagagtaaggaagggtcaggaagtgccagtgtagggtccccaccctcacccaggggtgatgatggctctcagggagctgttctgactccaggtgctgatagcagagtttctctggcaacctgtagcactgccttgagaaatgattatctaaagtatatttgcatgggggtgaggggtgcagagggagtacgagagtcacagtgtcttggcagtggattgagcagagtgatggtgatgccagtggccacgactctttggagccctgagtggtagcagtgatattgaggccagaggcaccacggcagggggcccatcccagaaagacctggggcccttggctggtgacagataactcagggactagaccaggatctgtctcacttgctttcctggtaagtttttctctctatcaaacagagcaggttttccctcccattcagtctcacattgctatgtccagaaaatcatcacactcttccaccagaggggtggatattactttctcagttttcagttttgtttgcccactcactgtatattcttttggtctttccaatggtgatccaaggatttatttaacccagcagtcaaattggtcattttaaataatagtacatcttgtccaagtccaaaaataaaatgtcctggtatgagaaggcaagcggaggaaattgggtagagtaggctgaaaatgttttatagcaccattacccggagcccaagcccctttttcatttatcccttttttgtcccggcatggcaggagtcagagcgccttctgtttgtcttgattaaagtcagcctccaccttcccccgagcccagttgcccttctcaggacacaggctgcattcaccatgggtctctctgcccaagctctttgcagattttatgaaaggcgttttcacttggattaaacaggcgctgtgtttgtgtgtggtgtgtgtgaaggagaaaatgaatcacttcaactttgggcaaggattttaggtgtagtgtttgtcccatgcaattacataaacacaccagaactcattaaaaaaaaaaagtagaagaggggggcagagattcaagtgcttgcgatgatctaaacagtgcggcacattttccatacattagacctcagaaagggttgtgttctgccctctcacaacagactccaagtccaaaggaaagtttgaggttttacatttctgtttgtggtacaggaaaaggcttatgctctgagggcttgattcagtgaaataacattgcctttatacacatttgcttctcaaggagggcaggagttggaagcgaccgttgtgaaacgttaaagattttctggcagagggaaagggattttttttttctccctccctgccgaggaaaaaacagttctaacgaggagttactttgtagttttaactcatattcaaatactcccagccgagaagctgccatcgatcctcccatggacccctgatcctggtttggaggaacttttcacagctctctctccctccctcaaaccctgtgcaatgagtttgcagaagagagtcttcccgagaaggcagaacggtgagtggagctccttctcctatcccaggggactcaggggaggttggaatggagg

SEQ ID NO: 14494 - DNA, 2300 bp, Homo sapien
agtaacactgtgcagtagaagtttctaatttcatctggcagacaattaatttcatctaattttcatcgtagcaaactaaggctgtgaatgaccaagatcacacaggaagctcttggttgagcttcaagtggtgcttgaacttcctagttctaaccagggcggggctctctcacctgcgtcttcctccccgtctcttctggcttgcagtgagctggactatggagtgttgggcagggtggagactctttctgcaggatgtcctgaagggcagaggggtgataaaatttccaccttgaagcacaaaccaccccgtattaggaaaaatcagggccaagtctcaactacactttggaataaatttaccttctgagagtgagaaagaacagatcttcggaaaatagagggagaggcgggaactggattcaggtgccgatgacaagagagagcttagacttagtggaggaggggggctgtggggccctcccaggcctcaggatccaagaagggcaaggccagcccccatagccctggggtgctgaattgctcctcagcctctctgccagagcaagatggaagtggggcctgagtctgtcctggccccaccgcacccaggccattgtgagagagattgtgggtgtgagctgagcaggcgacactgacagaggcgctcactctctgcaatttagaaattccttcactgcactccagactcactccagactcagccctacaatgtcccctgtgcctgctgacaaaggcagctttatccccagagtgctccctcctcccgtgcttcccttgggaccgtgggcctgtgttctccagcagcagcggctagatctttgcagccttgcatggaatttcaagggcttcctacaggttgcacctacaccctcattaaagcccccaggaagccctgaaacatttggtgctgagcgttgggaaacattccattctttagaagagaggtccatacaaaaacctcagcctagcatgtacacagggctcacagagactgagcttaggagagatgtgtgggatgctctttgcggggcagatggattaaatgccaccttatgattagattctccaaggggctacgtgggggaaaggcactctggtctcatgacactaatgccaacaggacacacacaaaagtgccccattcttttatgctgcagttttcaacatgctctgtatacgttaggtcatgggctctcgcacctgagcacgcaccaaaatcacctggaggctttgtgaaaacagagtgccagaggtgctgcttcaggaggtctaggccagggcctgagaacttgcatttctagcagatgctgctgatgcagctggcttgaggaccactgagttacataagcttctgagagccagtctgttgtttttgggaaagggtggcacagacaagaaatgaaatgctatggaaaaagcctgggctttggagacaggtggattttgacttgctaacttgctaactgtgtgaccttggggaaattccacggcacgtagtaggtgtttaatgaacgtttgtgcagtggctttctttgtctgcaaagcaggtgatatatttaccagattgatggcaggattgtatgtgatgacttttttcctctttttattaaatttttatataatttgagaggagttcttgctatggtttgcccgggcttgtcttgaatcccccggctcaagtgatccttctgcctcagcctcctgagtagctgggattataggcacgtgccacagcttccagcatgtgatgaggtttatagaaagctcctagcagcgtgccaggcacattgcaggcaccgagtcatgtctgctacctttcggctctcctagtcatttctgtgttgtccaaagaaggcaggggcaactgggctggaccaaggaacctcactgtggttctgtggctctgcactgggtttgcctcctgggtgttgccggccagcccagcagatggtggaccttgttctgaggctgagcttctcagcactggcagcccccctttttggatcaagccttttcacgtggagcagtcagatggctcagatcaggagtcttcgagcaaatccatgccaggtgggacacatttgtcctgagtcacctgtccagagcaggtggtgaatattgtgtcctactcacggcatctcaactatcggagcctgggatctgactcaaaggccggcctccgtctgagaactgagcgtccatttctcaatccttgccggctctgacccaggcctgggccacaggctgtccgggaataagtggtgctgcaatccctg

SEQ ID NO: 14495 - DNA, 2300 bp, Homo sapien
cagtgacctggggtgtatgggaatcccatagaaaaacagaatatcctgaaaatgagtttataaagattacatactatactacatcaggaaatgtccactgttgaggagagtcagcagaaataacaaagaggagcgttagcccttaacaacttaacagaacaatctaaaagagactatagaattgctatgtttaaaatcattttaaaaagataaaaaaaggaatataaactgtaagacaagaccggaaacagtaaaaaaaaaaataagtggaagtgaaaaaaataacttttggaaatgagcaaaaaaagcagtcattgaaataaaaaactcaatggatggcttaaacagaagattagatgcagctgtaaggagaattagtgaactggaaattatccagtaggccacgcagatcaaagaagaaaaagatgagcactaaagaaatatggagaataggttgaaagggtccaaaatacatttaataggaattttagaaagaatagagtgaaaagggagagatagtatgcaaaaagatagtggcttataattttcaagaactgacttaaggcatgatatttctgcttgaggaaacacaaaatgtttcctttctctctagtgcatcatagtaaaactgcagaatatcaaagacaaaggaaaaagaaatcttttctttcctttttttttttttgagacaggatctcatcctgtagcccaggctggagtgcagtggttcaatcacagctcactgcagccttgatctcccaggttcaagtgatcccccacctcagcctctgaagtagttgggactacaggtgcatgccactacatccagctaatatttgtacgttttgtagaaacagggtttcgccatgttgcccagggtgcccccatctcagcctcacaaagcgctgggattagaggtgtgagccacagtgcccagctagaaaaagaaaccttaaaagaaaccagagaaaaaggatggatcatatacaatggaaccatgattaggcgacagcagattcatcagtaacgaccaggtccagaagtcagtgtaaacatagtatttatatctgagttgcttggtgcaatgttgaattcagagaaagtgctccctgtttgtgtattgaacaaattgaaagaaagggagaaagtggttttctgttcacatagaaatggatttttggttacaggaagaatgattctcctacaagtatactgttgtgaaaaaaggacttgcagtcaaaagatccaagtcctatttatttatttatttatttatttatttatttatttatttttaccatatgacttcggacttctctgagttcacttttctctattgtaaaatggggtctacattgcattctggaaaatcgtatccaaaccacatccactgagcaatctgtagacctcattcagcattggtcctggggatatatcatctaataagacaaaatccctgtccccaacaagctgccagcctggccagggagtgactgagggtgcaggccattgatcaccacccagggtgacaagtgcagtaggtacagtgtgacatgaacatagaaaggagctaaaggtagcaggggcctaaagattaagaagggataggaggagaaagtggaagtatattttatttgagaaaatggcatggacaagcatttaactgcacagaccattgtggaaaatgcaggtcgtgttgcatcagaaaatgatgcatgggagcaaatggtgtgagggtcagggagacaaggaggaaggaggtgaagcaaagaggtgggcaaggaccatatccagccaggacttgtgtgcctggctaagaaccctgggtttcaccctggaagagagtgggtgccagagaaggcccatgttgctgccctgcctgcttcgcaaggggagagcacaaaatgagaaaatgttcttccagagcttcgtgcatcatacaaaaagccgggcagttggggagactagagttaaaggtaatgataatgccctttgattgggcaacactcttcttagctacactttctctctctaaacaggtgatgaaattctggagctcaatggtgaatcaatggctggactaacacatcaggatgctttgcagaagttcaaggtgaccatttcttatcaacacgtgaccaaactctggggccttcaggcaaagaaaccaagctctcagcatccaaacctacaaattcaaactgtggaacccttcacatgaggcacctcactgatgctgatcttggcgcagggttaaaagaagacctgactcagaaaataatagtgtgatcgggattgtt

SEQ ID NO: 14496 - DNA, 2300 bp, Homo sapien
cctatgaagtggtaactttgcctagaattttccagcaagtagtggggagaaggttggagagttgagggggcctccttgggaacccctgcattgatagactttggactttatctagaagatactgaggaaccattgattcccggggtatttctggaaatggaattcatcagctatttgcagagtgggttgaaataaaataatttagaatccagtggcccagctttggagctggtacggggctgggagcctgatgcaggagcttctactgtttgtttgaggagatgactgatattttctaggtctctgaacagcaactcaaagaagctgtggcccaggctgtggaaaacaccaagtttggaaaggagaggcatcagtggagtctggaaggtaagacaaatggtgaactttgatgtaaaatatctttgccttcttagaaagcttaggatttatccattaactcatcctctatccaaggaatagtaacagcatttaccatagaccagcatagtatgtagacaaaggctgaaaactagcagcccaccagctaaatttagcttatatttttgctttgtttggaagacacaagattttaaaagcatctgaatttaaattgctacaaatgtgccaggctctctccagctcccggtggtctccaccgttccctttatcctgtaccaagttgccattcacacaatagcccctgcaggcacttgagtttgcagcccctagtttataataatagaatattagaaaaactaacatttgggaatataattctgacatttatttaattcttataattcttataataaatcagagactatgctaattcatgcattcacacataatttttatgcaaattttataagaaaaagtgaggccctcagagactctcttactcaaagtcataccactagagcacagaggctctggaatggagatccagctggcttgactcccatgcctagccattgggcattaatcacgtctaccatggaacatccttatgaaagaacaacatgcaaccattggcactgatattgacaagaaattaaatgatctggggaaatgttcagagaaaagaacagaacacaatttatttcagctctggtttattatttctacccacccaacatgcatatatgctcgggaaagcatgacagagaaactcaccaaaattttgacagtagttatttctggctgataggaacacaggtgaagtgaatttttactttcattccttcctccttgtggctgagttttctctaaggaggatgcattatttcatgatcaggaaaaaaaaaaagaaaactttttatttaaagagaaagtgagttaggagcttggctggccttggttctctctcatggggctcctctggctttcttggtctctcagaatgagctggaatttgagcaagagactagatttcaatcctctcccaccccttcaagctgtgattttaggaaaggggcacccttgacagcttaccactagagagaagggcctctcaaggatgtgtgggtagccctagtgctggaaactagggtagggggtactgagaaccaggaagggctaatggggagggagggaggaaggtgcagtggctaagaaatagcggctttctgccctcacctcaccctcaactggaaagaaatagtgacttcttcgtgtaagattcaaagtgccttgacaggtagtttctctgtctttgttattgagcctcaaaataaccccagtgactttaaaattatcatcctcattttacagatgcagaaatggagttgggtcccccaggaagctgactctgagatggagtttggtctgcaggcagtgtcctggggttcactacctgtggcagggaggggagcaggcagggtagacagagggaggacggagctgaggtgcacacccaacagcttcagccaagccctggagctctgcagccaaagtccccattagagttgtcctatgttggccaacatagctgggcctctgtaaccctatctccagcagtccctggagatgggctgccccattggacaaggcagctgtctgcagctgtggcagcccctggagggacccacagctgaaagtagtctgccagcagcactccccacagctgggacaccaagcccttcctcgatgggtgatctgggtggcatatctccatatacatcagtcataggctcagaaagcttgaatgattttcccaacccaaagtcatacagctcgccagggaccaacaccaagactgccatactccagatccacagtgacttcagataagaagcagatgg

SEQ ID NO: 14497 - DNA, 2300 bp, Homo sapien
acctgtggccaggtaagaggatgggtccacaggttgagtgtttccaggaccagactcaaatcttgagcatgggcaaattagcaagttagtgttagcagggccagaatgaaagtttctcctgctccaccagagagaaactgttgcctaggactcagctgaggactgaccatgaaaagatgggtttgaaggttgacagataattgaagtcccagtcctgcttgctggcatctgggttcccacccataacacactggaatttaaggttcctttcttgtgtcatttttcactcaccatgaaggaaaaataccagggcccctgcagggtctcagtctttgcatgtggatctttgagtgtcctgcttgtagggagaatagtggcttaaataactaaaaaggggcctggcacggtggctcatgcctgtaatcccagcactttgggaggctgagccgggtggatcatgagctcaggagttcaagaccagcctggccaagatggtgaaaccctgtctctactaacaatacaaaaattagccgggtatggtggcaggtgcctgtaatcccagctacgcaggaggctgaggcagggaattgcttaaacccgggaggagtggctccttccaagggctattgtgaggattaaaggtaaccacttaaggcaagtacctgacagcatctcaggcatattagcattcattgccatgatctttccccatcaggccccttaaagccctcctttccaccccttgcataaaaggcagactgactgacagacagctgctgtgtctagaaccattttatgcgcaggctaaccacactgagtactttcatgtacattgtgtcaattaaatcttacaaccacctgatggtgagagtcccagttgtgcaaagagggaactgagaaactcgctcaagttcacattgctagtgggtcacagttacccactatgcaatgctgagtttcccatccttacccagaagctgtctcccccatcacggaatggccctgcaggggccctggcccttcccttaagcacaccgtgggcaggtgggagggggcctctggaaatcccctaaaacaatctacagtgagggttggcaagcttcaggaggggtagcggtggagacgggatgttgagtaggaggggtgaaagtgaaggagggaggaggaagccaggttactaaaaaggaagtgcagttttgcagagcgctggcaggatgtggctggttagcaacacatgatggagttatcagatggatctgttctcccaccccctcttttaagcccatatttcattttcccttgggcctgagacctatgagtccagaagggcaaatcaggagcagccagctgagaagccagtcattttgccttcctcctggaggcccagaaaaggagtgcagttgccacagcaggtctgtcccagtgatgcccttggcagagccacatagggtcagggaatattcccgagtaaggcgtctggagaaggaactggggtgtcctcagggaagcccaggcaaggaacttcccacaggtcatctttcatgccctgtgtgcctcagcagaatacagggctccctcctgtacctgcccccaacagcaccgtctcctggagacaaggccgttctgcagctgccctcctctgtttgctctggtctgtcccacgtggccagcagatccttctcccacaaacatttccataaaagcaatcagcacgacataattttattgggcactggagaggcgggggtcacagagaaaggatcatagcacgcaatagaaaacaggaagcaatttgcttgaggtcactctcaaaatttccttgaccattcctggggatttctcactggatgttttcttccgtggccacagtgtccactgtctcactctcccacttttccctccctgcagtcttttctctacagggtcccaagactgttgtcaagctgctatggatgacccccaagtctttcccatctactctaattcaaggggacttaactctcacaaccaatatgaactttgggatattttcttcaacaaaaaactaacatccctcttataaaaaatcagcctaaactctcccccgtgctttaaaaaacttgcttaaaaaaacacaacaggattttcgaagaatcctttcttagaaaacaaacaaaaaaaccaaacaaaaacgtactttctccccactatgctgaatctgctctctccctctttccttctttctcttctccctccctcatccaccaagcatggttccaggaaacactagtaagagaaaaatttgtgtaaaatcaaattta

SEQ ID NO: 14498 - DNA, 2300 bp, Homo sapien
gccacagtgtccactgtctcactctcccacttttccctccctgcagtcttttctctacagggtcccaagactgttgtcaagctgctatggatgacccccaagtctttcccatctactctaattcaaggggacttaactctcacaaccaatatgaactttgggatattttcttcaacaaaaaactaacatccctcttataaaaaatcagcctaaactctcccccgtgctttaaaaaacttgcttaaaaaaacacaacaggattttcgaagaatcctttcttagaaaacaaacaaaaaaaccaaacaaaaacgtactttctccccactatgctgaatctgctctctccctctttccttctttctcttctccctccctcatccaccaagcatggttccaggaaacactagtaagagaaaaatttgtgtaaaatcaaatttatttcaggggctaattctgaagtctcccatgaagaggatgcaatattggatgtgttgatgaaaagacaaaacacatttgtgctgttctaagttgtaaagctgcattgactgcagttggtatcacatgtggctgcctgtaaaagagctaacaattcatgaatgtcaacagatgtcaacttacagagctcccaaccaggtgaaattaaatttcatccccatgtaatttctcttgtggacaagagacttagagatcatcaggccaatatttggagcttctaatgccatgactcagccttactttttttaagggctagttcgagaagctcaatgattcctttgaaattggttgatctctcagtatttcataatgctctcctaaagctcagttctacagtagggaactcgagctgaggcaatgctctgtgaatacacttctaacttttgtagacctttgcttcctccaaaatgtttattgtcaatgtagatcttaaatttcaggtcatggatatttgccattgcttttttagtcccaaaggatgcatttgttccttcctctttccttcctctctggaaggaagcctgcagccatgtcaaatggcccatcattacacaaatctggaatgaaccggacgtggaggccaccgcagtatagcaaagcatttctcttgcagacaatcaaatacaggtggcatcattttgatgatgtctgctttctcaatctttttttccagatgggtattatgtttggttgggctatgtctctggaacactatttttctgcctctctgcctgcaaaattcttactctgtttatgaagcagacagaaagtacttctctaggaagccttctccacctctgggatggaactggtctctctgtttcctctgggccctgacagtaccttaagcacactgtgtgataatccaaactcttcaagtattgcatagctattcagagcctggttcatcttgtccctaggctgttttgggaggaccccaaggctgcatccaggctcagtggtggaaacaattctgcaacagattgaggatgtcaccctaggtgccacagaggggagcaatggcacaggtgctgagtatctgtcatcttttgcagaacacttactaaatatttgaagagtgcttaacaagtgacagcaattgacaagcattttcctgagtgctctaaccttagggaacactagctgccaggtttttttgctgccttgtttctacgctgccctataccctcccggggtgggtagttcaccagatgcagttgtaactgaagcaatgccagtccctccacactcaaagccttttgttcctatcataaagagtcagggtcttcaagtatgtcaacagtatgagcccatgacctggataccaggttgctggaagtcaagggatgctctgcatgtctaggaggtgctggctctgccacgtcagcaccaaggagaaaagaatcctctttacatggctgctgatgaacttctcactgaaagcagctcaatatccgtttttccgtcccaatcaaagcgtgtctcgccttctcacagcttgaggctaccgttttgacatggtctcgcttcctgtttacaccacaggaagcgagagagctgctgccactgctgctaccacaggaagacacagcagggagaagccctagtgcctctgccggctgcccaggacctggtatcggcccacagaccaagtcctccacagagggcgagccagggtggagaagagccagcccaggtaagctttcattgagatcttccaaaaggaagggtcttttgaaaaaaggtgcagggataagataagagcacaaattggcctgaggatcagagtgctctgcattgacatc

SEQ ID NO: 14499 - DNA, 2300 bp, Homo sapien
tgatggctacataatattccactaagtggatgttctataactttggttaatatactggtaaataggttacttccagttgcaagattaattttatgcatctttgtgcaggaagagtcactggatcaaagaacaagtagagtaaaattttaatatatgttgttattctgttcccaggaggttgcatacatttgtactctcatccgctgtgtaacaactatttctccataccctcaccaacacagggtataaacaaacttcatgtttgtccatcaataggttttaagaaaagcctctccttgctttaatttttaattccctaacaatgagtgaggttctgcatctttttatagctttgttagccatgtcaattaatttttccacaaagtatctttccatgtctaatgcattctttttgtttatggggttgtctgaaaattgcttaatgatttgtatgagcccttggttcgataagaaaacttatgtgttaaagtgtgtcccgatttttttctcatattatctaactttttatgaaattttgatgtgcttaattttttaatgggattaatttactagtcttttcttttatgggtcctaagagtatttacatgcgttacttccctctctcttcacaagggcatagggaacatttatttgtttgtttgtttatttttattactttttgagacaggatcttgctctgcagcccaggctggagtgcagtggcgcgatcacggttcactgctgcctctgcctcccgggttgaagcgatcctcccacctcagcccccccaagtagctgggattacagccccgcgccaccatgcccggctaatttttgaatttttagtagagacggagtctcgccatgctgctcaggctggtctcgaactcctaggttcaagtgatctcctgcctcagcctcccaaagtgctgggattacaggcgtgagccaccggaccccgccaggaacatttatgatgtatcccatttcaccttggagtaaactgaagctcaaagaataatgagtgaaactgggtttagatcttgagctccctaattccccatccaggtcttcttcacagcctggctgcccttcacatcttccaaaaaggtctttcaagttgtcaatttgtttacactactcttccaaacatttatatcgaaagtttaaaggaaacaataagtacataaaaaagaaagataagaaatagacctcagtattaaccttttcaaatatttagttggtgatagcgcagaagaggggaaaccgaggctgtccttgccattcacgctgtgaagatgcgaccctggctcactccccgcagctccagggcagctggaagcagagaactcccatatctctaataaagccgggcctctcgcagatgtcagcgcattgcattgactcctggacacctgcactaaaggcccttcaggcacctccaactaaatatgcccagaactgaactcaccctatctcttctccatctcaggtaagctgccaggtggccaaggctgggagtcatgatgctttctccttctgaacatccacaatcgggggcagagaccttcaccttccatctcctaaacactctacgatgggtcctcttctcttcacccccactccccgcacccctgccacacacctctcccaccattgcacgcgcccagtctccacgcgcatttcctctcccaccctgcagcagccgccctagcatattacctctaatgcaaatcgcaccactgtcccgcaggctgaaagcctcggtgcactcaggacaagagtccacgcttcttaaacaaacggtcgacgttgtccgcgacctggcccggcccaacgggtcagaccgtcattggccatctcacagtcccggcgctccagagcccctcccacagcgggacatgaaggaggcggatacggctggaccttacccggcccgcccaaggcgtccgggacccgcccaggcgctgacgctaactggagagcctggccccgcggtctccttgtcctgccaatctccgggaggcgggatccgtctgagggcctggaccaattcgggagcgggggcgcggaaagaggcggggctacgagctcctcccagagctccagcctccaggcacccgggatccagcgccgccgctcataacacccgcgaccccgcagctaagcgcagctcccgacgcaatggacccggcgctggcagcccagatgagcgaggctgtggccgagaagatgctccagtaccggcgggacacagcaggctggaagatttgccgggaaggcgtgagtgaggagctggg

SEQ ID NO: 14500 - DNA, 2300 bp, Homo sapien
aatgtaatccggctaacatttctgtctctgcctatacaagtaaaaccttaacttctccactttggaatgctgatcccatttatttggacttgatggttcctgggtggctaccctcaagttctgtgttcaaataaactctattcttaatctctgaattaattttctgaatctcattatttaaggttgacacttatctcacctatagtgccagagagaattacctgaatgaatatgaaattttaaaaagattgattttgctctaatttgtttttaataaatccctgtgtactgcaaaatttgctacctttccttacctccccttacaatatacatgtatatgtaacatcaaaaggaaacaaaaacactcaaaatacttgagtgagattaatataaaatattttaaatttttgagtaaatatttcaaaataaggcaggggggctttagaaaaagtaggacgaaaaaaatctttgaaatgttcaggaatgattgagataagtaaagatctctgaaagaatgcaaaaaatcccagtggggctagcagtaattctattgtataagccatttgtccatttgataagcacacattttatctaatgttaccagatagagcatcaggccaaatggcctcaagcaaattggcagacagatgacctggtcccagaggctccggatccatctctgacccaaggccagctctggcactcagccttccacttcgttcccatgctttcagcgctaggtctgaacacttgcctgatggtcctgaacccctgggctagggctcttgcttacatttgccagttcagtgtgtggtaagatctttccaattatttgctaatgaattagtggaggattgaatggacaaatgaatgaagtttctctccgaagccccacatctgaacttgctgatggattttctttctgctccgttgtctggtgtccacttcagttatttattcacccatttattgagtctttagtgtgcagtgggtaatgttcaatagaaagagtcatgtctactccagtcctgcaccttcccattctgttactacaaaggtgcaatttacctcactgcagtcaaaccatttcttgtgttaagtagcaaatagaggtttacactgtgaaaccaggcaagtcttggacttgggaatgaggttcttggaacagaatcccaatgcatggctaacagtgagagtctgcaggtgacaaaggaaccgggctccattctgctgatggctggggaaggggaggagaagctgctgacctttgctgaaggactaggatgaactactcatcccattttacagcaggcaacctattttcagaacattgaggtgagagtctaatctctatcaaagtcttcctttcttaccaaatgctataggaagtctctttatttcttttagcctcagtctcagagtcatagtgctcattaatgtgaccatgtatggtaaaggtaaaatgtaataagatgttaatttgattattattaatatcatgctgaagtacttggggttgatgtatcattatttctgcaatctactttcaaatggtgtgtggtgggggaaggatacagacagaaataaagcaattgtggcaaaatgtggcaattggtaaatctaggttaagagtgtacagatattcctggtactgttccatcagcatttctaaggatttgacttttttcaaaatagaaactaagttgagaaaaaactaaataagaaaaaataaaatgtgatggctgtgcctctcctcaactccactgtatgaacacaagcaaggtccttactgtctctaagcctcttcgttgagagtaaaaaactggggaaattaagccttgccttttatactccctcagtgttttgtgaacaccagtcatggtcacagatgtaaagtgttttgcaaaccatccaggactgtcagggcataaggggttaacggatgtgatcatttgtacagcaccaagcgatgtgtagatcaccgggccaaacccttggctgtctagactccagccaatctgtgtgcctcagccaccttaacattacatatgcatgactggcctcctggattcttccctgctcagagcaccagctgcaagcacacagtcttcttcctgagaactagcgggcagagcaaactccgctgcttccattcagaaacctcggaacagacctttgcctgccaacttcctagctctctggccagcttctgattgttagcagtgggttagctcccatgaaaacctcgaaggcatcccagcgctatagaggcatccggagaaatgccagccagtgctacc

SEQ ID NO: 14501 - DNA, 2300 bp, Homo sapien
gcgtgagcgcgggaggctgggcctcatctctggctctccccagccaggaccccttactcaaaaccctccatctcggcaagaaccctcattcccaagttagttggattccaagtccataaaccgggtcaaaagaatacagtaatttcctactggagctctaagtggtggttttcacggaggactcggcaccatcctcccacctgcctcctcccatcgaacattcctttttaagaaaaacacacaccaggctccgggaagctgacgtaaacatcctgaggaaataaccactgtaagtggcttctaaacccatttccccaaggaaataatcagcacctctttcccaagacagctccaggtaagcaagcggtgaagggagctgcaccaccgcgttctcaaaagtaaaggcgcttgcggaactgtctactgatttgtaagcgcgcgcccatccactgtcgcatttaatcttccgaacgacccacgaggtggtaaaggcggggattattttcttcattttacgggtgagaaaccgaggcccacagcgctcgttcctgtagccggggtcaggcagggcacacctaggggagcctctgccttcgagccccgggaccgccccgcggcaccacgagatctccccagtcagcccgtgtgcggctgcggccgcatggcctcattgttttgggaagacgtccctctgtgaggatcttgggcgactctatgaaccgcgggcccagccgctctgcggaacgatccgcagcgggacgcaaagggcgcggcgagcccggcggctcccggaacaaaggacagcagagcgcgcggggcccgaaggggcgtccgccctagtgggcggcggagggggatgcgcgcggagaggaccagcgcgcaccgccccggcccgcccctcaaatcctccttccttctctctcgcactcggagacggtccctgggagatccgggagggggcgcagctcgccgtcctcgccggcaagtgccgtcgcaacctccctctgccgccacccccaccccgagaagcgcacaaagagcggccgggcagggagcgctcacctcccgtcggggcggggccgcgggcggggccggcgcgcgctccgcagcgcccgccttaaagggcccgcccgctcctcgcgcgcactgcgcatgctcggccgcggggcacggaggggagggatgggaacagcgggcgcgcacgcccgcgccgcccgctggcgctgtggcctgcgtccccgcggtggcggcgcggcgctcgtgcgcgtgtcagaacccgcagggtctcggcccgggcgccgggcgtgtgctggacactggtgccatgcattccagaggtcgccagcggccgggcgggccgagctcgcgcggcagccagcttttagctttcccatcctcagtttcagggccagttgggcgaagtgctgcccaaggagacagaaatgcaggcgcgggcgcgcgcgcgcgcggttgccagtgtgggcgggcgtgtgcttttgtgtctcgtgcgctcccgcgcaggtggacaacccgcgccgggagtcactctgcccgtgcgccccaagacctggagtcccgttttccgtgtcggagggctcgggtcgcccttttgggcggactacagactcttctcacagaggaagctttggctccacggatggtttatttggagccactaacgggacttcctgaggaccgctcttttagagcccggctccaggcatcagagttgggcgcgttttcttttctcagtcaggcgagggaggagacttagggacaatgattgtcctcggctgataggtacatccaagtgtcccgagcctgccagtcccgcattagacaacaaagagaggcgttagcggcggcgggggaggggcgcggccgggaggaggacggggcgggctgcggcgagcgcgggggtggggggtggcgctctctctccgctcgctcaacccgcggcctcctcccgcccccggcctggcgcgcgccaatcgcctcccccagcgatagtgtcagtagcattgtggtgtcagctcccgcctgtgacgttgcgcctccctcgtccccctccggagtcgtctggctgcagaggctcagtcaagaggcggggaggagaggaggaaaaagcgctgagtgagggcgggcgggcgggcgggagggagggagtggaggagccggggaggggctccttaaagaaacgcttctgtcgctcgcctgctcgcttttcgctcggcattgcggccagccagccgggcactcggggggcacgcgcggccaccgctagagctctgcccccaccc

SEQ ID NO: 14502 - DNA, 2300 bp, Homo sapien
atgggcccagagaacacggtgccgtgctgttcctgtatctgggtgcctgtttgctgttgctgacaatcagctctcgtgggtaacaactgaacacactattcactaattaacaccccctagaaaacatctgtttttcttctttctggctgatttttgaaaatggaaatcactaagtagctaaactgatcgtgtgtgttgtgtgtgtgttgtgtgtgtgttggcggggtggggagtaggagaggagggaggtacccaagaacgactcaatttaaaatccccaccaccacctgcaccacactgataacgggcacaggttaggctttcagtaactggtggctattgttgctgttgttaggagccactggagggttgggatgggagatggcaggggacaaacgccaatgcttccatgtcgaaaggtttatcagatgggcagcaagaaggacggcagagagctctgggaaagaaggggccctagagaatcaacagtggttcagagggggtggcgacaagtcaaggaggtggaggaggatccagggcagataggagtgaagatgagatggaaatgagagagagccatgattagcggacagggtctccaggcagctgagaaagggagcatttgtgctgtttggtgccaaccacaaagcacaggtgtggtcttaccagcacccaaaacagcccctcgggtcagcacttgggtcacacttcctgaggttcaaagcccttttcatagactcttcccctccatgtacctctctgtgcctaatgactttttacacatgtggctgctaagccagcccctgtcctggcctggatgcggttgtcagcctcatggcagcgctcaggcccaccaaggtattttctagatcctagctctgtctttctgtatctcatccatccagccctcagggaatctgtgaactctgtccgctgacagtcaaagagcacctcgttctctgcaatgagttattttaaaagatcccccaactttcaactcccaagcaaagaggagcctgccctcccaggctcatgttgctactgttcccgagactgtgtgttgctggggtcaactgctggtacctgtcagcttggtccccctgctctgggcccgcctcactcagtaaagctggctccggcaatctttttccataggggctgcagctgagtgctctccaccaacccagcaatcaacatcctcacgactctttccaggcctttcttcccttttccatcccaaaaatgaaaagccctaatggatcttctggaaattttttggctagagagctctgcttcccacttgtcccctgcagaagaaaaaaaaaaaagcaaccccattaacctttggggtcaaattgtcagtaaggaaagctcaggcattagaaatacagtgctagtctcctcctggctgcaatatgtgatatctaatatgtatcacataggccgggcacggtggccacacctgtaatcccagcactttaggaggctgaggcgggaggatcacttgggatcaggagttcaagatcagcccgggcaaaatggtgaaaccctgtcttactaaaaatacaaaaaaaaattagccaggtgtggtggcaggtgcctgtaatcccagctaatggggaggctgacacaggagaattgcttgaacctgggaggtggaggctgcagtgtgccgagatggcaccactgcactccagcccaggctacagagcaagactctgtctcagaaaaaaaaaaaaaaaaaaaaatatatatatatatatatgtgtgtgtgtgtgtgtgtttgtgtgtgtgtgtgtgtgatggatatgtagtaatatccgatataatatgtagcatatgatgtataatacgtaacatataatatgtaactgtgtgtgtgtgtgtgtgcatccgaggaactggcatatactaggttctcaacaaatgtaacaagagttattttttaattcaatcgaatatactataccacttttctttacaataaaatttttctacaacaagagaaattccagctccctggcagatctattattatgcactttactcattgtgaggagttcttaagttctaatgaggtaaggaagttctactttagtgaaagaatgaaacttccttactgttcactaacctacgtctcaattacctcccaacatgtttgcagcaagtaccctgtcgatggtaggcaagaggaaggtgtgacccacaaagatcaaggaatctaagccggccaaggtttgcttttttatagctcaaccttcccaacatttaaaaggaaggcaagtggggtctaacccata

SEQ ID NO: 14503 - DNA, 2300 bp, Homo sapien
aattcacctaaatcttataacgaatgtatacattatatacctagaaatgaaacagagcatttcctcaaacatcgcctataaaatcaacaaataagcaaaagaaacatttaatgtgatattcaagaaactgtaccagagcctcatattaaaaataattatttgtgaaactgcttgctagaacttgggttttagaataccctaactagctactttatctggtgagctaaaggcatcttctgcattgtgttctgcatgtatttttcatatataattgctttttcctgggagttgagagtagggatagggactgtgacctacatcttgggtttagctgctttttcaccccctttccacatactcaactgctactgctccctcaaggcaggtccaaggaagtctcttgcagctgccttagcagaaaccttggtcttaaagacgtttttatgcagtcttgtttcaattctacatttgaagaaaagacttagcaattcctcaatgcttggttttcagcatgtcaaacaaacaaaatcacaggaactttctgcaatgcaatgattttcaacatgccttataaaagtcgattaactgggagcaggaatattagaacttctatacctatttatttttgaaataaagttctaataataactaacatttcatagcactaacaatgtgccagacaagcactttacatatatgagctcattaacgatgaggcggtatgatgattgttctcattttatagatgaggaaacaggtatagagaaactaataaacttgtgttcaaggtcccagactaactaagtggcagaacctggtttagaagctgggcagccagccagagagcccatgctctgcggatggatgtcagcacacttgtaggtcaggtgatcaaaagccacatatggaatgcaaagaatcccaagggaagacggaaagtgggatttcactgtgtccagggttgacagaggcaccttcatttgttcctttttggcatactgtaattttttttttgtctaattaagtggattttcagatattatctagtgttaactaagccttcacagaattttaaacctggcttaaaaggattcctgcaaagatatcactgataatactataatactaataacataagcacatgggaataataaaaaaagaaatggcaaagctttttgtcagctctccatcaaacaaattataaagtaaaaacaatggttatcaccaagatgagatcccaacaaatatttctgaaaaaatatatacacacttaaatctgtctcttcaaggtaaaataaaggtaacagtttaacaataagaaaagtttttttttttttttcaaaagaaatttgaaacatggagacaacattttgaaattaggtgtttgaaaatgttgccgctgacagctatttggttgccaaagataacataaatacttcatgtataatgtataaaaacctcttacaatttggaaggtgattttcttaacctgttcttaaaatcaccaaatggatagttcaataaagatataagaattaacaaaccttctaattagtgtaagaaaaatggactgccatcaggaaaactagatgttcactatatacattttaccaaaaccttttaataattgggaaaatggaatactaaaatggataacgtgacttagtaaaggaagccaacgaatcattcttccctttggactatgcaattttgtgaggtgccttttccagtgataatggtcattaaaatcaagtgttttaacaaatggaacctagaagccgaccttggaatggctatatcacaaagtgttcaggcaagaccttcaaaaagaaggaagcattattgtggtagccagcctccaagatggctccaatcatccttgcctcctgatattcacattcctgtgcagctctctccaacagtgagtcatggctggcctgtgtgaccaacagaacactgtggaaaggatgatgtgtgattcccaaggctagttcacaaaaggcattatagcttctgccttagtgttttggaatgctggctgcagccaatcaccatgcaggacactcaaacagtcatgtagagaggaactgagattccccagccagcaccaacttgtgagcccatgtttggaagtacagttaaaccttcagatggctaccgcccaaggtgatgtatgactaccactacttgagagacacgatgctgaacgcttccaaattccagaccaagggaactatgaaaaataagtgttgtttcaagccactaaattttgaagcaatatgttacatagtattaggtaa

SEQ ID NO: 14504 - DNA, 2300 bp, Homo sapien
cacaagaggcctattctcacctcaagaatattttagaacaggtattttaatttttagtatttaaaaaatttagccacgaagaagagttgtaaggaagttactgagctgggtatgagccgttgctacagaaaagggaacttttccacttcagattcatacgtgttgctgttattctacaagagaggcaatagaaaaagcatgttctcagtagtcttttccatctcttggaatcacccatcatataaagcttggacaataggctctcttgtttaaaactgtatcttggttccaaagtgaagccatattaggattttattacctgtctgtagtattttattacctgtcgttacaggaaattttacccaagcattcattcatttatttattcagcaaatatttcatagatatatgttgaataaatgaattatcaaatgtccattgtgcactagggattgtgaatataagatgaacaggtcagaatccctattttcaaggagctcacagtatagtaggggagacaaagagatatttggagaacaatgagataagtcctgggtgtgatataacagcatagataagggccatctaacccagtctgggtcaagagggaagaatgagttagaagtcttaaaatggaagccttgagatggaagtaaagtaggtgtttgccaggtagacaggaaaaggacattcaaaagagaaggaatacgatgggcaaagtcataaaggcaagaaaaagcacagtacagtgtttcatttaaggaactgcaaattgttttttagctgaagaattagatcgtttgcaacagttacaagagatgggaaaaaggatataggatttagatgtcagtgaacctgatatgccgtgcgtgagagtttgaaatgtcttcctcaacacagtggaaagctgttgatgagagcaacttgagtatatttatttgttaaaggcaggaaacaataaaagtagaacagtgaaaaagaatgatggatggatatcattcgttgtagaaataggaagaggtaggccgggcgagctggcttacacctgtaatcccagcgctttgggaggccgaggcgggtggatcacgaggtcaggagattgagaccatcctgtcgaacaaggtgaaaccctgtctctactaaaaatacaaaaaattagccgggcgtggtagcaggcccctgtagtcccagctactagggaggctgaagcaggagaatggtgtgaacccgggaggcagagcgtgtggtgagccaagatcacgccactgcactccagcctgggcaacagagcgagactccacctcagaaaaaagaaaaaaattaggaacaggtaaaataactcctgccctgcattggcaggagaaaggtcagtggtatttgcagacataagtgagcttgtagattgggatgtggggcacttgaaggaaatctgagtaataggttccattttctctctgaggtaggacataagattactgcctatttgggagtgaaagtagagttgaggattaggagttgggaagagggcctgaagagggtagtgcacatttcagacagccgatgtgagagatgggcaaggcagtggactaaggttacaaactaggattgtggggttggaaatcatgagtactttgtgatactaggcctcagcactgagaaacaaattaaggatatgacacattaacatttacattaaactaataataataatcacaaaataaccttccaaaaaccttataatttagttatgctgagtttaggaagaatggatacatctaagttattcactgattatgaatgtcacctccattcatgtatgcttaatgagcccaaactgactaatgattctagccctaacacaggttaaacagtgtttctcctgccgtgagcatgctgagcatctgaatgacgctctgccatttcaccatctctcctagattaatgcgctcacagggactctttttacttctaaagtcctagaagaaagagcagagagggagactgaatcccaagtgaatccaaattctgaacaaggagagcaagtatatgactggagcactggcttggaggacacagatgattctcacctttacttctctccagaacagggaaatgtggtgtttaccagtgcaatagatgggtggggctttgggtaagtctgtttgcatctgattaaatctctttgcagattttatatgcagttgattgtttttagtgaaacttttattttgagataattatagattcacctatagttgtaagagataatgcagagagttctctggtgccctttacccagt

SEQ ID NO: 14505 - DNA, 2300 bp, Homo sapien
gtctcttaccttttgagggcgttagcatgtttttctatggaataaaggcttaggctgagaaaatgctgagtgattctaagaatctcacagctttaattttgtatgataggaccctagaccactactagacatgctcctttttctctggtgtacttggttgagatcacgatacttatcgaaaatgttgactaggagaactggtgtgagatctgacagtgaaaggctcgattgaggtccagtgggccattgctccagggctctggttatttgacttcttggattttcactggatatctccatggtcttctctggttggagccttctctggtggtttcagcagagcaatggttcctcataaagcagtttgcatgaaaagaccaggaggcagcggggaggagtggtactgaagaaggcagtctgttgctaactgatggcagtctttcccactgagcctcagtacacttgggaatgcttcacccagtgttttaggaattcattagcagtggaatcttggcatgtgaggtgaaagttactgccttctgagtgtagtggttagaggtatggtctttggagttaagtggatttgaacttatgctctatcattttgaattgtgtgatcttagtcaacctcagaattggattctagctggatgtccttgagaaaaatacttaacttttctgtgccttagttacctgctatataaaattgggctaatagttgtaactactacaggggattgttgtaagtaaacatcagataatttctgtattatgcttagaacaatgccagccatgaataggcagtccacagatgttaagcgctggttgtggttattgttgtggtggtgtttatcatcagtatcacctagggcacaagcgaagtcattaaaattatattgggggaaaatcctttaaatggcccataaattgcaggttgagcatcccaaatctgaaaatccaaaatctgaaatgctccaaaattcaaaactcttcaaataccaacatggcacaaaaaggaaatgctcattggagcattttggatttcagataaaggatactcaaccctgtagtcattcttgagtgcattcaagttgataaacactgagttaaggggaggagcaaaagtaaagtatatgtttgagcattctaatagttattctgcctttaaaagagaattatatcaaatttatcaataatggggaatgagtacagaattctaaagtattaactaattttctgcatggtatactaagttatgtttagtgataactctctataacctaagatgatctttttttttcttgtttgcctgggactaagggctttgataggatgtgggaatttccgtgctaaaaccagacaactcaggatgtgtcatcaccctactataagtttaatacatttgtctgttgagactattgaaggagatattaatgggagagcacatagcacactgcttggcacatagtaactgctccttaagtttttgtagaattgagtctaaatcttgattgagcagattcatacactgctctttgacaaactgtagggaagaacttggccaactgctttgttggccctttgaacagctcttactgtcaggcccttaggcattgatttctttcagtttcaatttcctaacctgtaaaaggagaatagtaatatgtatctcatagggatattgtaaggattcaataatatgtgattagcacattaaaagtgagtatcatagtggctggctcccaataagctcttaagtggtaactattagaataataaagtcctttaacattttatatagatgctatttggaatcagtagtcccatcagtgggaaaagttggaatggtagctctggattgagctttcaactcctttagctttgttcagttttttcttagaagctttcagctttcttattctagaacgcctgaggaagaacattgtgtacctggacaactgaaaatgtgtgtttacaaattgtattttaggtaatgaggagtacctgatcaatctgatagactctccaggacacgtggacttttcctcagaagtatcaaccgctgttcgcatttgtgatggatgcatcattgtggtagatgctgtggaaggagtctgtccacaggtaatggattgtgatgagaaaatacttaaatggttaagggtgaggaaagagggggaactgactgactttaggcatttcactgacaatcacaacattggttttatatttcacatttggtaacgttccagtctgtgaaggagttaaatcaccagagttctgaagggatcttagagatg

SEQ ID NO: 14506 - DNA, 2300 bp, Homo sapien
gaaaatggagatctgaacttaggttgtctaactccagagctggagcactcaactcttatcccagttcctagctggcatgagcagctctatgagatatgactcagcctgcttcttcacctcgccaactggtccttcatcttcaggatggtaaatatgttttatttcatatgcccatcccaatcactttgctgtggttacctaaactaccaagaggtttgaaatcaagaggaggcttagcatgaaggagcgctatggagttacagcagtatctgtcagaagaacataccatgggttagctatctctgcctttcccatatactgggctttgaccacatatatttccctctccccttgatgacacattcccacctgtaatgattatctccatttgtcatcttgagcccccttcaagtgtcatctctaatactaattatgttgtgaggtcttttcctaacccctcacttcctaatcctctagttctcccaaccttagagtctacttttttctcttgtttgtctcattttgctctgctccccgttaaaacctcccctgggctagtgccctactcataaatctccaccttcagacatactaagcaaaatatcttgaacttaacagacgtttgataaatatctgatgaattaaataggatcacataccacagactctaaggacattatgtcaagactacagacattttatatgtaaagccatttcaaaaacaaaaaattcaagttctgctttaaaaaacaacatgacataatatatagaagaatgctactcactaggtaaccgtgttcatttcaaatgctttatagcaaagcaggcttccctaacatcacacaaaacttttaaagaaagaagacttgcttcttagcaaacatcactctcagctgtccacagcttcactccactgagacatacagagacacatctcccttatttatcaaaataagccatttaaaaagtattcttaccatggtcaacatgagccaaaacacaaatattcctgatgttggcagtgtttttctggagttgaatcatcttatccaaactgttgagcaccatgattacttatttcctgtgactaaaaattaaatatgtattacaaatggcccagaggctaaaggtcggggcaaaagaaaaaaataataataaacgctgggaggtggcaagcttctcaaaccccttaaaccaagaacccagtgaatgtttattgatgagatagaccaccaaggcctaagtccagttcgagcactaaagtcagtatcctaccacgattacacttaaggagtttgctcatccttccggatccaaaggctgcgatgaatcacgcagctcgaggggactgggtgcacagtgacaccagtaaccctgccggtggaggagtactccagtaaacatctccaggccaatgaccacgtacaggaagggttgcatccaggagggagagaaaatgctgaagaagatgctccctttctctcttcagtcttcccccaagtccctcattctgacattctcgctcgtcctcgcgcgaggtcaaatacccagctttattcctgcccatggagcccgaacaaagttttgggtcacgtgcttattatccaagcaggtgcactgccggtctttcattcctttctaaataaaaaggaaaaacctctacactacatgcccttcatttctgcagggtcccagattcgttctctttgaggatcctgggtccacacagacaggcgaccgccccggccccagacgggaagcggcactccggggaccgaagctcccagcccgcgctcggccccagcccctgttcccgcctcagagccgcagcgagcgggttcctccggcaccgcccaaaggctggcctaggaggttccagcccccagcgccagcccacactcaccggctgcagcagccccaccagccccgctccttctctcgggtcgcacccacaccgagagcttccgaaagtccgagagctctgcgggtccgacacgcccgcgcgccagggggcggggccggctgtcgctcgacctttcacccgcacgtctctgacgccgccggaagccggcgccgagtctgtcaccgggcatccctctgttgccttgactacggcgggcgctgtgggagtggagaagctgcaagtgctgaggcgcggtggaggaaagcatgggagccaagagtatgaggagctggtgtctgtgtcagatttgtagctgcgggtaagaaacggctggtgtagcggcgggcccgggcttgggagccgacctagggcctaggtgcacggagccggctcctcg

SEQ ID NO: 14507 - DNA, 2300 bp, Homo sapien
aagctggtttcctaacttggcagcttcttgaccttggaagagacgagtgattctggagtctacagctctgttgcaattttctgattatggcagaggcagtggctcccttgtcagtcctggtctgtggtaaaatttttgtggaagcttattttgaaaatgatttcttaagttcttccaagtgaactatatatatactccttaataaattcctttttgcctagactaaccagaggagattacgttatccacaactaagaaccttgaccaatatatcatataagctaatagtatacagttatttaagagaatgagggtggtctttatgcatgatcattggaagttggtgagattgtaaatagtaaaaaaccggattgtagaatagtatgctcagaatattctctttttttgttaaaaaaaaaaaaaaatcaatgcaggccaggcgcagtggctcacgcctgtaatcccagcactttgggaagccgaggcaggcagatcatgaggtcaggagatggaggccaacatggtgaaaccccgtctctactaaaaatacaaaaattagctgggtgtggtcgcacgagcctgtaatcccagctactcagagaggctgaggcaggagaattgcttgaacccgggaggcggagattgcagtgagccgagattgcgccactgcactccagcctggcaagagagccagactctgtctcaaaaaaaaaaaaaaaaaaaaatcaatgcatatgtaaaacaagtcttaaagaacatttgttatctgtggaagatagaattatgaaggcgttttacaatattatagatatttttgcttagatttttatgatacttcttgtgtatttattgcattgtcaaaaaataaaaataaacccttaaaaagacaaaactaacaaccacagcccaaaacaaacaaacaagaagtaaaatcacgccattccaatggtggccctcaacataatgaagactgaatttccttacagttgaatgagaaaggaacttgcgttgaatataaattaggagaaaagtaaaaattttctcctgcacaccagtctgaggattcatacacccaaagttaatttgttgatattttaatctatatataattatgaactgtgtttattatgagactattaaaaaaactgctttccatcaacatgtaggtgttttctttgaatgggattacaaatacaccagggattgacaacgttcatatttacttagcaaataatgatctaatccctgggtcaatagtgaagctgaggaaggagaggactgtgtttacaggtgatggaaggttgttaggcaggactcacagttggattctagatttcagggtagggactacttactgacttttcagtcaggcggatcccaaagaactgctgcctggacgggaatgggaatatggtctggctgggaggacagaaagctacagatgaaagaaaatgtgatatgggttgcagactcagggccttgagcactgttctttctcatcttcgtggtgggggattatggggtggaaatgcactctcccagtcggatcacatcccactactcaccagcgttatatcccgtcgcggcttcacatatattacttacctggcccgggtggcattttactttgcatccttgattgggagtctcaggggctacgaacaaacgttttacccccgggtagcaggcgggtgaggagcgagtattcgcggagcgggataagtggggatgtcgctgcgccctcgtcccttcatctccgggggacggccactctcagggttcccgaggagccggctccgtgcacctaggccctaggtcggctcccaagcccgggcccgccgctacaccagccgtttcttacccgcagctacaaatctgacacagacaccagctcctcatactcttggctcccatgctttcctccaccgcgcctcagcacttgcagcttctccactcccacagcgcccgccgtagtcaaggcaacagagggatgcccggtgacagactcggcgccggcttccggcggcgtcagagacgtgcgggtgaaaggtcgagcgacagccggccccgccccctggcgcgcgggcgtgtcggacccgcagagctctcggactttcggaagctctcggtgtgggtgcgacccgagagaaggagcggggctggtggggctgctgcagccggtgagtgtgggctggcgctgggggctggaacctcctaggccagcctttgggcggtgccggaggaacccgctcgctgcggctctgaggcgggaacaggggctggggccgagcgcgggctgg

SEQ ID NO: 14508 - DNA, 2300 bp, Homo sapien
cactctgccacccctccaggggcagtcagaggggaagctacataggagagggggtgggtgagaaccaggaggacagcaaggaggcgacggtggaggtctgccttcatcctgacatgggcagtaaggcatcctgacatgggcagtaaggcgctgttctgggagggttctggcagagagggtgtctttgggtcttgggcggtgggcacctgagtgccagtcccaggctgaacgccatggcccctaggtgtgcagaggcagagtgtgtactgctcggagcggcaggcagggcccgtggacgaggagcactgtgaccccctgggccggcccgatgactgccagaggaagtgcagccagcagccctgccctgccaggtgagcccgcccccatcccctaccaactccccacccccaggcatcctgggtctgccacaggcccctacatctgggtccccagaggccccagggaggagcagagggagccgggctttcattctcttcccaaggctgaagccccaacccccggtcacctctcaccccagcctgggccagcctggacacctatggtcctcctctttgggtccctggatgtggaaataggcctcaggtcatgctcagtttccctgaggggaaggtggcaggagtggaggggctgtgccttgtcaccagactttgagggcaggacacttacctgagcttggagctctggagaatcatccactggcttctggcactgcccaaaccccgagggcctggaaacccagcctggccctccctgctggtgagcctgtcaatgccacctgtctgatgccatactgatgacacctgtgtgccctcagcaggtggtgggcaggtgagtggcagctgtgctccagctcctgcgggcctgggggcctctcctgccaggctgtgctctgcatccgcagcgtggggctggatgagcagagcgccctgaagccacccgcctgtgaacaccttccccggccccctactgaaaccccttgcaaccaccatgtgccctgtccggccacgtaggctgtggggaactggtctcaggtgagtgtgggatgggaaggtgcccgcctccagccccacccttggtcttcagctacagggaggcagacagccttcctggagaccttgtgggtgggagggaacctgggcattccagggtccagcccctgactctaaagcctcagggatcaggaagcccctggcaagcatggccacagtcatggccttgagctgggaagggccagagagggctggctggggtctctgccactctgacatcaggcagtggacaggttacccagccttgccccagcgtcccctggcagcctgcctcccaggctaagcccctcaccctggcttcccctgcagtgctcagtgacatatgaggaagggactcagcaccgaaatgtcctctgcatcagtgacaccggtgtcccctgtgacgaggcccagcagccagccagcgaagtcacctgctctctgccaccctgttggtggcccctggacacactgggccctgaaggctcaggcagcggctcctccagccacgagctcttcaacgaggctgacttcatcccgcgccacctggccccacgcccttcacccgcctcatcacccaagccaggcaccatgggcaacgccattgaggaggaggctccaaagctggacctgccggggcccgtgtttgtggacgacttctactacgactacaatttcatcagcttccacgaggatctgtccttacgggccttctgaggagcctgatctagacctggcggggacaggggatcggacgcccccaccacacagccgtcctgctgcgccctccacgggtagccctgtgcctgccacagagcctcctgcagccaaggaggaaggggcaacgggaccttggtccccgagcccttggcctagccaggccggccgctccccacccccaccctcagagcagacccctgggaaccctttgatcaatttcctgcctgaggaagacacccccataggggccccagatcttgggctccccagcctgccctggcccagggtttccactgatggcctgcagacgcctgccgcccctgagagccaaaatgatttcccagttggcaaggacagccagagccagctgccctctccatggcaggacaggaccaacgaggttttcaaatgatgagggacccaagggctgcggagcaccccacctgcccccgagacccagccccacgctgcccactttgtacccggtcagcagcacccactcctctcctagtcctgacgtggcggagctgt

SEQ ID NO: 14509 - DNA, 2300 bp, Homo sapien
cctggcagagctcagaaccaggctctcatgagctggggcaagtggggcctagggaacctctgggttgaggaccttgcaccccactctgcagctgccctgctgatttggctcatgcaacctctcctcctgggctcaagtgatccttctacatcggtctcccaagtagctgggatttgggctaccacgtttggctaatttttgtatcttttagtacagatggggtttcacctgtagcccaggctggtctcgaactcctgggctctagtgatctaccctcctcagcctcccaaagtgctgggattacaggtgtgagccactgcgcccggccttgtgccagcttttaaatatcaacaaggacaaattagagaacagtggaagagggtgagcagcatgatgaggtgatacagaaataatttcacatgaagaactgggcatgcctggctttttttttttttttaagctattctgggttggatgctgaggctcacacctgtaagcctgtaatcccagcactttgggaggccgaggtgggtggatcacctgaagtcaggagtttgagaccagcctggccaacatggtgaaaccctgtctctactaaaaatacaaaaaattagctggaattggtggcatgtgcctgtaattccagctactcgggcagctgaggcaggagaatcgcttgaacctgggaggcggaggttgcagtgagctgatatcgtgccattgcactccagcctgggcaacaagagtgaaactctgcctcaaaaaaaaaaaaaaaaaaagaaagaaagaaaagaaaatatatctatgcaccagagctcaacactaggttaggagcatttctgagatttggagctattcaaccatggaagttcctggcacatacatcaggtattcacaataccctttctcaggtgtttggtcactgctagtgagcctgcctggatcagtgtttcccaaatggcagtcatttgcatctttgcatttttttggggggggggggttgtgggggtatataccataccagattttttaaaaattgacattaaaaatacatgtataaaatgtgtaaagtgcactaatctaaagtgcactggatgtattttttattgatgtacatacttttgttatccatcacccaggtcaaaatacagaatcagcaccacagagggttccctcctcctccttcccagccaataatcttctcctcctacctaaccaactgttcttacttcaagcactgtcaactagtattttacattcttgaactgcatataaagtgtctcaagtttcacttaacacttttcttgaaatacacttgttttttgccactttttatttgacctaagaagtaacattaatgaaacaatgatttgacgtgataggcatttccctcctaatgagcactaaaacacttaactatttgaaaaaagaagtttctccgtgtaccagctaatatattctcctcggccgccgttggtacacggaccacattttgtttctcaaagcaatccgatgatttctgaggtcctttgcagcttgaacacggaacgactgtggtgatcgagtagccaaaagttcacggaatgcactgtcacaattgtgattccgccatagcgccgtgcatccatccaacacttgtttaatacctatatttaatacctaataccttagactgtcctaggctgtggacacagaagactaaaccccacttcctgagttgaagtgggggaaatagaggagtaaatcatttcacgatgtgtggttaaatgctacagctcaggtaaccacgagcacacagagaaagggcagtttctagaaacagggcggagaggagaccgtgagtgggcatttcccagagcagtctctgccagccaccctgctgtgatcactttgccacagagcagccccggcggtcaacctcagcctcccttagcaacctgagcgccccgcccaggtgccttactattggtctcgtggagcgggatgggcagctctgccgtgcaatcccagctcgcagcccttgctccgcgtgtactcacgggaggactcgcagacgttactgccctcttgcgtgccccggccacccccgggtggcttgtagccggtgcgcggggtggctggggctacgtgcagagctgtcgcggagccggaacagcagcggtgaagcccctcggctcggccgagaccgccgtgcccattgctcgcctcggttgccgccgctttagccgcagccgctgctgccgccgccgggggagaggcagcctattgtctttctccgcggcgaaggtgaggagctgtct

SEQ ID NO: 14510 - DNA, 2300 bp, Homo sapien
ctttttttgtttccctctgtgcctatgcttaccaagtctttttattttttactttttattagctctttcagtcctcttaataactttaaaagagggtattattaatatctgcattttatggatgagacaactgaaggtaggtaacttgtccaaagtcacaggtggcagagcaaggattggaaccagacagtctgactgccctaggcccaaccaagaggagctgagagcaagccacggggcagaaggatgttggaggctggttttctgttcagttaacatgaaatgcaggctgtaaccgtaattccaggacattactgagaaagccttccaaagccagaggggttttttttgttttgttttgttttgttttccatgaccatgacttttgagcaaaaatttggttttgtttaaaggcaatatggtgctctaagaaacttccactcacacttatggagggaatggtagttgagctaaatagtgaaatgctgtagcacacagcctttagggcagcttctgacctatttctatggtcaggaaagacacctatctttgcctgctgcccacagcctctagttattcaccttcagaatttcctagtctgtgatcacattcagatgagagatccgttttgttttttccagggtagcaggaagtgagtcaccacctatactaagcagtctagtcttctgtgtataaatgagcaagggtggggagccagatctgagaaccttgtgtaatgctgagatgctccaagagaatccaagaggatgtcaggattatgcatggtggtaaagtggtctcatgttagttgtacccacagctctcatcagaagcagacacagatactttttgtaggaaaacatctctaacttaagcctgtaggattcccaaagattaaaagcaggcaaatatgaattcagtcaaatcatagcattcaagtagtctcaacccaacatatttgagaattgttagaaacaatgaatatgtttcccaaagactaggttttggaattatcagatacagaacacagacttcaaatattagaattgtgagaaaatagttacatgtcaaacctaatataaaagaaagatggactcattaaattgagcaacagaaaggccaccaggaatgaggaggaggacctgaaaagaaaatggatgaactagaacttacagaaataaaatatatagctgggtctggtggctcacacctgtaatcccagcactgtttgggaggccgaggtgggaggatggtatgagcccaggagttggggagacaagcctgggcaacatggtgagaactcgtttctgtaaaaaataccccaacaccaccaaaaaaaaaaaaaaaaaaaaaagtagctgggtatggggcacgtgtctgtagtcccagctagtcaggaggctgaggagggaggatcacttgagctcaggaggcaagggctgcatgtgcatgccactgcagtccagcctgggtgacagagtgagactccgtctcagaataaaatgaaataaagaaataaaaaatgtaattgttgaaataaaaaactcagtggatggattagacatcagaagaaagaattaattggttagacaattatctcccaaaagtgagtcagtatgttacacagagagacatgaggatagatgatagggcagaagttggtggggttgtagggggagggagatcagaatgaggtctaaaatatgtcttagtggaatcccaggaggagatattaaaattatattagaaagtgagagaaatagaagttctaaaggcaatagaaggaagtccacataaatcagtcacaacaaatgtaaatggactaaagttaccagttaggtggaactaataaaagaatatccagctgttttaatccatcatatttaaaatataaggatatgagaagattgaaagtttttataaaggagagagagtaatgaagatatggcagtatacattaaccaaaaacaagtgatggagcttcagtatcaaaaaaggattttggaacagaaagcattagtaagaaacttgatgctgactgttaattaggaggatgtagcaattttcatattttatgtacctgtcaaaatagcctcaaaatgcaggagaaaaactgataaaaccacagggagaaattgacaagtctgccagcatatttggagatttcaccataccctgcttaccataagtaagttacacagaatgcccatatgtagatttgaataaccagtgaatggacatggtgtaatggacaaatataggcctttgtacccaataattagatattctatattcttctc

SEQ ID NO: 14511 - DNA, 2300 bp, Homo sapien
ttttgtaggaaaacatctctaacttaagcctgtaggattcccaaagattaaaagcaggcaaatatgaattcagtcaaatcatagcattcaagtagtctcaacccaacatatttgagaattgttagaaacaatgaatatgtttcccaaagactaggttttggaattatcagatacagaacacagacttcaaatattagaattgtgagaaaatagttacatgtcaaacctaatataaaagaaagatggactcattaaattgagcaacagaaaggccaccaggaatgaggaggaggacctgaaaagaaaatggatgaactagaacttacagaaataaaatatatagctgggtctggtggctcacacctgtaatcccagcactgtttgggaggccgaggtgggaggatggtatgagcccaggagttggggagacaagcctgggcaacatggtgagaactcgtttctgtaaaaaataccccaacaccaccaaaaaaaaaaaaaaaaaaaaaagtagctgggtatggggcacgtgtctgtagtcccagctagtcaggaggctgaggagggaggatcacttgagctcaggaggcaagggctgcatgtgcatgccactgcagtccagcctgggtgacagagtgagactccgtctcagaataaaatgaaataaagaaataaaaaatgtaattgttgaaataaaaaactcagtggatggattagacatcagaagaaagaattaattggttagacaattatctcccaaaagtgagtcagtatgttacacagagagacatgaggatagatgatagggcagaagttggtggggttgtagggggagggagatcagaatgaggtctaaaatatgtcttagtggaatcccaggaggagatattaaaattatattagaaagtgagagaaatagaagttctaaaggcaatagaaggaagtccacataaatcagtcacaacaaatgtaaatggactaaagttaccagttaggtggaactaataaaagaatatccagctgttttaatccatcatatttaaaatataaggatatgagaagattgaaagtttttataaaggagagagagtaatgaagatatggcagtatacattaaccaaaaacaagtgatggagcttcagtatcaaaaaaggattttggaacagaaagcattagtaagaaacttgatgctgactgttaattaggaggatgtagcaattttcatattttatgtacctgtcaaaatagcctcaaaatgcaggagaaaaactgataaaaccacagggagaaattgacaagtctgccagcatatttggagatttcaccataccctgcttaccataagtaagttacacagaatgcccatatgtagatttgaataaccagtgaatggacatggtgtaatggacaaatataggcctttgtacccaataattagatattctatattcttctcaagcatatgtggactgtgggagaaacattaattatatattaattcgtaaagcaagtcagaagatttaaaaacaattggtaccatccacaccatataatttataatttaaatatgaagcaattaaggttagaaggcaataatgaagagattaacaaaaagctacatgaatttggaaattaaacacccttgtaattcatggtataaaaaactcaatacaattttagaatgcttagaattgaaccatagttaaaatatgaaacttctctctgttcctgtctctctccctctccctctctcttcctatctggaacattcaagaagctaatctttttcaatgaagaacaccccaaatactgaaaagtaggaaaaagacagatggcatttcatggtaatcccttcccccaagagtgtagaatgtttctttagcttctttgatagtttgtttacttatttattaagtacttactataaaccagactctgctttaatttgtgatgaacaacctagagattaagtcctgccctatggattttatattagagtgagaaaaacagatagctaagtctggagctcaggggtgaggcccaggttggaattatagattcacttgaccaaggtgaaacctggtgtgccccctcctacttcacatccccagacatacttctggaacatttctgttctattcttgtgtataaactcttccttttgagcctctctccattaatgcatgtcaacctctacttgtcttttgttgattttgaggccacttgcccatataacttggaggatattgaagaagaatcataccgacctggttctgctacctaccagctgagttactttggtc

SEQ ID NO: 14512 - DNA, 2300 bp, Homo sapien
gctgctggtgctgctagtccatagactacattttgagaaccactcttgtctattaagtgtaaattgtagaactctagaaaaaagcttagttcagtctgggataagaagcacacaggttatggagaaaatcatgaaagattcaacccttgatcccagcctagtgtggatttcaggtaacaagcagtacacagtgacataacacaattcttggttttcatgattgcaagtcatagccaggtatcaagtgagaaattcagtttcatttgcaaggcctagagaggcctggtgattctagaaaaatgggccttgtatttgttttaaaccagtaaagagctttaagtgcttattaaattgtaagttttgtgttcctacttattttgtatcttattttgttttattttatttcttttgagatggagtcttgctctgtcacccaggctggagtgcagtggcatgagcttggctcactgcaacctccatctcctgggttcaagtgattctcctgcctcagcctcccaaatagctgggattacaagcacccaccaccacacctggttggtttttgtatttttagtagagacagggtttcttcatgttggccaggctggtctcgaactcctgacctcaggtcatccacccacctcggcctcccaaagtgatggcattacaggggtgagccaccgcacctggcccaaaagctttgtgtttttaaagatattagacatgtttcttgtttttaaaagaaatcttaacaataatgtaggagaataagacaaacatttttccaaaaaagagaaattgttgtgattattctctgttattggaatgtcggatactatagtcagcttcattaatcatcaagaatgctatggattttccatttttatagggtctatatctcagttaaggtaatacttgtaattcttgtgctccatttgaagatgaaaaatataggccaaaatcatagactttgcatagaagctgcataatgaagacagctctggaggaacacatagatacacacagacacacatatataaagtatatacacatatattttttaaagtttatttttaacagttttaaagcttttaaagcaaaagccagcccctcccctctcccagagtgggcggcctctcccctctctctgagtgggcggggacagcggttgcatgggcagctttccttatgatgctacaggtccctctggacatgctgcgcctggccacgcctcctttccctttcatctttctcactgaccaatgggcttggaacattaaggccacgcccctattctgcgttccattggtgccctggttacgccacctgtggctcagttgcacagctgcctggtaggtgactggaggcattgagcagtgctcactggtatttcgctgatgtggccccaaccccgcctccctccccaccccgcgatgtcagaaaaaacacaacaggggaaattggccgcagccaagaaaaaggtaaaacacaccaggtcatggcccccaacccagccacagatcccctccgatgacaagaccggtgccagagtccataccactcctgaggcataccagatggggccccccaaccccagcccctctgggctcccccaaccaaagcctagtcagtcagccccaccccttcagcaagcagcccagtccctgcccttgccaatcaccccagggtgactttgggcaggtgactcctggggctccctgctccataatcagccctcacctcctgccaccccaagcccaacctccctgggctctttgggcttgcgtctcccaggacctgggtcccccagccccaggccctgccctcaccagtcatccctgggtggctttgggctggtgactcccggggctccctactgcagactctgccctcccctcctgctgccccaagctcgacctccctaggcttcttgggctggcgtctctgaggacctgggtcgaaaccgtgtgtttccctcccccatcgtggagcagcgactcgggcatcgcgctgatgtggtcccctcccctgggaggagtggaatgcaatgatgtcacagcgcccctaggaactgtcattactgctgcaagaccagcctttgatcttacaacccagtcccctaagttttctcaccccatttctggttcctctggttgcagcacaaatttccagctggaaggggagtggagactatgggacctaggagcaacaggtttcaggctgccttactcccttaacatagacattgacagtgggaaaagcctacacttcccctgtgagctcaaaatgttcacagtatc

SEQ ID NO: 14513 - DNA, 2300 bp, Homo sapien
gacctgtgaggatgtatgactctaaaccacacggcctacagttcctgcctgcttaatgtgtgcttttctacctctgcccctggttttggtccctggaagctgctgattcatggcaaaaccccagagcgtggagtcagaggactgagtttaagttccagtattgccttttttgatctttctttttttttttttctatccatgatatgaatccctctcagtcactgattgtgacaacaccttgtacagttgttggtggcattacatcagatggtatataagggtattttgtcaaaactgtaaaggaggatgtggctgtaggggctgatcattctcatgagtgttactgctcttctttcccacagttaaaagcatattggcagaggaagagccctggcattccagcaggagctaacaggaaaaagaaagtcaatggcagtagccctgacacagccacttctggtggttaccactcacctggggatgtgagtctcggcgggccaggctcctggggacagggggcccaaggggcagtagagggtaattgttaagattgtagatggactgttgggtactggttaagaattctggatttgaatcctgcctctccgtctgctaagaattgattagggattgattagcatatgatttagggcaagttgcttgaggtctttgggcctctcttttcacatctgtataatagaggtggtattttttgacttccatttgtgaagtttaaatgagattcgttattgttgcttttatgtgaatccttagtacatggcctgctgcaaacacccaggacaccgaggaaatggtcgttgctgtttgattttcctcatccccagtctcaaggggaagccaggccaatgagaagagccacttgccatcaggctgtccctttaggagtcactgaaagggccccagggtgggatggtggggagataagaaccacgagagaagttggcacaaaggagttatgggaaaaagggtccaagataggcagaaaagaagcttttgccagttgatgggggaagaaaggaagtcagagggcttagacagtgaggggggacagaacatctccatgtgcactctcatctcttggagtcagcaacaggtatctacggggagggccgtgcatcctctactaccctgcaggatctggaggtaagaggccctgggccgaggtgcagtgaccctgcaggccagccctccaacctcctcccacagcaggggcttgttgcccctctgccagctgaggcagcccacacacccccaccagccctaatgattattctctctacccctccccacaatctttctccaactccttctctctgcatgcacctcagagccagtaccaagaactagcagtagccctggattcaagctccgcaataatcagtcaactcactgaaaacatcaattcactggtaagagtccagtggggtcccctgattacagctggtcaatcctggactccagtttcctcttggggccctgaagaaaggggctaggggcccctgatgccaagggcaaatggggagctgggcacccaggtctcacctggagggaccccagagcacagaacatgcagcatggctcttctgcactgccctctttgctgactctctcttctccagacacccctgctctagtccttgccacacatgccctggggttgtcacctctctgggaagcactagcctgactggttgttaggggtccatattcctgccctgcctcagtccctaatttgctttttgagtctggacaagccatctctcctctttatgctcgtgtttctggaggaggtagagagtatcaaaggtctcggttagctctgaaagtcagagatttaaaggcccctagaatggaaagctcagggcgaagggctcctgtctgtcctttgctgttttatatctctgctatgaagaactgtacctggcctgtacatgctcagtaaatgtttgttgaatgaatgcacgtttctaaatcacaaactggcagaaggggggtgggcctttctcaaactctgtctctggaggttcaccagcccctccctccaggacccttttccccctttgctttgggcaggttcgcacatctaaggaggagaagaagcatgagatacatctggtacagaagcttgggaggagcttgttcaaactcaaaaaccagacgggtaagatggggctggcatgacctggcagctggactggcattagagggctgtgggggtgacttagaatgccccagggaggtgggtggatggaagggctttgaggcagagggaaagaggt

SEQ ID NO: 14514 - DNA, 2300 bp, Homo sapien
atggcttggttgcccatgccctcatgcctgcggaggggccaaacagacctcctgcccatccaggtcaaccctgtcaatgacccaccccacatcatcttcccacatggcagccttatggtgatcctggaacacacacagaagcctctggggcctgaggttctccaggcctatgacctggactctgcctgtgagggcctcaccttccagctccttggcaccccctctggcctccccgtggagcaccgagaccagcctggggagccggtgactgagttctcctgctgggagttggaggccggcagcctagtctatgtccactgtggtggccctacacaggacttgacattccgggtcagcaatggactgcaggccagccccccggccatgctgaaggtggtggctgtccagctggccatacaaatccaccgcagcacagggctgcatctggcccagggctctgccatgcccatcttgcctaccaacctgttggtggagaccagcgccgtggggcaggatgtgaccgtgctgttccgtgtcaccggaggcctgccgttcagggagctgcagaagcagggggctggtggggtggaggatgctgagtggtgggtcacacaggcgttccaccagcaggatgtggagcagggccacgtgaggtacctgagcactgacccacagcactacaccgaggacaccgtggagaacctggatctgcaggtgcaggtgagctgggaaatcctgagcaatctgtccttcctagtgaccatccagagagccactgtgtggatgctgcagctggagccactgcacactcagaacacccagcaggaggccctcaccacagcccacctggaggccaccctggaggaggcaggcccaagccccccaaccttccactgtgaggtggttcaggctcccaggaaaggcaactttcaactacagggcacgatgctgtcagacggtcagggcttcacccaggatgacgtacaggctgcagaggtgacctatggggccatggcacatgcctcagtggcagtggaggacaccttctgtttccatgtcacagctccaccatatttctccccactctgtaccttctccatccatattggcggtgacccagacatgcctgtcctcgtggtgcccgagggtggtgggtgtgtcctctctgctgaccagctcttcatcaagagtctcaacagtgccaggtacctctatgaggtcatggagcagccccgccatgggaggttgacttggcgtgggacacaggacaagatcactatggtgacatccttcaccaatggagacctgatgcatggccagctggtctagcagcatgatgactccgagatcacagaagatgatatcccatttcctgctgccatcaggaccagagcagtggtgacgtggcctgggaggaggtatggggtgtcttctgagtggccatccagcctgtgaatgaccacgcccctatgcagaccatcagctgcgtcttccacgtggcctggggtaggtggcggctgctgactacagacaacatggccttcagcaatgctgattcgggctttgctgaggcccagctggtgctgacccaccaggacctcctctctggcagtatcatggccacggatgagcccatgcagcccatctgccgcttcatccaggaggggcctcaggaagaggcgagtcctgttcacacactcaggctgaccacggctggatcccgctgcaggtgtccgatgggcagcaccaggccatcacggtgctggaggtgcaggccttggagccttacctctgtgtggccaatggctccggcctcatggttcctcaaggaggccagggtaccatcaacatggccgagctccacctgggcaccaacctcaacatctgcagtagggatgaggcccactaccacgtcacagacagccctcactggggacagttgctccaagccactcagccagccacagccttctctcagcaggacctgctggttggggctgttttctatggccacaatggcagcctcagctcccgcaacaccctggccttctcaatggatgtgggaccagtgcacacagatgccaccctacaagtgaccattgccctagagggcccagtagccccactgaagctggcccagcacaaggagatctacatcttccagggagaggcagctgagatcagaagggaccagctggaggtgaggagctggaggtggtgagcggggtgtggaccaggtagagggccttcctcccagcctccatgccgggaacacatgtgacttgggctgtacctgtggt

SEQ ID NO: 14515 - DNA, 2300 bp, Homo sapien
cctgccacgcctgttttcatgggcagtgctgagccccagtcctggcagagctcagaaccaggctctcatgagctggggcaagtggggcctagggaacctctgggttgaggaccttgcaccccactctgcagctgccctgctgatttggctcatgcaacctctcctcctgggctcaagcgatccttctacatcggtctcccaagtagctgggatttgggctaccacgtttggctaatttttgtatcttttagtacagatggggtttcacctgtagcccaggctggtctcgaactcctgggctctagtgatctaccctcctcagcctcccaaagtgctgggattacaggtgtgagccactgcgcccggccttgtgccagcttttaaatatcaacaaggacagattagagaacagtggaagagggtgagcagcatgatgaggtgatacagaaataatttcacatgaagaactgggcatgcttggccttttttttttttttttttttttaagccattctgggttgggtgctgaggctcacacctgtaagcctgtaatcccagcactttgggaggccgaggtgggtggatcacctgaagtcaggagttcgagaccagcctggccaacatagtgaaaccctgtctctactaaaaatacaaaaaattagctggaattggtggcatgtgcctgtaattccagctactcgggcagctgaggcaggagaatcgcttgaacctgggaggcggaggttgcagtgagctgatatcgtgccattgcactccagcctgggcaacaagagtgaaactctgcctcaaaaaaaaaaaaaaaaaaaggaaagaaagaaaagaaaatatatctatgcaccagagctcaacacgaggttaggagcatttctgagatttggagctattcaaccatggaagttcctggcacatacatcaggtattcacaataccctttctcaggtgtttggtcactgctagtgagcctgcctggatcagtgtttcccaaatggcagtcatttgcatctttgcattttttttgggggggggggggttgtgggggtatattccataccagatttttaaaaaattgacattaaaaatacatgtataaaatgtgtaaagtgcactaatctaaagtgcactggatgtattttttattgatgtacatacttttgttatccatcacccaggtcaaaatacagaatcagcaccacagagggttccctcctcctccttcccagccaataatcttctcctcctacctaaccaactgttcttacttcaagcactgtcaactagtattttacattcttgaactgcatataaagtgtctcaagtttcacttaacacttttcttgaaatacacttgttttttgccactttttatttgacctaagaagtaacattaatgaaacaatgatttgacgtgataggcatttccctcctaatgagcactaaaacacttaactatttgaaaaaagaagtttctccgtgtaccaactaatatattctcctcggccgccgttggtacacggaccacattttgtttctcaaagcaatccgatgatttctgaggtcctttgcagcttgaacacggaacgactgtggtgatcgagtagccaaaagttcacggaatgcactgtcacaattgtgattccgccatagcgccgtgcatccatccaacacttgtttaatacctatatttaatacctaataccttagagtgtcctaggctgtggacacacaagactaaaccccacttcctgagttgaagtgggggaaatagaggagtaaatcatttcacgatgtgtggttaaatgctacagctcaggtaaccacgagcacacagagaaagggcagtttctagaaacagggcggagaggagaccgtgagtgggcatttcccagagcagtctctgccagccaccctgctgtgatcactttgccacagagcagccccggcggtcaacctcagcctcccttagcaacctgagcgccccgcccaggtgccttactattggtctcgtggagcgggatgggcagctctgccgtgcaatcccagctcgcagcccttgctccgcgtgtactcacgggaggactcgcagacgttactgccctcttgcgtgccccggccacccccgggcggcttgtagccggtgcgcggggtggctggggctacgtgcagagctgtcgcggagccggagcagcagcggtgaagcccctcggctcggccgagaccgccgtgcccattgctcgcctcggttgccgccgctttagccgcagccgctgctgccgccgccg

SEQ ID NO: 14516 - DNA, 2300 bp, Homo sapien
actcaccatccgaggttggcaggacttttgtttcagtattgaacagatggaactgtttagttcttcatctttgcaggtataccaaatgtgcctaccaggagtctgctttatagccattgaaaagcaagaagtaatatagtaaaattttgcctggctagaggctttggaagacaagtattttggcttaattctattaacttggaaggatgaaggtgaaaaaaaattcaaaactttaatttcctgtttattgccatttgaaaatatagccaatgattccacttttcttctccagtaagtttggacattctgatctacttggtgttttattatagaactcctagtgtgcctgagtcttacattgtgaagatccttctctaaaacttcacatgtaagagaatataaatgatattggataagatcaggctggatgagaactgatacctgtaaatatgcgatttagacgaaatctctgattgttttcttatttaactcataaaaataaaactcattggctggaaggtgggagcaggaaggagatttatgtcttttaattgcacgtcattgtttcatatagagacagaacatatagtatccctggttttggacctacagaatgaaacacatttttctacctgctgtatgccagaggttcttgaacacctggagggattactgcagcacagattgctgagccctactccagagtttctgattcatcaggtccagggtggggcctgagaatgtgtatttataagaagttcccaggtgctgctggagctgctagtccagagactacatttttgagaactgctctcatatactaactgtaaattgcagagctctagaaaaaaagcttagtttggtgtgggataagaagcacacaggttatggagaaaatcatgaaagattcaacccttgatcccagcctagtgtggatttcaggtaacaagcaatacacagtgacataacaaattcttggttttcatgactgcaagtgagagccaagtatcaagtgagaaattcagcttcatttgcaaggcttagagaggccaggtgattctagaaaaatgggccttgtatttctcttaaaccagtaaagagctttaagtggttattaaattgaaagctttgtgttcttacttattttgtattttattttatttcttttgagatggagtcttgctctgtcgcccaggctggagtgcagtggcgtgagcttggctcactgcaacctccatctcctgggttccagtgattctcctgcctcagcctcccaaatagctgggattacaggcacccgcaaccacgcctggctagtttttgtatttttagtagagacagggtttcttcatgttggccaggctggtctcgaactcctgacctcaggcaatccacccacctcggcctcccaaagtgatggcattacaggcgtgagccaccgcacccggcccaaaagctttgtgtttttaaagatattagacatgtttcttgtttttaaaagaaatcttaacaataatgtaggagaataagacaaacatttttccaaaaaagagaaattgttgtgattattttgtcttattggaatgtcggatactatagtcggcttcattaatcatcaagcatgctatggattttccatttttataggatctatatctcagttaaggtaatactggtaattcttgtactccatttgaagatgaaaaatataggccaaaatcacagactttgcacagaagctgcataatgaagacagctctggaggaacacatagatacacacacacagacacacatatatataaagtatatacacatatattttttaaagtttattttttacagttttaaaagttttaaagcaaaacccagcccttcccctctcccagagtgggcggcccctcccctttctctgagtgggcggggacagcggttgcatgggcagctttccttatgatgccacaggtccctctggacatgctgctgcctggccacgcctcctttccctttcatctttctcactgaccaatgggcttggagcattaaggccacgcccctattctgcgttccattggtgccctggttacgccacctgtggctcagttgcacagctgcctggtaggtgactggaggcattgagcagtgtgctcactggtatttcgctgatgtggccccaaccccgcctccctccccaccccgcgatgtcagaaaaaacacaacaggggaaattggccgcagccaagaaaaaggtaaaacacaccaggtcatggcccccaacccagccacagatcccctccgatg

SEQ ID NO: 14517 - DNA, 2300 bp, Homo sapien
tggaccgattctttgggaacctccaatttagtctgaggtggagggaaccctgcatactgaagctgtctcttctgagagaggtgcaagaactattgggcaaggtgggggagtctcctcacaaaaggagaggcctggccgggcgcggtggctcacgcctgtaatcccagcacattgggaggccaaggtgggcggatcacgaggtcaggattttgagaccagcctggccaacatagtgaaaccccttctctactgaaaatacaaaaaattagccaggtggtagttgcaggcacctctaatcccagctacccaagaggctcaggcaggagaatctcttgaacccgggaggtggaggttgcggtgagccaagaccatgccactgcactccagcctgggcaacagagtgagactgtctctaaataaataaataaataaaggagaggccagactgggcacagtggctcacgcttacaatcagcactgtgggaggctgaggcaagaggattgcttgagccccaggggtttgagaccagcctgagcaacatgggagaccccatttctaccaaaaaaaaaaaaaggcatggtggtgtgtgcctgtggttccagctactagggagactgaggcagcaggatcatgtgagcccaggaaatcgaggctgcagtgagctgttaccatgtcacttcactgaagcctggacaactgagcaagactctatctcaaaaaaaaaaggctggccgggtgcaatggctcactcctgtaatcccagcactttgggaggacaaggcgggtggatcacctgaggtcagaagttggagaccagcctggccaaaatggcaaaaccccatctctactaaaaaaaaatatatataaaaattagcagggcgtggtggcgcacgcctgtaatcccagctacttgggaggctgaggcaggagaatcgcttgaacttgggaggcagaggttgcagtgagccgagatcgcgccactgcactccagcctgggcgacagcaagactccgtctcaaaaacaaaaacaaaaacaaaaaccctgatctttcacttcgggcctgacagcagcttgactggaagtttgctcccgcagttctgagattctggccttttcttttgtcccattggtactttttgctgccagggtttcctgtccttcaggtttccatccccaatcagttgagagtccgactggagtacccaaggtgcgttgaggaatgaggcacagccctgggcttaactcatccagcctggccagctcagccttcccctgtcaggtgggagcctaggattgctgtcagcccagggagcagagttggaagaagggggcagggccctacctaggctgcggcccatcggggcagcctgcgctggtggcttcggaaggccctggtttgaggatgggtgcggcaggaacagcctgaagatagtggatggagaaggtacctgaggtgttgggagctctgctggtgagctgggcccttcacgtcaatgttagaggttgttacgtgctaggcgctgttcaagcactgggaattagctaaacaaaatgaccattactgtcatggagctcacccctagttgagaaaaataagccgaatcacacggcaagtgctaggaaatataagcagggatagtgagggagttattttacctaagtttgaagggaaagccctctgataaggcgacatttgagcaaaggcccggaagaaatgagatacgtctcgcccagtcgcaccctgtctctacctgacaagtctccggcccgcggactgagtgggggacctgggcggccgccatcccccacttcctcattgttccacggccctggatcgccttcttttctcggtcctcccgaggaccggatgcttctcctctccctggcgtgtgtggaagagatggacgctacgctagagcacatcgcacgggcggtcccattaaaaatcagatgggggagagaagcgagcccaagtcaaccgaggggagcggggagcggaaagggaggagccgtcgggggcgggacagacaccctgcccaccggaggggcgcgccaccgccgcccccgctccactccgccagggggcgctgtgtggctcccgagtaggctcagagcgaccgtggccgggcggaagcggctttctggcctaagctttaacaggcttcgcctgtgcttcctgtttcctcttttaccaaggacccgccaacatggtaggtgttttggctcgaggccgccatcctccacaatcgtcccccatctgcagcttcccgcggtcctcagcccacagagaggccctgg

SEQ ID NO: 14518 - DNA, 2300 bp, Homo sapien
cactctgccacccctccaggggcagtcagaggggaagctacataggagagggggtgggtgagaaccaggaggacagcaaggaggcgacggtggaggtctgccttcatcctgacatgggcagtaaggcatcctgacatgggcagtaaggcgctgttctgggagggttctggcagagagggtgtctttgggtcttgggcggtgggcacctgggtgccagtcccaggctgaacgccatggcccctaggtgtgcagaggcagagtgtgtactgctcggagcggcaggcagggcccgtggacgaggagcactgtgaccccctgggccggcccgatgactgccagaggaagtgcagccagcagccctgccctgccaggtgagcccgcccccatcccctaccaactccccacccccaggcatcctgggtctgccacaggcccctacatctgggtccccagaggccccagggaggagcagagggagccgggctttcattctcttcccaaggctgaagccccaacccccggtcacctctcaccccagcctgggccagcctggacacctatggtcctcctctttgggtccctggatgtggaaataggcctcaggtcatgctcagtttccctgaggggaaggtggcaggagtggaggggctgtgccttgtcaccagactttgagggcaggacacttacctgagcttggagctctggagaatcatccactggcttctggcactgcccaaaccccgagggcctggaaacccagcctggccctccctgctggtgagcctgtcaatgccacctgtctgatgccatactgatgacacctgtgtgccctcagcaggtggtgggcaggtgagtggcagctgtgctccagctcctgcgggcctgggggcctctcctgccaggctgtgctctgcatccgcagcgtggggctggatgagcagagcgccctgaagccacccgcctgtgaacaccttccccggccccctactgaaaccccttgcaaccaccatgtgccctgtccggccacgtaggctgtggggaactggtctcaggtgagtgtgggatgggaaggtgcccgcctccagccccacccttggtcttcagctacagggaggcagacagccttcctggagaccttgtgggtgggagggaacctgggcattccagggtccagcccctgactctaaagcctcagggatcaggaagcccctggcaagcatggccacagtcatggccttgagctgggaagggccagagagggctggctggggtctctgccactctgacatcaggcagtggacaggttacccagccttgccccagcgtcccctggcagcctgcctcccaggctaagcccctcaccctggcttcccctgcagtgctcagtgacatatgaggaagggactcagcaccgaaatgtcctctgcatcagtgacaccggtgtcccctgtgacgaggcccagcagccagccagcgaagtcacctgctctctgccaccctgttggtggcccctggacacactgggccctgaaggctcaggcagcggctcctccagccacgagctcttcaacgaggctgacttcatcccgcgccacctggccccacgcccttcacccgcctcatcacccaagccaggcaccatgggcaacgccattgaggaggaggctccaaagctggacctgccggggcccgtgtttgtggacgacttctactacgactacaatttcatcagcttccacgaggatctgtccttacgggccttctgaggagcctgatctagacctggcggggacaggggatcggacgcccccaccacacagccgtcctgctgcgccctccacgggtagccctgtgcctgccacagagcctcctgcagccaaggaggaaggggcaacgggaccttggtccccgagcccttggcctagccaggccggccgctccccacccccaccctcagagcagacccctgggaaccctttgatcaatttcctgcctgaggaagacacccccataggggccccagatcttgggctccccagcctgccctggcccagggtttccactgatggcctgcagacgcctgccgcccctgagagccaaaatgatttcccagttggcaaggacagccagagccagctgccctctccatggcaggacaggaccaacgaggttttcaaatgatgagggacccaagggctgcggagcaccccacctgcccccgagacccagccccacgctgcccactttgtacccggtcagcagcacccactcctctcctagtcctgacgtggcggagctgt

SEQ ID NO: 14519 - DNA, 2300 bp, Homo sapien
tacactcaccatccgaggtttgcaggacttttgtttcagtattgaacagatggaactgtttagttcttcatctttgcaggtataccaaatgtgcctaccaggagtctgctttatagccattgaaaagcaagaagtaatatagtaaaattttgcctggctagaggctttggaagacaagtattttggcttaattctattaacgtggaaggatgaaggtgaaaaaaattcaaaactttaatatcctgtttattgcaatttgaaaatatagccaatgattccacttttcttctccagtaagtttggacattctgatctacttggtgttttattacagaactgctagtgtgcctgagtcttacattgtgaagatccttctctaaaacttcacatgtaagagaatataaatgatattggataagatcaggctggatgagaactgatacctgtaaatatgcgatttagacaaaatctctgattgttttcttatttaactcataaaaataaaacacattggctggaaggtgggagcaggaaggagatttatgtcttttaattgcacgtcattgtttcatatagagaaaacatatagtatccctggttttggacctacagaaggaaacacatttttctacctgctgtatgccagaggttcttgaacacctggagggattactgcagcacagattgctgagccctactccagagtttctgattcatcaggtccagggtggggccggaggatgtgtatttataagaagttcccaggtgctgctggagctgctagtccagagactacatttttgagaactgctctcatatactaactgtaagttgcagagctctagaaaaaaagcttagtttggtgtgggataagaagcacacaggttatggagaaaatcatgaaagattcaacccttgatcccagcctagtgtggatttcaggtaacaagcaatacacagtgacataacaaattcttggttttcatgactgcaagtgagagccaagtatcaagtgagaaattcagcttcatttgcaaggcttagagaggccaggtgattctagaaaaatgggccttgtaattctcttaaaccagtaaagagctttaagtggttattaaattgaaagctttgtgttcttacttattttgtattttattttatttcttttgagatggagtcttgctctgtcgcccaggctggagtgcagtggcgtgagcttggctcactgcaacctccatctcctgggttcaagtgattctcctgcctcagcctcccaaatagctgggattacaggcacccgcaaccacgcctggctagtttttgtatttttagtagagacagggtttcatcatgttggccaggctggtctcgaactcctgacctcaggcaatccacccacctcggcctcccaaagtgatggcattacaggcgtgagccaccgcacccggcccaaaagctttgtgtttttaaagatattagacatgtttcttgtttttaaaagaaatcttaacaataatgtaggagaataagacaaacatttttccaaaaaagagaaattgttgtgattattttgtcttattggaatgtcggatactatagtcggcttcattaatcatcaagcatgctatggattttccatttttataggatctatatctcagttaaggtaatactggtaattcttgtactccatttgaagatgaaaaatataggccaaaatcacagactttgcacagaagctgcataatgaagacagctctggaggaacacatagatacacacacacagacacacatatatataaagtatatacacatatattttttaaagtttattttttacagttttaaaagttttaaagcaaaacccagcccttcccctctcccagagtgggcggcccctcccctttctctgagtgggcggggacagcggttgcatgggcagctttccttatgatgccacaggtccctctggacatgctgctgcctggccacgcctcctttccctttcatctttctcactgaccaatgggcttggagcattaaggccacgcccctattctgcgttccattggtgccctggttacgccacctgtggctcagttgcacagctgcctggtaggtgactggaggcattgagcagtgctcactggtatttcgctgatgtggccccaaccccgcctccctccccaccccgcgatgtcagaaaaaacacaacaggggaaattggccgcagccaagaaaaaggtaaaacacaccaggtcatggcccccaacccagccacagatcccctccgatgac

SEQ ID NO: 14520 - DNA, 2300 bp, Homo sapien
gttatgattttcttccctgccacgcctgttttcatgggcagtgctgagccccggtcctggcagagctcagaaccaggctctcatgagctggggcaagtggggcctagggaacctctgggttgaggaccttgcaccccactctgcagctgccctgctgatttggctcatgcaacctctcctcctgggctcaagcgatccttctacatcggtctcccaagtagctgggatttgggctaccacgtttggctaatttttgtatcttttagtacagatggggtttcacctgtagcccaggctggtctcgaatcctgggctctagtgatctaccctcctcagcctcccaaagtgctgggattacaggtgtgagccactgcgcccggccttgtgccagcttttaaatatcaacaaggacaaattagagaacagtggaagagggtgagcagcatgatgaggtgatacagaaataatttcacatgaagaactgggcatgcctggcttttttttttttttaagctattctgggttggatgctgaggctcacacctgtaagcctgtaatcccagcactttgggaggccgaggtgggtggatcacctgaagtcaggagtttgagaccagcctggccaacatggtgaaaccctgtctctactaaaaatacaaaaaattagctggaattggtggcatgtgcctgtaattccagctactcgggcagctgaggcaggagaatcgcttgaacctgggaggcggaggttgcagtgagctgatatcgtgccattgcactccagcctgggcaacaagagtgaaactctgcctcaaaaaaaaaaaaaaaaaagaaagaaagaaaagaaaatatatctatgcaccagagctcaacactaggttaggagcatttctgagatttggagctattcaaccatggaagttcctggcacatacatcaggtattcacaataccctttctcaggtgtttggtcactgctagtgagcctgcctggatcagtgtttcccaaatggcagtcatttgcatctttgcattttttttggggggggggttgtgggggtatataccataccagattttttaaaaattgacattaaaaatacatgtataaaatgtgtaaagtgcactaatctaaagtgcactggatgtattttttattgatgtacatacttttgttatccatcacccaggtcaaaatacagaatcagcaccacagagggttccctcctcctccttcccagccaataatcttctcctcctacctaaccaactgttcttacttcaagcactgtcaactagtattttacattcttgaactgcatataaagtgtctcaagtttcacttaacacttttcttgaaatacacttgttttttgccactttttatttgacctaagaagtaacattaatgaaacaatgatttgacgtgataggcatttccctcctaatgagcactaaaacacttaactatttgaaaaaagaagtttctccgtgtaccagctaatatattctcctcggccgccgttggtacacggaccacattttgtttctcaaagcaatccgatgatttctgaggtcctttgcagcttgaagacggaacgactgtggtgatcgagtagccaaaagttcacggaatgcactgtcacaattgtgattccgccatagcgccgtgcatccatccaacacttgtttaatacctatatttaatacctaataccttagagtgtcctaggctgtggacacacaagactaaaccccacttcctgagttgaagtgggggaaatagaggagtaaatcatttcacgatgtgtggttaaatgctacagctcaggtaaccacgagcacacagagaaagggcagtttctagaaacagggcggagaggagaccgtgagtgggcatttcccagagcagtctctgccagccaccctgctgtgatcactttgccacagagcagccccggcggtcaacctcagcctcccttagcaacctgagcgccccgcccaggtgccttactattggtctcgtggagcgggatgggcagctctgccgtgcaatcccagctcgcagcccttgctccgcgtgtactcacgggaggactcgcagacgttactgccttcttgcgtgccccggccacccccgggcggcttgtagccggtgcgcggggtggctggggctacgtgcagagctgtcgcggagccggaacagcagcggtgaagcccctcggctcggccgagaccgccgtgcccattgctcgcctcggttgccgccgctttagccgcagccgctgctgccgccgccg

SEQ ID NO: 14521 - DNA, 2300 bp, Homo sapien; identical to SEQ ID NO: 14514

SEQ ID NO: 14522 - DNA, 2300 bp, Homo sapien
gagaggctgtggcagcaggagactctgcgggagctggagaggctgcgggagctggagaggctgcgggagctggagaggatgctggagctggggtgggaagccctgtacgagcagcgggccgagccacgcagcggcttcgaggagctggtacgttgccccacctggggaggctgccctcttccctagccctcaaggcctttgtttccccacctgtaaaatggggcattgtagccttcacatgaaatggtacttctaaaggcatctgtgagccagagccccgctctgatggctgtgggagagaggggatatttttctaacctgcctccacccttcccggtgccatgggaggcagacactaagttctggggtctccagttttagtgggtggccactgattgcttctctctgtccagaacaacgagaacaagagcacactgcagttggagcagcaagtaaaggagctggagaagtcgggtgagctgaaagagactgtaacctccgacccatccaagaagatgtgggaggcgggcaccagcctctggggaggggaggtgccaggccacaggcagctgcagcctggggacaggtgaccccagcaccctccggggcagtcctatgactgtttcttgcttcctgccctctgacttttagaggtgggtagccctggggccctcccaggtctggacatcatcatcatcccagctagaggcatggagccccccaatcacagaggaagagacagtggtataagaggctccttatgtcgggtgtggtggctcacgcctgcaatcccagcactttgggaggctgaggcaggacaatcacttgaggtcaggagtttgagaccaacatggccaacatggtgaaagctcatctctactaaaattaaaaataataataataattagccgggcctggtggtgcatgcctgtaatcccagctactcaggaggctgagacacgagaatcacttgagcccgggagatgaaggttgcagtgagctgagattgcaccactgcactgcagcctgggacacagagtgacactctctcaaaacaaaacaaaacagaaaaacaaaaaagactccttagattcaaactggattccggcctcggttccactggtcataattcaactactttgcatctctaagtctctgtttctttaacttcaaaaggaagttagccttttccttgcagaggtgctgaggattaaatgagataatacgtggaaacattaggcatgtagcacacttagcagatggtggttggctccgcctgcttttccaccagtctgtggcctacagtttacatgctgggaaaaaggacgtgagatttgatgctagggaaggaggcatggggttctaggcaagggagacagtctcttaggcctggagcaaggggccaggggcctgggcaggccacagagccccacagtgccctcgctaccctattaatgggccaggaatctggaagccagccaccacatgtcctcatgcccagggtcttccggcaggtggagctgaagagccaagaggctccgagtctgcagcagcagccagaccagtacctggagccccagtcccacaaggagcttggatgtgcggacaagcagggtggtgagtagagccctcaggcggggtgggcaggcaggagcaggggaggctcgcactgtgcccagattcccaccccctccctctctctgaagatcttagtgagctgagcctcactgatagcatggaggctgcaccgggacaggacagggagggttctcccccatgacaaccccactgcacagcagatccagcagctgcttcctctaatgcaggactccccaggagcacccaggcttgagtggagaagctgttggtacaggagaggcggcaggaggagcagaagaggctgcatgccattcttttcgggctgcggagaacagggagctaaacatcaccatcatctaagagcgggtcaagaaattgaaaaaaaaaaaaaacaaaacatttaaggggttaatatcctacacaattcatttacttcatttgaatgttagagccacttatgtttatttgtgtttctaatttatagtttaaatttatttgtgtttctaatttataatttaaatttatttgtgtttctaatttatagtttaaatttatttgtgtttctaatttataatttaaatttatttgtaaaaagttaaatgagagtgggtctttctctcatgttcactctggcatcttttagcatttttttaatttgataattataggacgttagcatgcatatcgagtttgcccttatg

SEQ ID NO: 14523 - DNA, 2300 bp, Homo sapien; identical to SEQ ID NO: 14519

SEQ ID NO: 14524 - DNA, 2300 bp, Homo sapien
tttcttcctactttctgagactctgcaaccttaaaggaagagtggggtactttaaaggaaaggtggtgttggttggataatgggtgacaatgtctgccatatacttccttttcccaaaacaagttcctgtctaccatcagcatctccaaaatttgaagatcaagtgtggtgttaactcattaactaaatgactagactttgagcagttgtggaaccaaaatctgagtgagtgcctggatgttctaattctgttaaatcaatgagtgcacattatatacaatactctcttagcccagtggcagatttaaggagtgagagagagatttcaaatgtttcagaaatcaaatacacaaagaataaaaatttttaatcccatgattctttacctgagtttaatttttcggagagtttttcttttagattttcttttccttccattaaactttcactttgaaagctcccagggtttgggcaaagcaagtgggaaagacacttgcttggattctccagggcaagggagttaaagagggcttctttccctcattttattattgaataatgtcatgaaaacaattattaaggtgaatggtctacagtagaagtttttagatgccttctctgcaaaataatttggtttagtcaatgcaaggatgcctttggttagctggaatggaagatgcgcaggctagagtggtcttggcaagtcttctggggggaaatacagcatttggaagggtaggaagcagaaggaatctcaagcaagggaaaggtgtgggcagagccccggaggacagaaccgtttgtggtggacttggtgtccacatagatctaatcagtggtcttagcttttgtgctttcaaaattaccacagtttttgttctaaaactatcattcccttgattttactttaggcatgctatctgtgtattttgaaatttaaaataacattaaaggagaaatgaaattattttgtttgagaaagaattaaaaggttaaaacatcttgatctaaataattttctaatgggagatttggtacatccccagaagttgtctttggttcagagaacagtcttcagacctagaaaggacttgaggagtcccagagaggagccacatggtgtgaaccattcgattctcacaacagaatggataagaacaatttcaaccatgaaaccgtgcagatgttcatattttgaatagggtaagatcggtgccattgtcagaggaaaaactcctggccatcacaggttgggagagaaagtttccattgtaaagaacactcaaatgccatttaaggaaatgggttcttctgccctgattctttggaatatttagggccacgtttttagtttttgacatcataaaaatttcaaagtattctgttctgattgccatttcaaacaattgactggaatttcagagcaatttcataagagtaataccattagaatttttaaattacctataatcctatatgcctaacaagtatgttcatgcttacgtgttctcttcttgtctttactgtgtgcatactttcttaataatgccacatggaaattgtttaagcaggaatacttctcaagataattttgtatgtttccttttttctttttaaggtatgtattgggtggaggagcattatgtatggaacctctggtgattattttattattatactcaattttcaccctcaatagagtgttttgattatgtaagttagatcgtaagtagacggttctcttaaagacattttagtgttttttttttttttcgtagctcctactttcaagaatgaaaaaggtatcccagcagtttgggaggctgaggcaggcggatcacgaggtcaagagatcgagaccatcctggctaacacggtgaaaccccgtctctactaaaaaatacaaaaaaaatagccgggcgtgatggcgggtgactgtagtcccagctacccgggaggctgaggcaggagaattgtgtgaacccgggaggcagagcttgcagtgagctgagatggtgccaccgcactccagcctgggtgacagagcaagactccatctcaaaaaaacaaaacaaaacaaaacaaaaaaaacagaatgaaaaaggcaaaccagtaaaataacattgtgcttggtgctgaatttatgctaggataggcgttaacagtgacctttatttaaggttttaatttgttcatgttgggcacttagaacattggtttgttgtttttttgtgagattctggaaacgttccaattttaccttttccccttgactccagactttttaacactggtctgct

SEQ ID NO: 14525 - DNA, 2300 bp, Homo sapien; identical to SEQ ID NO: 14511

SEQ ID NO: 14526 - DNA, 2300 bp, Homo sapien; identical to SEQ ID NO: 14512

SEQ ID NO: 14527 - DNA, 2300 bp, Homo sapien; identical to SEQ ID NO: 14513

SEQ ID NO: 14528 - DNA, 2300 bp, Homo sapien; identical to SEQ ID NO: 14514

SEQ ID NO: 14529 - DNA, 2300 bp, Homo sapien
tccctgccacgcctgttttcatgggcagtgctgagccccagtcctggcagagctcagaaccaggctctcatgagctggggcaagtggggcctagggaacctctgggttgaggaccttgcaccccactctgcagctgccctgctgatttggctcatgcaacctctcctcctgggctcaagcgatccttctacatcggtctcccaagtagctgggatttgggctaccacgtttggctaatttttgtatcttttagtacagatggggtttcacctgtagcccaggctggtctcgaactcctgggctctagtgatctaccctcctcagcctcccaaagtgctgggattacaggtgtgagcactgcgcccggccttgtgccagcttttaaatatcaacaaggacagattagagaacagtggaagagggtgagcagcatgatgaggtgatacagaaataatttcacatgaagaactgggcatgcttggccttttttttttttttttttttttaagccattctgggttgggtgctgaggctcacacctgtaagcctgtaatcccagcactttgggaggccgaggtgggtggatcacctgaagtcaggagttcgagaccagcctggccaacatagtgaaaccctgtctctactaaaaatacaaaaaattagctggaattggtggcatgtgcctgtaattccagctactcgggcagctgaggcaggagaatcgcttgaacctgggaggcggaggttgcagtgagctgatatcgtgccattgcactccagcctgggcaacaagagtgaaactctgcctcaaaaaaaaaaaaaaaaaaaggaaagaaagaaaagaaaatatatctatgcaccagagctcaacacgaggttaggagcatttctgagatttggagctattcaaccatggaagttcctggcacatacatcaggtattcacaataccctttctcaggtgtttggtcactgctagtgagcctgcctggatcagtgtttcccaaatggcagtcatttgcatctttgcattttttttggggggggggggttgtgggggtatattccataccagatttttaaaaaattgacattaaaaatacatgtataaaatgtgtaaagtgcactaatctaaagtgcactggatgtattttttattgatgtacatacttttgttatccatcacccaggtcaaaatacagaatcagcaccacagagggttccctcctcctccttcccagccaataatcttctcctcctacctaaccaactgttcttacttcaagcactgtcaactagtattttacattcttgaactgcatataaagtgtctcaagtttcacttaacacttttcttgaaatacacttgttttttgccactttttatttgacctaagaagtaacattaatgaaacaatgatttgacgtgataggcatttccctcctaatgagcactaaaacacttaactatttgaaaaaagaagtttctccgtgtaccaactaatatattctcctcggccgccgttggtacacggaccacattttgtttctcaaagcaatccgatgatttctgaggtcctttgcagcttgaacacggaacgactgtggtgatcgagtagccaaaagttcacggaatgcactgtcacaattgtgattccgccatagcgccgtgcatccatccaacacttgtttaatacctatatttaatacctaataccttagagtgtcctaggctgtggacacacaagactaaaccccacttcctgagttgaagtgggggaaatagaggagtaaatcatttcacgatgtgtggttaaatgctacagctcaggtaaccacgagcacacagagaaagggcagtttctagaaacagggcggagaggagaccgtgagtgggcatttcccagagcagtctctgccagccaccctgctgtgatcactttgccacagagcagccccggcggtcaacctcagcctcccttagcaacctgagcgccccgcccaggtgccttactattggtctcgtggagcgggatgggcagctctgccgtgcaatcccagctcgcagcccttgctccgcgtgtactcacgggaggactcgcagacgttactgccctcttgcgtgccccggccacccccgggcggcttgtagccggtgcgcggggtggctggggctacgtgcagagctgtcgcggagccggagcagcagcggtgaagcccctcggctcggccgagaccgccgtgcccattgctcgcctcggttgccgccgctttagccgcagccgctgctgccgccgccg

SEQ ID NO: 14530 - DNA, 2300 bp, Homo sapien
ttggaccgattctttgggaacctccaatttagtctgaggtggagggaaccctgcatactgaagctgtctcttctgagagaggtgcaagaactattgggcaaggtgggggagtctcctcacaaaaggagaggcctggccgggcgcggtggctcacgcctgtaatcccagcacattgggaggccaaggtgggcggatcacgaggtcaggattttgagaccagcctggccaacatagtgaaaccccttctctactgaaaatacaaaaaattagccaggtggtagttgcaggcacctctaatcccagctacccaagaggctcaggcaggagaatctcttgaacccgggaggtggaggttgcggtgagccaagaccatgccactgcactccagcctgggcaacagagtgagactgtctctaaataaataaataaataaaggagaggccagactgggcacagtggctcacgcttacaatcagcactgtgggaggctgaggcaagaggattgcttgagccccaggggtttgagaccagcctgagcaacatgggagaccccatttctaccaaaaaaaaaaaaaggcatggtggtgtgtgcctgtggttccagctactagggagactgaggcagcaggatcatgtgagcccaggaaatcgaggctgcagtgagctgttaccatgtcacttcactgaagcctggacaactgagcaagactctatctcaaaaaaaaaaggctggccgggtgcaatggctcactcctgtaatcccagcactttgggaggacaaggcgggtggatcacctgaggtcagaagttggagaccagcctggccaaaatggcaaaaccccatctctactaaaaaaaaatatatataaaaattagcagggcgtggtggcgcacgcctgtaatcccagctacttgggaggctgaggcaggagaatcgcttgaacttgggaggcagaggttgcagtgagccgagatcgcgccactgcactccagcctgggcgacagcaagactccgtctcaaaaacaaaaacaaaaacaaaaaccctgatctttcacttcgggcctgacagcagcttgactggaagtttgctcccgcagttctgagattctggccttttcttttgtcccattggtactttttgctgccagggtttcctgtccttcaggtttccatccccaatcagttgagagtccgactggagtacccaaggtgcgttgaggaatgaggcacagccctgggcttaactcatccagcctggccagctcagccttcccctgtcaggtgggagcctaggattgctgtcagcccagggagcagagttggaagaagggggcagggccctacctaggctgcggcccatcggggcagcctgcgctggtggcttcggaaggccctggtttgaggatgggtgcggcaggaacagcctgaagatagtggatggagaaggtacctgaggtgttgggagctctgctggtgagctgggcccttcacgtcaatgttagaggttgttacgtgctaggcgctgttcaagcactgggaattagctaaacaaaatgaccattactgtcatggagctcacccctagttgagaaaaataagccgaatcacacggcaagtgctaggaaatataagcagggatagtgagggagttattttacctaagtttgaagggaaagccctctgataaggcgacatttgagcaaaggcccggaagaaatgagatacgtctcgcccagtcgcaccctgtctctacctgacaagtctccggcccgcggactgagtgggggacctgggcggccgccatcccccacttcctcattgttccacggccctggatcgccttcttttctcggtcctcccgaggaccggatgcttctcctctccctggcgtgtgtggaagagatggacgctacgctagagcacatcgcacgggcggtcccattaaaaatcagatgggggagagaagcgagcccaagtcaaccgaggggagcggggagcggaaagggaggagccgtcgggggcgggacagacaccctgcccaccggagggcgcgccaccgccgcccccgctccactccgccagggggcgctgtgtggctcccgagtaggctcagagcgaccgtggccgggcggaagcggctttctggcctaagctttaacaggcttcgcctgtgcttcctgtttcctcttttaccaaggacccgccaacatggtaggtgttttggctcgaggccgccatcctccacaatcgtcccccatctgcagcttcccgcggtcctcagcccacagagaggccctgg

SEQ ID NO: 14531 - DNA, 2300 bp, Homo sapien
ctgccttgaactcctgggctcaagcaatcttcccaaagttctgggattataggcatgagccaccacacccgactgctcaaactttttttgcatacatatatattaactggggatcttgttaaaatgcagatctcaattctgtcggtcttgggtggggcctgagactcagtatttataacaagctcctggtgatgctcatattgctggtctgccacactgtattttgagtagcaagagcatagttgattctctcctcgtgagggatgggggtaatcatatgcacagtcaccctgattttaatgggtagaaaatggctgcttctagacatagatgccctcagattggggtatggggattatatagatatttggtgtaggggagaatagatacttaaatatggatgtttttgaaggaagcattgtgttttggtaactaatatgtatgggtgaagtctaaagtatatccttagcttgagggaagggtgaacatagagaagcaggaggggagtagtcaggggtaggggcagcaccagtatgggtgatttttgctaggcctttgccatgatgaacaaggctttgacaaacacagatagggagcaagcagaatatctacagccaggaggaataacgtggatggatgacacagcagcaaagctttaaaaaaaaaaaaaaatctccaaaggaaggagactgataattttcccttctaggctatgcctgagtgcctgtggacacagggtgtactgcaggaagttctgaacagctatttctgtggcagcattattctctcgaccctgccatgggaggtcccaggtgggcatgcttcccgtatctgcttgcttctccttgcaacaggggagaacaagcaggtggagtgctaccagctgagtccaggtttgagcagcctgcctggtgagtctgggcctgttgccctaccctcctttatgaggaagaagcccagtgaccctgggctcatgttggaaaaggaccgatgtgggaggagatggcaaagaggaaatggcggaagctccagaagctgaattttcttagtctttgttgctggagctgtgagtggccacagaaataagcattggtcttgtgcagcacctctgagagagggcctggatgttagaggcatcagtggccctcacggctgccctgtatcatgctcagggctcctggaagggcaagagaagcaatattgacagagctaggtgattaggtttcagagtttggtgtttctaatagggcgtaacgatacttcagagactgtttctcttggtttgtcagatgctgcttcgagagtgtttcctcagtctgtgcctacagttgcaggagggaggggaggagctgagccgctgtatctgttcatgactaatacccatcttgttgggatgagggaacctgggcacagggattatcctagtcagggcaggtctcactctggcatgtgggttgtgggccatgtcctttgaggtgtacctggaacagcccagtgactctcccccactctgccaacgcttaccccctttctctgtgataagctgctctagacaagcctggaacaccaggtgttgttccccagggtccaagtgtacagtatttttctgaaggttatcttgttcctcagtggtaaacactgctgtgtcagggtgctgctcaggggccacttggagcacagatttttgctagcaggactgtgaagctttgcattgggctgcaaagccagggcttgagccagcagctggagagagtccaggactagagtgtttttgggtttgggggtggagagcagggggagggaaagggaggggcaggagggcagagccacacgagcaggcagtcggctgctttggctctgctgtcggcggagaggacttcagtcgtgcgtgagggctgcttggccaccattgctggagaccggagggcgctgccttgcaacccagacttaacggcactgcaccgggactattccaagtagctgttgtgctgtctttccctgggaggcaagtctcctccctgtcgtcccctcctgctcctcccccgttctgtgagggatgatgccgctctctattgcacggctcagccggctgatgtcactggcagcgggaagcatcagcagcctgatcacatgctggcccagtctgtaatgcagacgggataggggtgtgtgtgtgaggggagggggcctgtatggcaactgctcttgccccagcgtccccaaaagtgcagaggcagcggctgcagcatccagccagcttggatgtctggcctgtgagcctggggaaactattattaata

SEQ ID NO: 14532 - DNA, 2300 bp, Homo sapien
tggtggcacaatctctgctcactgcaacctctgcctcctgggttcaagcattcctcctacctcagcttcctgagtagctgggactacaggcatgtaccaccatacctgtctaatgttttgtattttttgtagaaacagggtttcgccatgttgcccaggctggttttgagctcctgcctgccaaaagttcttttccagacttcaaaactttattttggtttagtctgtgtctaatctgctgccccttggggtgctcactatagagagcaggcagtcggctaatgtttattaggcagtgaagaatgaagcatgtagccttaagataatgcagattgtgctaggcaatggcacgtgcctgtagtctcagctactcaggaggccaaggtgggaggagcacttgagcccaggagtttcaagttcagcctgggcaacacagcgagacctcctctctgcaggttataaatctttgcatcttagccttcatgaagttgccttcctgaaattgagaatcagcttagaaatctacagttgtgaaaagggccttgtgtgtcactggatttaacagttctcaatggcaccactctagagagcttgggaaaacaaccttgtaggattgtgtattttggtcgtcttcacagtttgcagagggtaccaatcttcaagaacttgaggctgacgtgaggctcaagtttgtccctttaaggtcatcctgcagagttggtaaaactgtaaatgctcttggtcattctcatgctcacttggattttagtaggccaaacaaaatgacattgggcctcttcttgttttgttttgatgtgaccagcttatgagatattaagtgccagtttcattacttggtctgtttttgttttccgcaagataattgaggataatagaactgatgaggcaggctccccttaaaaaactcaatctgtcaaccaatatttcattgcttcttatgttgggcattggctgtggagagtgagggagaccggagtgaagaatggtacctacatttctgctttgggcatctggtggatggtggtgttatttaccgagatagggaataccaaaagaatagtttttgtgtaagggttcatgattttttatatatatatataggagttcttttttcattcggtaatgtcttacccatcttctcatgccagttaataaagttgtatgtactaataatgaccacatagagttgtataacttaatcagtttgggtggttttaccactgttggtacttacctctcttgtattcaataattagtgtttgcagatacaaattagcagctactgtatgccatgcaaaatgctttacatatgtcatcaaaaagttggtatcctttttccatttcacaaatggggaaactgagggatagaggttaagtaactgtgatatcacacagccaataaatggcagaatgaaaatttttaaacagctgtattgacataaaatctacataccctaaagttcacctttaatgtacagttcattggtttttagtccagttgactcttggacagtgtgggagttaggaggaccaacccccacagtcaaatatctatgtataactttgactcccccaaaacttgactaatagcctgctgttgaccggaagccttaccgataacataaacagttgatcacatgttttgtatgttacatgtattttataccgtattcttacgataaagtaggctagagaaaaaatgttactagaaaatcataagagaaaatatatttactgttcattaagtggaagtgaatcataaagatcttcatatttactgttttcacattgagcaggccgaggaagaggaaggattgattggtcttgctctctcaggggtggcaaaggtggaaggatgtggagcggatgtaaggagaagcaggcacagtcagtgtaactttacagaaataatttctgtctgactttttgctttttcatttctgtaaaaatgtttctatgtggtaccaatcctaattccaccatttgcgttagtttcagtgcctgtgtaatagaagggtctgtattgtaaaagaagtcaaaagcagccttgaataatcggaacccttttgccagatcatctaatgtcaatatgttttctggcattgctacttcaacatcgtcttccatgtctggcactggtttggagcactcatctctatcagattgtcttctgctaattcctctggtatgttaactcttggatttctccaaggtccatgtcttggaaatcttcactcccaacctttttttgtcatatctacagtttctttcatgatttc

SEQ ID NO: 14533 - DNA, 2300 bp, Homo sapien
gggcatggtggcgcctgtctgtagtccagctacttgggacgctgaggcaggaagattgcttgagcccaggagatcaaggctgcagtgagctgtgattgcagcactgtgctccaacctaggggacagaacaagaccccatctcttaaaaaatgtgtgtgtgtgtgtgtgaatatacacagtacacatgtcgagcagccctaatctgaaatgctccaaaatctgaaacttttggaacaccagtatgtcacaagtagaaattagacacctgaattcatgatgggtgacagttaaaacacagtcaaaatttaatttcatgtacagaattactaaaaatattgtataaaattaacttcaggctatgtgtatgaagtatatataaaaaataaatgaatttggctgggcgcagtggctcacgcctgtaatcccagcactttgggaggccaaggtgggcggatcatgaggtcaggagatcaagaccatcctgactaatgtggtgaaaccccatctctactaaaaatacaaaaaaatgagccgggcgtggtggcgggcgtatgtagtcccagctactccagaggctgaggcgagagaatcctgtgaacccgggaggcggagcttgcagtgagccgagatcacaccattgcactccagcctgggcgacagaacgagactccgtctcaaaaaaaaaaaaaaaaagagaaaaaaataaatgaattctgtgtttagacttgggccctatccctaagataggtcattatgtatatgcaaatgttccagcttccaaaaaaaaaaaaatccaaatctgaaacacttcttggtcatctcagcatttctgatgagagatactgaacctgtagtggattcagcccttaggtctatttgaatcatatctcttgccttttaattaagcattttaagtcaaatgattaagaggaagagttagggggtaccaggaatagaagggcctggagtcttcagagaaatagttgccataggtctttggttcacttaatgagccaatagatccttcctcaaggatccctgtggtggcctctgaataataataatgatacgactgatagacagtattcgttggttcagcacataattacatgtcaggccctatgctaagtactttatgtgcattaattcacaaaaagccttatgagatagtattacttttatccctattgtacacaaaggagagtagtagatctgttcgccatctgacagtcctggctttgattttttttttttccttccaaattggttaaggcaaacattggtaattataagatgaaacagtttggaatatacattgaacacctcattcacttttattataatgtcatcttaagctagagctctggcttgatgtatgtgagagaaggggagggaggcatgtcagatatcatttgccttgatttgggaaggtgtgtatgttcctaacaggattaggagtggggcagggtgaccagacacattcctaaattagatttttttttcagactccttgaaatagtaagatttccttcctctcctaaggaatacctttctcccagactcccaagtctgcatctgttccctagactactgtggtactttctcactaatccttctgccacttatctgtcatgtagttgctggtggtctccttctaagactcactttgttatttacttgcctttagatgtggccaggatctggaatccatgtagtccatatatatatagtacttttattacagtaattaaaagctaggttaatttttgtgtattgaaaagacacaattttgtgtattgaaagacaatgctgactccttaatttggcatatgaggcttttccaattttctctcctatacctaatgctgtaccacactggaccacttttgataatgcctctctactctcttgtgttctttagaacttcctctttacccccatttccaggcacattctgtccctccaggccaccttggcttggaggacaatgtacatttacagcacgttgtagtctgtgttgtggatgtttacaggatcgggtcttagttctttttctttctttttttttttgagacagggtcttgctctgtcacccatgctggagtgtggtggcacaatctctgctcactgcaacctctgcctcctgggttcaagcattcctcctacctcagcttcctgagtagctgggactacaggcatgtaccaccatacctgtctaatgttttgtattttttgtagaaacagggtttcgccatgttgcccaggctggttttgagctcctgcctgccaaaagttctttt

SEQ ID NO: 14534 - DNA, 2300 bp, Homo sapien
ccatcctggctaacatgctgaaaccccatctctactaaaaatacaaaaatcagccgcgcgtggtggcacgagcttgtaatcctagctacacaggaggctgaggcaggagaatcgcttgaacccgggaggcggaggctgcagtgagccaagatcgcgagactgcattccagcctgggtgacagggcaagactccctctcaaaataaataaataaataaataaatattaaaaaataaaaagccaaactcctacagcaacgtgctctgggaatacagttcagctccaagccagctcaatggggacaaataaaagaccagtgatgagtccccaaaacaccgtccccagggttttccgacagccagcagccccattgagctccacaagcttttctaactatgcaaaaaaccaaccaggaaaacaatcaccaacttgaggtttccaaggttgggtcctgtttgaatttatttttattttttaacccagcatgtgtccctagactcaaagggaacatgagcctcagggtgcaaactgtccttagcagacactcttcccgctagcaagggaccgcaccgtcacctgaggggcagccaagaggcgggcggtgcacctgtgccttccagaataggaaccccacccacttgcccctcttccccaccaacgacacagcccagtagttgactcaggtgccaggagagagcgcggggaggctgggcggtagccagggagaccaagggaagcggttgccagagaaatgcggcgtcagtcagggccggggctgcaggcgcggggcgggggaggagagacgcggcctcctcccaggcgggcctggcgggaggcaccccggcttctaagagcgaattcggctcccgactctcttcccccagctgagagcacggtgcaaggggccagggctgcagggagcaaagtgcccccgaaaaataagcgcgcgcccacgaaagcgcccaagagcccaggcgtctgcctggcttttctcggtcacggggtcaacgcggggccgctcacagagccttctggtctccctgggtcctctaggaatgaggcagcaaagcctcggtcgactcgaccgctgaggaacccatgacatgaaaaagcctcggggaatgacgccgggtgggacaccccaaggtgaggacccctttgtgggtgagtccccccacactcaggtgactccaggcgggcacaggcccgcccaaccgctcgtcatcacggggggcgactcgtccagggccccagccgctgctccgccaaacctgaggccgcccctgagtctgggcacctggcctcgtccggcactgaggagaatgaccagaacgccaggccacatgcacccactcgccaggctgagggtccgaacagcacagcccagagtgggctcgggtcgctccccgcctacgccacctccgcggcctgcaagcctaaccctctcccgcccatgaccaggacccacctcaatgccgccagcccggcgggtctcccgggcacgaagccccgccagtcttccgccctcgcgccacactacctggccagccccgcccccgagactccctctccggcgccaagcgaaggtgtgaagccacgtgacctgcccaggattgggaagccgcacgaggggcttgagccctccaccttaaaggtgccgcgaccgccgccgtcgtggggctctccacagagcacggggtctacgccgtcagcagccccgccccgtcccgcccgggcgcccccaccgcgcgccgggtgctaaagagacccgcagggggcgtgagcttccagcgccagcggcttcgggtctcccgtgcgacggcagtgtgagaaagaaacgttccgggcgccggtgctcctttatgtccggtcagctcccgtctggacagacgctcgaggccgcctggaggccgcagtgcggctcggaggccccaccggccgcccccgcagggctgcggcgcctttaagcccaaaggccctgagtcacgaggaggctccctgcccccctcgccctccacccctccacgaggccccacgcccgcgggcacgtgaccgcgccccgcccgggactcgcccgcacggggcgggggatgggggtaccgcggcgccggacccggctgcgcgcggaccgttagctactgcggccgggacgcggccccgcccaggcgagcggcgggtggctcttaccagcgggaacgccatggggccggtgtggccctgcggggctgacgggctgaccggccagccggcgggcgagagacgcgcacgcacgtgggcactatttttgcagcgggccgcgcg

SEQ ID NO: 14535 - DNA, 2300 bp, Homo sapien
ctgggagtcttttggcaagttacttaacttctttgagcttcagtctcatctgcaaaatgagataacataggtaaagcactcaaaactttcccacgcgcacagtaagtggtcagtgaagacgagctattattattacctgcaacagaaagtttagggagagagattttaggcagcagaagtttctgttccaagtctcttgaaagatgccttcattttcttatggttgacagttttgaaatatgacagggcctccagacacccgctcccttgggcactattctgggtttcaggttcttatcttgctcagcttttgggtcagagaggaggaaacgatgtcagggatcacaaactggcagccggtgagctgcatggggcccctggacatgctgggcttggctcttttcatttgaattaataaccaacattaaaattcacattcaagatttcacttaaaaaagtacttccagcttttcttgaaagatgactgggctgggacctcgtttctacatggtgcccaccagctaacagcccttttgggtgtgccttgggccttcagtgctgtcgcccaccctcacttggctcctgtgctgtaggcatctgggtgtgccaccctatcagaagcagccatcctacgctgcttgtgggccaggacaagactcaagtaggctactcctggagaaagcatggctcaagaggtaggggtcccagcgaagttgctcctgccttgtccctgtagtcatcaccctttctgcccatgacctcagcaacccaaagaagctcctgtaagtagaccaagtggatggagactggccaactcccactgtcactcaccccctcgtggacttctactcttatgctcaccacccttccccccttaatccttctgaaacactagactataatatcagcttcctctttctccatcacctcaggcagaaactgacagttacctgtccctctccccttagccattagatcaagcccaggaagacggcagcaccatccttcctaagtgccaggagaggaccggagcatagttagtgcttattaaatagtatcatgataacatgacacatgtaaaacacttagcaatgttcaataaactctggtccctttcctccccactccagtcccttgttttcccccttttctgtccaacctcttctatgtctccagcaacaccttaaaacagacccgacaactgccaaccccttttacaattctctaatagttttcctgctgtctgcagaataaaggccccttacaaaccgggcccaggcttccctccggcggtatcaggtcgcatcatcctcagtcctggtcagagggagccgctcggtgccgtcctccctctctgcctttgcttgatcttccgcctggaatgccatctccgactctgcgtttgcctggggtttccggtccgcccctgcgccaggtgccctaggacgcctgccctggagccctcgccctatcccttgccctatttctgtgaaactttctatctcagtgtgtcaggagcgccggaagcggtttctccggagaactccggtccaaagaggaccagtgatgtctttggaactttctggaacttcctgactctcgcggccccctctgcagcgcacggagcagagggtctaaagtgagtgcgcctcctggagcccaggggctacagttccgaccaaggatgccagggcaggctctcgccctggagagatcactggaagagaaggagcgcggacacgaggctctactgacgaagcgatcgccgccgctcgcaggggcttgtaaatcgtgccctctttcgttaagagggaaactgaggcccagggcagacagtgactcggcaagggtcacttaggtgatggcgcgctcaggcttaggtctctggccccccagggggcagctgtggctagcagcggcggcagtccccgccgggttccgggtgggcggcggagccctcctcggctcggcctgctaggaggggcggggcgcgagggggcggaggcgagggcccgggcggggccgacacaggtgctccgcatccggccggggggcggctccgaggagcggctcgtaggagcttcataagctgccggggtgcggggctgcgcgcggcccgctgcaaaaatagtgcccacgtgcgtgcgcgtctctcgcccgccggctggccggtcagcccgtcagccccgcagggccacaccggccccatggcgttcccgctggtaagagccacccgccgctcgcctgggcggggccgcgtcccggccgcagtagctaacggtccgcgcgcagccgggtcc

SEQ ID NO: 14536 - DNA, 2300 bp, Homo sapien
tgcctgtaatatatagctgctgctgctgatagtgggaagacagtcctaagccccatgatcacaatacagtgtaaggaatgcttttatacgttctgtataggatgcagtaggaataaagaagaagggcttggggccgggcgtggtggctcacgtctgtaatcccagtactttgggaggccgaggtgggcggatcacttgcggccaggagttcgagaccagcctggccaacacggcgaaacctaatctctactaaaaatacaaaaaattagctgggtgtggtggtgcgcgcctgtagtcccagctacttgggaggctgaggcaggagaatcgcttgaacccaggaggtggaggttgcagtgagccgagattgcaccaccgcactccagcctggcgacagagcgagactccatctcaaaaaaaaaaaaaaaaaaaaaaaggaagggcctacacccctattttgttttaaacactgtggaagaacagcagcttttgcaatgatttctgggagaaaggagtgtaaggttgaactccggaagggagaccagcttgcatctgctgggcggtcacctcaggcattaaaacaggcacctccaaaaaaacccttacaaggaacaggaagtgtttcaggtgtttcagcaattttaggtgttctgaaagtttttcagtgtttctggaagtgaagctacccattgcaacacctgttcaggtgtcagatttctgcaaccagagccaaaattaagtgtcccccagatacccatcactggcacaccatccaggctccagtcaagcggcagggaagcaagagctagtggtcgctggggacagtgacttccaaaggtgtggcctccccccatcagggcacctggtgccctttcatagctctgcctccacctctgcctttaggatcccaaccagctgattcgtgccagtgccctccgtgtcctctctagcatccgtgtgcccatcatagtgcccatcatgatgctagctatcaaggaagccgcctcggacatgtcaccctatgtgcggaaaacagctgcccacgccatccctaaactctacaggtatgccccagccctgtcccacgctccccaggaggctggttcctaagttctcaacccacccctggcctttcctaagtcttgcctgctgcttctcagagggtttgaggagggtagtttgggggactgacagagatggaggagaacaataaggctggggtgcaggaggtgagcatggcttggacagatattgggaaggctggggctgagagtggcaaattcccctcaccgatttctccctcagtttggactctgaccagaaggatcagctgatagaagtcattgagaagcttctggctgacaagaccacggtgcgtgtataggggcgctccgggaggggtggtgaccggcagccggccttccacccttcgcgttcaccctctcgtctttgttctttccccagctggtggcgggcagtgtggtgatggcctttgaggaggtctgcccggagcgcatcgacctgattcacaaaaactaccggaaactctgtaacctgctgatcgacgtggaggagtggggccaggtggtcatcatcagcatgctcacccgctacgcccgcacgcagttcctgagccccacccagaacgtaagtgggcccagcccaggcagagcgggccgaagtgtgtcccggggaggcgcccacagacccgtcggtctccccgtccaggaatccctactagaggagaacgcggaaaaagccttctacggctcagaggaggacgaggccaagggcgcggggtctgaggagacggccgccgcggccgccccctcccgaaagccctatgtcatggaccccgaccaccggctgctgctgcgcaacaccaaacccctgctgcagagccgcagcgccgcggtggtgatggcggtggcgcagctctacttccacctggcgcccaaggcggaagtgggcgtcatcgccaaggcgctggtgcgcctgctgcgcagccacaggtgcgctccgcccccagccccgccccctccctcgcctcctgccccgccccacgggctgcccggctccgccccctcacgcccaccagccgcttccacctctgcccacccgctccacactgaccgtagtcctgccctccgcactggtcctctccccgcaacgacttgccccaccttttcccctcatccgctgacccttgccccaaccgaggggcccggggtgctctgacccgtcctctccgcagtgaggtgcagtacgttgtgctccagaacgtggccaccatgtccatc

SEQ ID NO: 14537 - DNA, 2300 bp, Homo sapien
tgagccctgggcagaccatccgacctatggtcattggaaggacccacctcctccctatcccaggcctgtgtaaacgccaggaaggcaggtccctttctccatgcaggccctgactggggcagtcagcaccattaagttcttcctctctgaggctttcctgggtcaacacttcgaggctgtgtagttggagggcagggagcctgagccaggagacgtcttcctgttcaggctgattccccccacctgacgctggtgcggggcccacgttggcatatactgtggccatggagagatcatccactttgagggtgagtgcctccagcagaaacacaggcccaagtctgcggagaggctgcccagccaagccacgccccaccagtgagctggctactcggggataaagactgaagtcccaggctgggggtacgtttctctgaaaatggggtttgggcactcagggtccctgaggtctcaggaaatgggggtgcgggatcacagggcataggacctaagcctggctctgatccgcacccctctggcgatccccgcaggcaagaactcaggaggctgtgggctcctgggaagtttctgggctcctggaaaggcatcgtatccaaacaggggcagcgcccgctgctgcgctcctgctggcgcgtgctgcgcagagtgagcgaagcgacggacgcggacccaccatcctatcactccatgcgcagcaactgtgtgcactttgcactgtgtctgctcgtcccaggtcccagcctggacccccggcaaatagacgggagctccagcaggtcggtgagcgtggcccagctacctgcacaggacccatcccacctcctgagcagactagccaaagcgccttataaacgcgcaactgcaaaatccaggcccttctcttcccactccccacccaggccagttttctccaaattcaagatccacttttctctggcaggcacaaagccaccggaaccaagcggacccacccacttgtctaggttatcccaacagaaccttctcattaccccaatagaaccttaccccagtagaattacccccaatagaacttttctactgagccaagctccacctttctgggccccactccttcccaggtaggcccgccaattctgcccatggagacttcgggatgctagttacagaccaagactcaggccttaggaactcctccagtccccatgcccagctaaaagactccagccacctcaactgatgcccaactggatcctacctcttcccccagcccaattcactactttccatcggatccaagccttccttccttgggcctaggggtcactcgggctcgggagctgaactggagggctcacatgactcaggagccctggtggtcacaccagacccttctcttccttttcaggtgtcaatggacgtggacgtgtccccggattaagcatgaccttggccctcctgggtggacgtggaggcttcagaaagattcattaaactactttccaaagcttaattagatgttcaccgtcctctgtatcctgtttcccatctctctaagcccccaagggctcctcggagctccctgaccttaattccttaaattccgccacctccaggaagctcctcggcttcctgctgccaagccagattttgtaggaaaggtggggcgggaaagggagcgtccttaggtatctgaggccggtcctcgggtgcggtgaccccttcccgctctagaacccccagcctgcgggcacagccttctttccagttcccgctttccctccacggcgtgggtgagcatccgcgcgtgcgtctggggagagcggagccccagaggcccgtcccgccgaggccaggtggtcgggggtgggggcagctattccacatcccctgcaagacggtcccagcgtccgtccagcagactcgcccacctttagatctggagacgagccaagtcgctttaaagggcagaagacgccctgaagagggcatttcctagggatgggcggggccaggccctgacgcaccgcccctgtcgcctcctcgcggacacgccctccgctcggctggcgccggtgcctttaagacctcagcgcgcggccctgattgagaaatccgcgcgcagcctccgccgctgcacactgcagcctctgctgaacccctgccgcgccgccgccttcgccagcccggaccggaccggcccgccttcccttcctccgctccagccggcctccggccccgcaacctcctcctcggcgaagtctccctggccgccccatgtcggccgcccccgcctacag

SEQ ID NO: 14538 - DNA, 2300 bp, Homo sapien
gggttcaagcaattctctgcctcagcttcctgagtagctgggattacaggcacccaccaccatgcccagctaattttcgtatttttagtagagacagggtttcaccatcttggccaggctggtcttgaactcctgaccttgtgatccacctgcctcggcctcccaaagtgctgagattacaggcgtgagccatggcacacggccaccatccctcttttaacaactgacagagaaactgtgcaaaaaatcagtgaagtcatagatgatctgaacattatcaactaccgtgacctaattgatatttatagtataccctactctgcaaaataaacattttcaattacatatggtatgttcacgagagtagaccatatgttactccataaagcaagcctcagtaaatttaaagggatttaaatcattcactgttctctgaccacagtctggggatgtggcaggcatctgagcacattggaggtcagtggaaggagaagagccaggtcagagaggaggcacaagcaggtctgggtaggactgaacaccaggaggattgaggagggggtggtgggggcaccaattacccacctggaccccagcctcagagctgctaggaggaaggagtgctgctgtcagactggcctgggcaatgatgatgaacagggccccagggcttccctcttggtccctttatctgcctgaaggatggacagcttgtccttccttctctagccacagaagaagaacatctagcaaggtgtgagtgtggccactgcaaggtgagctaattgggctgggggctcagattcaagtgggattgctctgtgccaagagggaagggataaccaaaggctctgtatgggaaggaagacgggctgaagcaagctgtgctatggaactgcctactccctgatgcttgttcccgctgaaggtgggcggctaggagcagtgatcccaaagccctgccttccacagaggcacactttgtccaaggttaaactgaagggtgaggagaggagctgataatttaggtttgtcactaaattgggttgaccccactggttggggtcctgcaggggcccggttctggggaaaggccctgggcttcagaaagactgcctgtcaccctcacacccagctgcaggaccaccctcattactttgctctgttgaaagccttagtcagggtgaggggaggaagagctcaggcccccagcaagaagtccccatggggtgggtggcatgatcaggccaggtgccccaggagtgggagtctctgttccctgggctcttacagctccagggccttgcccccttttctttcttacaaagaaaacggtggcttgactcagcaaaaactaagaagggtagctgtttctccaggtcaggaaggatacgggggtcagcacttcctggcagttgagtctggggaagggggacctcacatgccagcagcgtgagaaagatgatactgtacagtggtgaaggacacgggcactggagccagaccacttggcctgaatactggttgtgccgcttaccagcttgtaacctctccaagcctcagtttccccatctgtaaaatgggaagtataacatcatctacttcaagtcattattgttagggctaaatgatgctttagcacagcttttggcaatcaatcattatggatggagcaccatgtgtggacctacatcccctatctgaaggagcatgtcctcatcagaccttgactcaaagtctagcgcctagctgatggtggctgaagtgcctccccacccccaccagcactggggtactttcagagggagagtcggggtggggccctgctccccagggcctttccatctaggtgattccctgagagctctggggcaggggtcacagggaggccgccagcctctgagggcccattgttcttcttctctgagctgggaaagatgtattctccccacccttcctctccacaaccacatctgcatgcttaggggcagactttagataaacaaaccttgccagctagccttacccagctcacagagagctcttactgcctcacaatggccctgtgatgtccagcccttggagcttattgtccctagttcacaggaagttgaggcccagagagaggaaggggctggtttgatgtcccatatagagaggtggcacagccagggctgggtatcccagtcccgtgtcgtgtccagcattttagtgcagactcacatgcacatcaaatgcacaaccatgcaatgacagacaagcagctccacaggaggagtgcacaaccagaggggagagga

SEQ ID NO: 14539 - DNA, 2300 bp, Homo sapien
tacgagctctcttgtgtggaacttttctgatggccaagatgatgggacaggaatgctgacattttactgtaatgggtagaatgcaggggattttctacggagcccttagatttatttccagaataacgtttcagcgtgatgtgtgaatgtatgggaaattctggatggtctgtgttcctcctatcacaccttcaccctgggggtagattcttggctgtaaggcattctgcatgcagaggtggaagggaaggaaaactgtttcatatgtggaatcttggccttatatctcattcctgtactcagttgtctctgatatttcctggttctggacccttctagcattccgtagtgtgaattgtttttttcctggggtatatcttccaccctctgcagtttcttctgcttcccccccgcatcagtatcattccttcatcagctatcttccaaaatttctttgaaatctctgatctactaatgatcttttccccattctcttgtttagatctttatgtttcttttcccattctcttatttatatctttatgtctctttttatttcttaagtatgattttaatgaaacttaggagggtgagatgataaatcatgttttcaattttaacaaggcaaaaacaagctcatcaagcattcactggttgggcgctgtggctcacacctgtaatctcagcactttgggaggccgaggtagggcagattgcctgagctcagtagttcaagactagcctggccaacatggtgaaaccccatctctactaaaaatacaaaaattagccaggcgtggtggctcacgcctgtaatcccagcactttgggaggctgaggtagggcagattgcctgagctcaggagttcaagaccagcctggccaagatggtgaaaccccatctctactaaaaatacaaaaattagccaggtgtggtgttgggcgcctgtaatcccagctactcgggaggctgaggcagggagaatgcttgaacccgggaggtggaggttgcagtgagcctagatcgcaccactgcgctccagcctgggtgtcagagtgagactgtctcaaaaaaaaaaaaaaaaaagaaaagagttcactgattaaattatggtctattcatacagtagaatactagacattcatttaaaatgatgcaagcaggctgggcgcggaggcttacacctgtaatcccagcactttgggaggccgaggcaggtggatcaccagaggtcaggagttcgagaccagcctgaccaacatggagaaacgccatctctattaaaaatacaaaattagccaggggtggtgacgcatgcctgtaatcccagctactcgggaggctgaggcaggagaattgcttgaacccaagaggcagaggttgcggtgagccgagattgtgccattgcactccagcctgggcaacaaaagtgaaactctgtctcaaaaaaataaataaaataaataaaatgatgcaagcagctgggcacagtggctcacacctgtaatcctagcactttgggaggccaaggcaggtggattgcctgagctcagaagttcgagaccaccctagggaacatggtgaaacccggtctctattaaaaatacaaaaaattagccgggtgtggcgttgtgcatctgtaatcctagctacttaggaggctgagacaggagactcgcttgaacccgggaggcagaggttgcagtgagccgagatcacgccattgcactccagcctgggtgacagagcaagactccctctcaaaaaaaaaaaaaaaaaaggccacgcacggtggctcacacctgtaatcccagcactttgggaggccaaggtgggcagatcacttgaggtcgggagtttgagaccagcctggccaacatggagaaaccccatccctagtaaaaatacagaaaattagccaggcatggtggcgcacgcctgtaatcccagctacttgggaggctgaggcaggaaaattgcttgaacccaggaggcagaggttgcggtgagctgagatcacaccattgcactccagcctgggcaacaagagtgagactccatctcaaaaataaaaaagatggaagcatgtatttgtattttgagcatcaataactaggtaagagaagtgcatttttaaaaccaatgagttataaaaattcaaattagatatatatacatgactaaggggtaggggggtccagttgtaacaatggcaagttctaagagataaaatcctaaggtctttgtttttatttctatggacatcgctgtgtcttcttgactcttttataagtagcat

SEQ ID NO: 14540 - DNA, 2300 bp, Homo sapien
tattagaaaaaatgaaagatctaaaatcaattttagctttcaccttaggaaaacagaaaaagaagagttaattaaatacaaagtaagtagaagaaaacaaataataaaaattagagcagaaatcaatgaaatttaaaacagaaaatagagaaaatcattgaaaccaaaaagcttgttcttgaaaaagagcaataaaagcaaaacacttctagtaatctaactataaaaacaattgagaaggcataaattactaatattagaaatgaaagaggggaacatcactacagatcccatgaagattaaaagggtgataaaaactctatgcccaaaaacaaaaacaagaaaaaaactctacgctcataaatttgatagcctaaatgaaatggaccaatttcttgaaagatacgatctggcaaaactcacacaagaagaaacaatctgaataggcctatatctattttttaaatggaatcaataattgataactttcagaaacagaaagtaccaggtccagatggtctaactggtgaattctatgaaacatttaaggaagaaattatgcaaattatctatagtctctttcaaaagatagaagtagagagaatctttcgtaactaattttttttttttttgagatggattttcgctcgtcacccaggttggagtgcaacggtgccatctcagctcactgcaacctccacctcctgtgatcaagcgattctcctgcctcagcctcccaagtagctggaactacaggcacctgtcaccacgcccggctaatttttgtatttttagtagaggcggagtctcgccatgttggccaggctgggctcaaactcctgacctcagctgatccgcccacctcggcctcccaaggggctgggactacaggcgtgagccaccacgcccggcccctacccatcctttaaagggatactccgaatgtctatgaacactcagataaaactgaactaaatttgaatccacttgtactacatttatttgtcaactcttcgtttgtctacttcttgagaactttaacagctgtactgggttggttagtgtcgcccccaaaattcatgtccttcctggaacctcaaaatgtgaccttatttggaaagagtgtcattgcagatgtgattagtcatgatcaggtcatactggagtaaggtgagccttttacctaacaggactggtgtccttataaaacacacagagacagagacacacagggagtataccatttgataacagaggaagagaatggagtaatgcagctacaagcgaaagtacaccaatgattgctggctcccactagaagctaggaagaggcaggaaggattctatccagagtctcagaagaagcaagaccccactgacatcttgatttctgacttccagactccagaaagcgagaaaatatatctgttgttttaagctatccagtgtgaggtacttggttatggcagcttcagaaaactaatacaacagcaatttcaatttctactttatcttcctagccccaagagtaccatgtggctattagagtacaggattatgtaggctctcaaatcccttccatggtaaaagaatgattgggcttccagcagtggccaagaattgccagacgcttatgagcgcctgctgcgagatgcttgtacagtgaatgctcaataaagtggtggccattataaccgcaagcaatgagactacataaatagtaagaaacgaaatagaacaaggggcagcgggagcaaagagagaaacaagggcagctgaggaaggaagcctcaattccccggaggacatccgcgggcggaggaaatgtgaatctgcaagtcgttctcccagaccccgcttaacgattcccggccctttctccactccctacagccctcggacccagcaacaaccggatcctgtgcaggtcttccctgagtccaacgcgattctcctggataacgtcaaccagctgagcgattctgagcctgcgcgaagctcctcggcgcttccagtaatgtcacgctggtgcgtggggcgggacttcctctcacgcgcaggaaacgagaagggcttttccgccggaaagagagtggatttactaggaaggtgggacgttggaggggtggccgcatggagtgagtactgtctctggccaccgagcagagccagtgacagcagcgtcctggtaggcaggcaggcgtatcaggtttcagaggatgcggctgggaacgggagtagaggtgaggggtcgttgcatctgtcgcggtgtgtatcttttgggggttcagcgccaccag

SEQ ID NO: 14541 - DNA, 2300 bp, Homo sapien
cagctactcaggaggctgaggtggaggagctcttgagctcaggaggtcgaggctgccagtgagctgtgattgcaccactgcactccagcctgggtgacagtgaggtcctgtctcaaaaaaaacaagaaaagaattaaaaatggacatctgtttgtgttctctgtgcctggaattatacagctactggaaatacaagctactgtgcttgttgttgcatttttaagttgatacttctgcttatgtcacaatcacaacagcaatcattcctctacataatctaaaatgtctttgaaacatctgcataaagtagttcttaaaagttggtttctgtgggggcttctgaaagcccttctgggggttagtgaagtcaaaactattttcatatgaacaaaagctctttggagtcttcaataactgttaagtggctcttgagaccaacaagtttgaaaattgtttatataggagccaggcacggtggctcacacctgtaatcccagcactttgggaggccaaggtgggaggatcacctgaggtcaggagttcgagatcagcctggccaacatggtgagacccctgtctctactaaaaatacaaaaattagccgagcatggtggcatggacctgtaatcacagctactcgggaggctgaggcaggaaaatcgcttgaacccaggagagggaggctattcatggcttccccacaatgaacatccggttaaatgagctcctcagtacttcagataccccctatgtgatgtgaacagtttttcagtatttgctaatgtatggttttctgggcctcaggctcacttactttcttcacaggcttgccactttcctacaacacatttccatttcataacatgagagagatgactgcaataatgcacaagacacttaagccacacaagcaccaaatgtaagattacttaaaacagctgaggtttgactgcagtgcactctacagaatcagttttctagggtgagcacatagcttgctcagtgaaccccaggccgctctgtgtaaatgtatgtaacaggcaatgaaagttccttcttcacatattgttactacacatctgttgctaaaagggaaatgacagagcgacgtgacagactcatctccatctacaaactatggaagatgtagatgactgacacagttctaactcctaacacacacggattttgcctttcatggatttatactgtatgtagatgtacattaccacccttttcactcctccttgcaactccccgtcaacctcgtaaaaaaagacgaattgtctagcaatgcaaagaaacagtatggtgtacaacaaataattccgggctaaaaatgaagaaatcgcgctttcactctcggctctgttattaacaagctgtataactttcggcctatctcccccatcatgcttcggtttaagctaaaaggagggagatgaccaagatggctttgctctgcttctgacaccaaatgaccgccagcagattcaggaagcttaagaattaccaactccgtgtgtgtgtgttctaaaattaatgcaacaggtgttgctgcctccagcaggcgtcaccgattcagaatgtctgggttctcgcaggcccttatgggacacagaacagcacaacctatgtgaaaactgtaaactttagtctggtgagtgcatacttctcccttccacatttatactaacctcagctccgtgggctacgaagctcgttcttcaaatgaggtggagaaatgtaagcgcgatgaatgaggcccaagtcgctggtggcgctgaacccccaaaagatacacaccgcgacagatgcaacgacccctcacctctactcccgttcccagccgcatcctctgaaacctgatacgcctgcctgcctaccaggacgctgctgtcactggctctgctcggtggccagagacagtactcactccatgcggccacccctccaacgtcccaccttcctagtaaatccactctctttccggcggaaaagcccttctcgtttcctgcgcgtgagaggaagtcccgccccacgcaccagcgtgacattactggaagcgccgaggagcttcgcgcaggctcagaatcgctcagctggttgacgttatccaggagaatcgcgttggactcagggaagacctgcacaggatccggttgttgctgggtccgagggctgtagggagtggagaaagggccgggaatcgttaagcggggtctgggagaacgacttgcagattcacatttcctccgcccgcggatgtcctccggggaattgaggcttccttcctcagc

SEQ ID NO: 14542 - DNA, 2300 bp, Homo sapien
ttctaattataaaattgtcgtgggtggctgggtgcagtgactaacacctgtaatcccagcacttttggaggccgaggtgggcggatcagttgaagtcaggagttcgagaccagcctggccaaaatggccaaaccccgtctctactaaaaataccaaaaaaaaaaaaaaaaagagagagaaaaagaaaagttagccgggcgtggtggtgcatgccctataatcccaactactcaggaggctgaggcatcagaattgcttgaatccaggaggcagaggttacagtgagccgagattgcaccacagcattccagcctgggcgaaacagtgagactctgcctcaaaaaaaaaagaaaagaaaaaataaaattatcctctctctatatattaatatatgtcttagtccattcaggctgctataacagaataccattgagtgggtggcttgtaaacaacaaacatttatttctcatggttctggaggctggaaagtccaagattaaagcaccagcagattcagtgtctggtaaggaagggctgcttcttggttcgtagatacctgtattcttactgcatcttcacatggaagagctctctgggacccccaatgtaatggcactaattttattcatgagggcttgccttcatgacctaatcacctcccaaaggccacatttccaaataccatcacattggggatttggtttcaacatgggaattttaggggaatataaactgtctatagcatatgtatatatatgtatgatggttaattttaatgtgtcaacttgattgggtcaccaggtgtttagtcagacattattctgggtgtgtgtgtgtgatggtgtttctggatgagattaacctttgagttagtagactgagtaaaactggttgccctccctcatgtgagtgggcctcatccaatcgattgaaggtctgaatagaacaaaagcttgaataagagggaattcttcctgcctaactgccttcaagtgggaatatgggtttttttcctgccttccaactcaaatggaaacattggctctccagggtcttgagcctgctggcctttggactagaaccacaccattggctctcctggatcttccgcttactaactgcagatcttgggactttttggtcttcataattacatgagtcaattccttatgataaatctgtttccatatatgtatacattctattggttctgtttctctggacaactctgactattacactgtgtgtgtgtgtgtgtgtgtgtgcgtgcgtgcatgtgagagagagagaggagagagagattatactgttatgctggtctgtgggctcagcatcaaagtaggaattttgcaacacacccacagttaacactcacttttttcctcaacacctagactctttcaacttcttaacagagtcagaattttggaagaaaagaacattaacactaaattgtcattttataaattattaaactaaagcttagagaaatagtcaatcatagtccataaggaatgtattggctggatagtcccatttctatgccataccatggcaagtaaaaaaaaaaaataataatgtttgcttaaggcttatatgggaagtgtgtcctgtgctttgattagaaaagtgcccccaaaatgttttttaaccttgtatggttcatgagcacctctgagaatctattgaaacctgtgagttctcttcccggaagtgattctataaggacacagacataattttgcatataattttagaaactcattcacttaaaaaaaaaaaaaaggaatcttcttcctggtcttgccgtgacagtccccagccctctccacatgaccagccatctgagacccatggtagagccacaagtctaaaacccctcacagcacagaaagtaactcagagcacggcatgtgacctctcctggtgacacttgagtagtaagaagtggcaactcagccacagcaggtctatatttggaccttcactcatggcaggcctgttgctatttgtggctgcagccagctcatgttaccatccagctttggtgccccacttgcagaactctggtgtaaaataggcaggggtagcctgtggggcatgcagaggtcactaggaaggaaagcctgctgaacacagattcaattttctagcagaactccaggtcctctgagttaaaggaagcatttatggacgcttagcaggcaagttttggggtagtcatattcttccaatgcaaattgtattattagaaactcaatgctgcaatattaatgcaatatctttcctgtaggtgggaa

SEQ ID NO: 14543 - DNA, 2300 bp, Homo sapien
aaggcaagccctcatgaataaaattagtgccattacattgggggtcccagagagctcttccatgtgaagatgcagtaagaatacaggtatctacgaaccaagaagcagcccttccttaccagacactgaatctgctggtgctttaatcttggactttccagcctccagaaccatgagaaataaatgtttgttgtttacaagccacccactcaatggtattctgttatagcagcctgaatggactaagacatatattaatatatagagagaggataattttattttttcttttcttttttttttgaggcagagtctcactgtttcgcccaggctggaatgctgtggtgcaatctcggctcactgtaacctctgcctcctggattcaagcaattctgatgcctcagcctcctgagtagttgggattatagggcatgcaccaccacgcccggctaacttttctttttctctctctttttttttttttttttggtatttttagtagagacggggtttggccattttggccaggctggtctcgaactcctgacttcaactgatccgcccacctcggcctccaaaagtgctgggattacaggtgttagtcactgcacccagccacccacgacaattttataattagaaagattgacagtttccgcttgaaaaaccaaatagataagaaaactaacagaaataacacagtataaagcagatagtaaaaagatataatgtgaggaatatacaagaaagatatttaaaacagactgttaaaaatcataagtaactcatattagttaaaatagtatattaaaataggggaaaatcaatcacttcagctaaaagtttatctctccaagaagactgagtgactgagtcccagggcccaatccccaaccctcacaccggcagcaggcataaaaggggagggaccttcagacaaaggcacctttccatcttcaagttgcattccacagaggttcctagatttcttgaggtcattttcaaggcagagagatgccctaactagagctttagcttcgccctgattttttcgtttgcttattgtttacccttggggataacagcaagtacaaaatctgattccaacttttcccagctcaaaaccttcacaaacactttcacttgttcccgaatcaacacctcacaggccttgctttggcaaacggctcctgatcccagcttcctggcatctccctcctttcctcctcccattcccaccacctgtctcagtgcactcccaggatgggagctgacatggactgtatttctcagtctacactgcacatttcctaggcagagactagggccgtcttggtgcttgttgcatgaacagatttagctccaccctgacacgtaaactggatttcctgatatctccttaaacaggccttccgtagccaggggggcatgtcgagcccgagtgtcggtgtatcttaagtttgtctgggcctccgtttccttaactctaaagtgaagagttagaacacagattgtatttaaacaccctggttgggagctgcagtgccctgaattccccctcttactccaccccctcaatactgacacacagccgacactcaataaaagtttgttgaattgacaaaaataaatttgcggcttcttgcccagtacttggcacttagaggccctcaataaatgactatcgagtttatatttcatctccccaacgcatttgtgacattcttaagggcgtgaaccatgtactcaatagggccctgatgatagaaaagaaaatcagcttggtccctgttctcaagttcatagtttagtgtgggagactaatacaataactcgccgattcaacagatatttttccaacgtccgtatgtattgggtggaaaaggtgaggcaagagttgtatttcccagactcctgaacaggttgcgagatgattgactcctgagggagaccttctcaccttttcattggttgtcgctggccctctcgtctatcacccaaccaaccccgaatgcctcttgtaagccccacctccggcagccagccaatcagaagtgccgggggccagggtgctgctggggcactgacgcggtttcgattctagcgaaaaatgatttggctcggactgtcccgtgacaggcggtgcgaggaggccaggcccgcgcccgccgagccctagggccgctgctgccgacagccatggaggacgagcagcctgacagcctggagggctgggtgccggtccgggagggcctcttcgccgagcccgagaggcaccggctgcgcttcctggtggcctg

SEQ ID NO: 14544 - DNA, 2300 bp, Homo sapien
gaagggatccaagggcaaccagcccatctcctcaggcctcactcagatcaaggaattgtttggcaatacagaagattactttttcatgtgtgggtgatatgaaaatgggaggggtaggcagatttaaaatgacagaatcaggcctcctaagctcccagcgaaactggaacaattagttaaacgctaacaagttcatcccaaattgggataaattactggttttctagtccaaaaaagcccatatggaggtatgcacttgcatggggtgataggaaagtctgtgtggcttaaattttgggtaaaagaatttaagaattcagtttccttcagtttaatgagccacctgtgtgacgaaagctcatgggcttttgggatgtatggacagcggccatacacagaataagggagttctgtgtttaccaagaagtgccacccttgaaggggacatagccaatttgagcacatttggaagggaggaagtaggagagggagaaaactagaaataaaatcatgtgatgcatgatatctattgcgatcaagaaagttttttgaatatctgaagggctgtacaaggtaaaggatttaatttatcatgcgtggacaggctgtatgtgcaatataaggcagaactcggccaggcgccatggctcacgcctgtaatcccagcacttcaggaaggtgaggcaggtggattgcttgaacccaggagtttgagaccagcctgggcaacaaagtgagaccccgtctctacaaaaaaacaaaggcagaacttaacagtccagagtcacagtgacatgctgcagccgggatgccacagagggcatccttgggtggttcagggaaccccagcatcagggatgacctgatcagttggatggagatcagttggatgaccactggagtttagccctctggcccattttctgggattctaattctgctggcatggtctctgacagaaggctgcaggacggcagctgcatggctgtgtctgcatcagggaggtttgggggcttgtcgccatgacattgctatttgtcctgaaaggagcagaaagtgagggaaatagaaatactccttgagtttatcgtggattgcatggggtgtgtgtgtgtgtgtccttgagtttatcatggattgcatggggggggtgtgtgtgtgtttaggtttgcattgataggatcatattgaactcatcctttgccagtttctttaacttaggtttttgagatatattcatgttaatatgtatagagctagttcattttaatgagttcatagtattacattttatgttttattggctaatcagtgccttctttagggacttcctctcaagattagctctttgtagggctaggtttttctatatcaaatgaatacctgaaagaccagaactttttcaatttacattttttaaattatgaaattaactcttaagcctaaaagtaagagaaaagaaatatccacaggctctgttatagcttccacttggatgtcgactgtgctggcatttttcatagaacttttctcatttttaatcataatacatactattttatatctggttttcattgaacactatcatctgatttttttctgatgtttcaggcgttgtactatttatcactttttatggctttttttttttttggagacggagtcttgctctgtcgccggctacttaatattttgaatagatttgtcataattttttcaacaaatatcttattattcgtattttagcatttctaattttccatactaaaagttgatgactattttcctctatatgtatgctttcatatcttcattttattacagagaaggtaatacttgatcaaaggatataaatgcttatcttttttttaatccatgaaaaatgggttcggtagaaaggatggctgtacaaacaaggagtcactttgtgaattagaccatccatgcatagaaacggatgtgtttatagatttctagaaagtttcagcattttgatggtttgcacttgtggcagattgctcaccatggtttttcattttcagaaacgcctagctcaatctgtccgaaacacctctggctcagaacctgtggctccaaacctgccaagtgatctttcccagcagatgtgcttgccagcttcccacgcggtgtcagtaattcacccgtcctctaggaaaactagaggtgttcccctatcggaagctggtaatgtgaaaagccccaagtgtcaaaactgtcatggaaatatccctgtccaggtttttgttccagttggtgatcaaacacattccaaatccagt

SEQ ID NO: 14545 - DNA, 2300 bp, Homo sapien
cgactgtgtatgtgcgcacgcgtgtgtgtgtgtgtgtgtgtgtgtgtgtgtgtgtgtgtgtgtgaagaaacagcaaaaggggaagtgggagaaacagtaaggaagcgtttttaattaaaaatatgtatacctaagaggagactttattttctatttctggtggtggtgatctatgttctggaatccatttaccagaagtttgtggatcttttgtttgaagtggaattgttcagtgccctactctctttgacggtgcagagccttgcggcaaagtgttctcctgggccctagagacccccagggcacctggcaggagcccgtaaaccacggcagagtcccaagtggtgcatgttttggcgagtgatgggcaggactgatgattcacagctgtgaggctgtgctattgtttttaccctcttgtactgcttttaataggaagtcccgactttacgtcagttgtgagagcagcgtcttatgatgtgacaggcaagaagacattccttgcatcaaatataagagtttaatgagaagagtggagtggataagtgaactctcccaagagtactgttttttgtttccctttttaaatgctttcttggtacataaataatataatactttttttaaagaaattccagatgagtgggaaaaaaaccaatcacctgttattacactatctgattataaccactgttaacatttcagtttttatcttttcagacttttttctatgcatctgtgtgtgttttattactttttccatgaaatataatcatattatacatactgttttataacttttatcccttttaatgctatattgtgaatagatttctatatcagtaaatatgtaattacattatttttaacctctatgtaggttgtaccttggatacttaggttgtttccaatttttttactgttgtagtcaaggacataatgaagttcttctaacatccttgcgaacttttcagaatattgacttagggtaattttctgaagttatcactggctcaaaagtacgcgcctccctatctgcggctcctttccttctgaggcatacaggacttcaccctccatcccccttgtactcattcagggtcctatgactaattctggccaatgaaatgtgagcacaggtgacacatgaagctccagacagacactgaaatgcccatgagcagttccgcagtgtctgccttcccttccctcagcaaatgctgatgtcccagggacagagcctctgtcaagcctggatccctgagtgactacgtggagcagcccccttctcccttcatgttaccctcacctgccaccctgcatggacgggtagcatgaataaaaaaaataaaccttaggtgttaaacactggggtttcagggttaattggttaactgcagcataacatatcctgttgcaacaataaaaaagaatgcacatttttaggacttgtaatatgtattgcctcaaattgccttccagaaagacagacccaattatactcccacccacagtgtgtgagtgtgtactgcttcctctttaacactggagttaccctggggacagagagctaaaaaaaatatttttttggttaaaatgtaaccctttaaggtgttcagcagtatcattgatttctaagaggtttatttcataaacattgtaaaacaaaattttaagttgcacgtatggctttttaaaaacgtttagacatttaaaaaaacaccttttagtcaagtttatctgttacttttttttttttttttaatggttgctacctatgccgtcatgcttatgcaggtctttccaattcttttttttttttttttttttttttttttttgagacggggtccaccctggcccccaggctggagtgcagtggcgtgatctcagctcactgcaacctgcgcctcccgggttcaagcgattctcatgtgtcaacctccctcctgagtagctgggactacaagtgtatgccaccacgcccaggtaactttttgtttttagtagagatgggtttcgccatgttgcctaggctggtctcgaactcctgaactcaggcaatccacacgccttggcctcccaaagtgctggaattacaggtgtgagccaccaagcccggcgaggtcttcccaattctgatggcaaggttgtataaatattcaccactatcttattcttgtacttttattatttctttctaaacagttaaatctgtgatctggctgggcgtgttggctcttgcctgtaatcccaacactttgggtcgccaaggtggaaggatcacttgagtccaggcat

SEQ ID NO: 14546 - DNA, 2300 bp, Homo sapien
acaccttccgctggggtcttcagatgacctctgcctttatcaggtgacttatgaatctagaaagagcccgcttgactgacaagagaatgctcaggtgacatgcatagaatagttactgaagccacttgtacattctgatagcagtgactttagaaaactccagaagtggaggtgtagaaaatgttggaagagccatttccacagtgggctgctgtgcagttgagacccatgatcccagttcaccaagcactgaagagtgtggtgagcatcctgtgggcagcaggtgaggaacttggattcctcctgctgtgtgtccagctctacagctgttgcaaccctggagctaagagtagtaaggactcccttaaagggaaaggtaagttgggcttggccgtgaaagcacaacagcttttacaaaagcactgaactttccattccttctgcttttctctgaagatctcagtgtcttttcatttactttcttttaaaatagtggccctggagcaacctggacggtgttcccttgagctggtgtgacgtgccctcgtttattctgacatccagcccagtctcagtactgttgtcataaccttacgccagactcaggcagaatgtaagccattcactcgtgagcatcgcagccgcttgtgctgcctggaagctgcagggccaggactgcattttcagtttgcaattgaggtctcctgattttggtgtttccaagactggctgctataccttgataagctttccttctgcctccatgaaacctggtgtctaaaaaagatcaactaaaacttggaaccctttaaccaagaggacctttaaaaataacctttcattccagtcaagacccagctggatgcattttaaagttgggagtggcgaggaagccttcctagtgccgcccggggaatgtaaaaccaccagagcaacaggttgggacagtatggtcaggccttggagggaaagagaaccagtatccacacaagacctcgaacttgtgtggcccctcagtttcatctctcctgcctgccatcacattagactttaattgggtgagagaacagggcagagactgtcacctgcattttgcagatgggaagtagagacagagaaagtgacacgcccagggtcacccagcggtgaccagcagcgtggactctgcatccaggtctcctggaccttgatgcagtatcttttgagacatgccactctagtccctttggtgacccgtgggtgccaagagaaaataattcttatatcctgataagagcatattacaattatattatttcaatatgtgtccacagcaaaggacagtttacaaaaatgtgaatccgaatgacatttaggaatgtttgttataaatgataagttccactttggaatgattctggttttgcaggaatctttccaagaaagttggttaaaatgatgtctctgcctgtgaggccagttctatggaaaacaaacacaccctgagttctttattgatggctttagtggaggcagagcagtatgttcaaaacaagtgggaggccctgagatcgcaggaatggaaacagagttctggctgggggtggcctgtccactgcccgccccttcctggagatgcactcctttctggctttctggggagggagcagccttgctcagtggtgggagcagcttgaacgggacctgatcaacacccaggaagactgtgcacagagggcagttggtctccagcctgcaggctccatgagcacagccttgatggtggtgggcaggcgcctgcctgctgtggactacatttgatgcaaaacatcaagtaaagggtggagcgtaatacagtgaatatgcctcccagaaacatcatgctctgcctattttaacagggctctttttctttagaaaagtctccttctctatagaaaccagggacaattttggatgagagccaaccacaggacgcgctggggacgttatggtgggacctcacatgtggccaggtgcacctttgggaagaaggcagacgtgatgtgacttagcacaggcactcaaaagaggcagccactggtctttgctaatatccagaagtggattgtttgttccattcatccttctagaagctaaattctttcattgccttgagacatcactagattttgaagcacttgcaaactagaagcttgcaagatcaatgtccatgtatatttttaaagatatgcatgctttaaaaggaccctaatttctgagtacatggcttccccaaagaaacagtatatattctggagatgatgggggttttggcatgg

SEQ ID NO: 14547 - DNA, 2300 bp, Homo sapien
ggtgacagagcaacactctgtctcaacaacaacaacaacaaaacagaatgatgtctgaatgcctgcctggcaagtgagaggataaacattgttttatataactttttgtttctattttatatcgatatacctatagacatagtatgtatgtgctgaagtatgtaccaggttgcaggttgtagtgtaaaatatatttcttactgtggattgtagtttaaaaaaatgaaaaactcggccaggcacggtggctcatgcctgtagtcccagccctttgggaggccgaggcgggtggatcacgaggtcaggagatcgaaacatggtgaaaccctgtctctactaaaaatacaaaaaaaaaaaaaaactgggcgtggtggcatgcgcctgcagtcgcagctactggggaggctgaggcagtagaatcgcttgaatctgggaggtgggggttgcagtgagccgagatcacgccactgccactgcactctagcctgggtgagcagagtgagactccgtctcaaaaaaaaaataataaaaataaaataaaaatgaaaaactctgatttcagtggcttgcctttgaagttattcgaacacttcagaatcctcaggtattacctgataaatgacttgttcagtgttctacaagctcactttcctgatattgctgattactatgcatggaggatttggaaactcccaagattattttattttttacaaacttattttgtatttatttatttatttttttgagacagtctggctcttttcaccaggctagagtgcagtggcatgatctcggctcgctgcaacccctgcctcctgggttcaagcgattctcctgcatcaagcctcccgagtagctgggagtagctgggactacaggagcacgccaccacacccggctatttatgtatttaattaattaatttatttattttttgagacggagtctcgctctgttgcccaggctggagtgcagtggtgcgatctcggctcactacaagatccgccttccaggttcacgcgattcttgtgcgtcagcctccggagtagctgggactacaggcgcctgtctccacgcccggctaattttttttgtgtgtgtgtatttttagtagagacggggtttcaccgtgttagccaggatggcctcgatctccagacctcgtgattcgcccgcctcggcctcccaaagtgctgggattacaggcgtgagccaccgcgcccgacctgtcccttgacttttttactgtcctgagatgccaggcttatgtgggcggtgtgttcccagcagaagatgatcccgtggaagtcccgggggatgaaggttaggttagtcccagtgccagcctttggtagaaactcaggacctgataggtagaaaggcgacgaagagagcctgctcttcttcaagttctacttttgccatcctaattcccctcgctctaaggataaaaccaagcttgatgaagccgccttaaaactgccccttcaagtgggagccctcatctcatttttatccaggaaagagcccagagcatctgccgcggcctgtaggctcttctctgccaggctggcttccgaaatttcacggtggcgggtaccttaaggccactcggccgggcaactggcaggaagatgaaggtgggctttaaggaggagcacagctatgcccatctcagactctggagacccgaacgaactctaatctgaatgtgtgaccttgggcaaatcacttaccctccccaggcctcggttcccttatctgcaaagtaaaggtagccctaaagtccccgccaggtgtgaatgggactttaagtccatcaggcaggatgttgatggcactgcgccagggccccgggtcggcgtggggcgggggcgcgccaacgcggggccggcaccgaggactgggtggcccgggagaaaagcggcgactgcgcggctgcgcgggggacggtgcacacagtgctgcgccccccgcctcttggctcgctgccgcggcccgggggccacgaggttacgtaaggagccgggcgggggtagcggctggggagggcggggcgggcaccgccccagcgcggccgcccagcccccgcccgcccgcgcctggcggcggtggcggcagtggcagcagtggcagccgcgcagccccgcggaatggagcggcgccggggctgagccgggcgcgcacgggccgccgcatgtgccgcgcggggagcggctgccgagcgggcggagagcgagcgcgagaggccccgtcggagcggccgccggagcagcgccggagatggggtgagtgag

SEQ ID NO: 14548 - DNA, 2300 bp, Homo sapien
gcctcctgggttcacgccattctcctgcctcagcctcccgagtagctaggactacaggcgccggccaccacgcccagctaattttatgtatacttagtagagacagggtttcaccgtgttagccaggatggtcttgatctcctgacctcatgatccacccgcctcgacctcccaaagtgctgggattacaggcgtgagccaccgcacccggccttttattcaattattgtaaccttggttgttacacctcttacctttactacccaacaccaagactatcctattccctcatccatactatcctatatacttttgctaggttaatgtttctaaaacattacttggaatattcatagttctatcattcattccacaaacatttattcagtgctaacgtcatggaaaaagcacaatgtggggctgggctccacggctcaggcctgtaatcccagccctttgggaggctgaggtgggtggactgcttgagcccagagttcgagaccagactgggcaatactgcaaaattccatctctacaaaaaatacaaaaaattagcagggtggtggtgtgcacctgtagtcccagctctccggaggctgagctgagaggatcgcctgagcccaggaagtcgaggctgcagtatgccatgaccacgtcactgcactccagcctgggcaacagaatgagaccctgtgtcaaagaaacaaacaaacaaacaaacaaaaaaagcacaatgttatacactccagaatgtagaaatgcattagataaaggcctgtttacagtttaatagggggaaagacttgcaagtaaataattttagttcgaagttagaaagtggtaataactaaatacatgaaattccagaaatatgatggactctcaatagaaagaaaaattatttctaggtagagatgtcactttctaaagctttaaataatggaaagaatttcaacatttggagatgagggggagagacaggtatttcatgcaagggacatgagcaatctataaaaatgtaataatttatgcatgacgtacttcacagggtctggtttaccactgactgagggagaatggaaggggaacagcagaaaataaaaaaagttttgaatccaagttaataaacttgacctttaatctacaggcaacagagagccattggatcagctattttggatcacggtggtgcttgaagatggctacacctatagcaggtatatgtaagataggctagtagcagagtgatgctagaggcaggacatcaatgagaaaggtactgcactgacaccgtgcaggggatggtaatgagaacgttgattaggtgggggcagtgggtaagaagatgcaagaattactgtaggggtacaatcgacaggacttggcaagtgattggagcatggaaaggcaagaaagggcatcaaatctgacatcaaagtttccaagttggttgtattaacaaaaacgggtgcatagcctgggaagtaatttgggagggaagaggccaagctttgtcgggatattaagtgtttatacatttgctgaacatcccacaagacatgggcaagactcttggaagtagctggatactgacgactgaagctggagcagagagggggtatgtttctgcaaaaccacatacaaaacggactacggaaatcttactaccgaggcttgcccaggcaggagagaaaggtgtagcatccctgaagtcatcagtcgtgtctactcttcaccgcctgctctcacctcacgttccccacgaagactccgggagcaggcggccggaaggagcccttccctcccttctccggtgattcccagaacttccgtctctacccgtcacctgctcccaatcaaaggagcttaatagacggcgacgttttcgactgcccagccaccaggcaggctgaaagtgcatggagggcatcatccacctttagacagctacttgcccacacctcatcgagctctgggcgttgtgccagcatttgaagaagcgatctgttgcaaagcgatccacacggagagccttagttatcgcgagacttgacaggcaccctcaactttagcccgccggaagcggaagtcaggtggttgtcggattttagaggaaggcgctcggttacattggagaactggagtggtctggagttccacggtgtagtggaccagaggccacctctcctgggcttctcagtgtctcgccggcggggttcggcctgagctggattgacatagcccttggcgggtgagtcgccccggacgcccgggaggagggagcggggcggccgagctgg

SEQ ID NO: 14549 - DNA, 2300 bp, Homo sapien
gggattacaggcacgcgccaccacacccagctaatttttgcatttttagtagagatggggttttgttggccaggcgggtcttgaactcctgacctcataatccgcccgctttggcctcccaaagtcctgggattacaggtatgagccactgcgcccagcctttttttttttttttttttgagacggagtttcactcttgttgcccaggctagagtgcaatggcgcgatctcggctcactgcaatctctgcctctcgaattcaagtgattctcctgtctctgcctcccgaatagctgggattacaggtgcacgcccgctcgctaatttttgtatttttagtagagacagggtttcatcatgttggccaggctgatcttgaactcctgacctcaggtgatctgcctgcctcagcctcccaaagtactgggataacaggcataagccaccgcgcccagcctgacactcttatctttcaggctattgctcttagtatgctttatcaaataccaaatatcagactttcaatgtgtctgggattggcaaactatatcaaattctcaaatccaaggaatgagttttaaataaattcagctaattaaaaatcatgtctagaattctagtgggatcacagaaatcactaaaaagatgacccatacctaatccagatgggcagtaaaaatcataaggcaaggaaaaggtgctactccatttttatgttctcatatgttctcccacgactccccacccatactcatgtaaacaaatatcaactgtattattactgagaacgaaatttaaatagaatgttaatcgacccaagctttacttaccccaaaggtttgaggcagctgtactgcttaatgtttaggttgtttaaatctgtgggaggaaaaaaacaaacttgactttatttaaggaaactctcaaaaggtgtttgtaggggagggtggcgcataagagtcttattcaaggaaagaattggagtaaaagtgctctaaggccaggcgcggtggctcacctctgtaatcccaacactttgggaggccgaggcgggcagatcacgaagtcaagagatcgagaccagcctggctaacacggtgaaacctcgtctctcctaaaaatagaaaaaattagccaggcgtggtggcatgtgcctgtagtcccagctactcgggaggctgaggcaggagaatcgcttgaacttgggaggcggagatcgcgccactgcactccagcctgggcgacagagcgagactccgtctcaaaaaaaaaacaaaaaacaaaccaaaaaaacgctctaaagacttccaaagctaatattccaaagagggaactggttctcaagagcaagaagctacaagatttgtcctctgggccttcaaaagcaaaatagttcaagtatgaatacaaacttcataaagtatgtatgttcttttagggtaagcctttcagatttgtacttgaatactgctaatttattcaccacaaataaaaccacaaagaactttggctgcgggcgactaaccctggaaataaccaaccagaatggggtttcgctgccctgggaggtgagcccggggaacagacgaagatgcagactgaaaacaactgcgttttccagtccgtcctcaaggcacatcacagcttgcttaccaaggttctggcagatttgctcccttccgaagcaccttatacctccagaagtgagggaaattatgggccgtgagaagtaaacgggcttcggtctagcaaagagtacagatcaccgcacagggggaggacacctcgctggccacccagctcggccgccccgctccctcctcccgggcgtccggggcgactcacccgccaagggctatgtcaatccagctcaggccgaaccccgccggcgagacactgagaagcccaggagaggtggcctctggtccactacaccgtggaactccagaccactccagttctccaatgtaaccgagcgccttcctctaaaatccgacaaccacctgacttccgcttccggcgggctaaagttgagggtgcctgtcaagtctcgcgataactaaggctctccgtgtggatcgctttgcaacagatcgcttcttcaaatgctggcacaacgcccagagctcgatgaggtgtgggcaagtagctgtctaaaggtggatgatgccctccatgcactttcagcctgcctggtggctgggcagtcgaaaacgtcgccgtctattaagctcctttgattgggagcaggtgacgggtagagacggaagttctgggaatcaccggagaagggagggaag

SEQ ID NO: 14550 - DNA, 2300 bp, Homo sapien
gggccaaaaaaaaatttaattaaaaaaaaaacttcttagctggtgaatccaggcatctaaagtaacgtaactataggccaggcgctagctcacgcctgtaatcctagcactttgggaggccgaagtgggtggattgcctgagctcaggagttcgagaccagcctgggcgaaatggcgaaacgcccgtctctactaaaaatacaaaaaatgggtgtggtggcgcgcgcctgtagtcccagctactctggaggctgaggcagggagaattgcttgaacctaggaggcggaggttgcagtgagccgagatcccgccactgcactccagcctgggcgacaggctcttcccatccccctgtctcaaaaataaacaaaaataaaataaggtaactatagattgggatcatagatgatttcacggtctcccttaactgtctaccgctgggtgagttgcaatagtcagccctttgccattctcaagagtcccaatataccttcaacacctcccccgccttagttaatgaaagaaattccacctcccatcaccaaacctacaaacacagctacatgtccacctaagctttcccttaggaaggaaggagtgtctaaggcctcctgtagagaactcaatctctacttgagctcagatcctacctcttcaggaaccgtcctctgctgtaacctctcttctcctggctctttcctaccaatcttcaaatatgataaaaataagtctctgaatgtcatgtgcccctccagataccaattgctccttcacagtgaagtcactggattattctctacaattatctccatttccttctctccactaaaactgctgtagcccgggtcaccaccaccaccctgatttctaaatcttgtggccacttctcagtcgttacatgtgacatgttctctccagagtgttcatcactgttgatgttccctcttgaagcgcccttctttagctgccgttacaccgtactcctacctggtcagtgtcctttggtgacttctctacctgcccttgctgttctaacctgggccctcgtgctctttacacactctctcatccatttccatagcttcaattgccatctgctttcagaagattccagaatctctatcaccagccttgatttcgcaaactccagtcacatatattcagttacccctttaacatttgtatttggatgtcctgtgggcatctcaaactcattatgtccaaagctgaactcctcacctcggcctcccaaacctgttccttgggccccaaacctgggcatttccttgacttttcccccttattcgcacatgcagtcattcccaagttctgatcatttcagttcctgaagatccttgaaatgatcagcgctccaccctccctgcggttactctagttcaggccaccctctcccatttagggggcggatctccctgtctctggcttttcctctgtcggccacagtgcagccggtgtctttctaaaacccagcaaattgggctgctaataatcccttgcttgaaagccttcagtgactccatgatcttgcctctgctgatttgtttcatgtctctccatatcacatgtcgcagtgtatttcctcttcttttacattgtgggatccgctgcgcctggcacaaggtaggtgcgccatcgatacgtggaagattcacaagggccaagccgccacgaggctctatatcgacttgatggccacaggcagcgcgtgggactctgcatctgctgcttggctgtgggagcgagaagacacctggccctgtgcactccttgccgcgctctccaattctgagaagtgacaatacctttctttccccgattaggaaagaggtgacacaccttcctatcagctgagcagggtgggccaagacacggtgaggcctcagctccgcagctccacttcctggggctcggcccgttccagaacaaaagagactcgcgcatgttctgcggccacgagactcgctcccgccggccttaaggtgtcgccctctggccagagcggatgcgccgggcggtggggccgctcctgccggctacctgcgcaagcgcagagggctcttccggcgccttcccaggcggggatgctgcggctccgcagcgggctgaggcaccttcgggcaacacccaatactcggggctccgctcggcttctttgcgccgagatgcctaagaaggctggtgcgacgaccaaggccagtagcaggtcccgtggcggcagaggggtgggcctcaggggtacttgttgaagagcgcgggagaagcggggcccgggagtgag

SEQ ID NO: 14551 - DNA, 2300 bp, Homo sapien
gtaaaatggaccaatcagcattccgtaaaatggaccaatcagcaccctgtaaaatagaccaatcagcactctgtaaagtgcaccaatcagcattctgtaaaatggaccaatcagcaggacatgggcggggacaaataaggaagtaaaagctgactccaccccccccacccccgccggcccctcccctcctgcccccacgcccagagactgcaaccacccgttggggttcctttccatgacataagggctttgttcttttgctcttcagaagaagtctttgggtccctgccatcttaagagctataaaactcatcaggaaggtccacagctccattcttgaagtcagcaagaccacgaacccaccagaaggaacgaactctggacacactaaaaatacaaaaaaaaaaaaaaatcagcaggcttggtggcaggtgcctgtagtcccagctactcgggaggctgagacaggagaatggcgtgaacgtgggaggcagagcttgcagtgagcggagatcatgccactgccctccagcctgggcaacagagcaagactccgtctcaaaaaaaaatttttttagagacaagtggagaaacaaatattaactgtacattaaatattatacataggaccaggcctggtggctcatgcctgtaatcccagcactttgggaggccgaggcgggtagatcacgaggtcaggacttggagaggagcctggccaatatggtgaaaccccgtctctactaaaaatacaaataattagctggatgtggtgacacgcacctgtaaccccagctactcgggaggctgaggaggagaatcgcttgagcccggaaggcagacttcatgccattgcactccagctttggcaacagagcgagactccgtctcaaaaaaaaaaaaatcatatatagatgatttgatgatatggttaattttgttaggtgtgataatggtatcattagtagcatgatgtccctttgtctttaggaattgccggctggcaatggggaaggggttgtgcatccactatttcagcccctactactttaagtctcttcccaagcacgttcctctcccaaagaagttaccattctaaatgcctaacagctggaagtcccctctggtggtttcacaagtggagtgattttacaggagaaacccaggtttggggtttactatttacttgacggcatttgtaatctgtaaggctcttcctgcaaagaacaggtgtttccaactatacgtgcctggtcaaggactatttcttgggttttctacgttctgcttttgacagctgacttaactcagggcctgcctcactgaagggagaaaaaggaaggcctcggtcccccaatcatgatgaccgggttgtaaatactgcctgggaagggataatacagccttttccattgtgtgtgtgttttagtttttaattttttaaatttcaagcttaggcagtggttcagtgcaaggactgaaaagcgctacaagagaaggtgggcaagcacgaggggtttcaaatacaggggtggaagcagtagaaggaaatgtctcttaggcccagaggacggaaccaaagggtcaattagaagggaaagggacctgcggacctggggagaggtcactggggttctaagccttccacctctgcttccggaatttccacgggtttcgcggccttctggagcggcgacttggccacgcttggggtacagggttgtgggaagtcatgtcatcccctccctcacgtgttcccttggccatactttcctgcccctccacttccaggcaaaacactcctcgggacaggccttgggacatgtcccagatacacaatgggggcgctggacttggtgataaggggcctgcaggaagaaaaaggcagccgtgagagccgcctgcagatccacgatgcatcttaaaattacaaattctcaggccctaccccagacctactgagtcagaatacccagggcactgagccagggggtgggtgcccgtaggcccggcagcacccagcctgcagaagctccacctccgggagcgctgagctaggaccagctccccacgcccctgccctggggctgccgggagtccagtcctgttacacctcccgcggccgcgcacagcggcaacccgggcgtgcgggggcgcgcgcggtcagggaggggcctgcggaggcgcgaggcccccggaagcgcctttcccggaaggcagggaggcagcgccggcctccggaggcggcctgggcgatggcggcggagttttgtccataacgtgggcaaccgcgcagctgg

SEQ ID NO: 14552 - DNA, 2300 bp, Homo sapien
aaaatcatgtaattcccaatatgtatatcacaataccttgaaactttgccatgtcacttgggtcccttgtgggctctgagggagcagctctgagactgatgcaacaaggttgggtgttgatggaagggatgggctggcttgggagcctggctgggagctcagaggtataggaggaagtgtctcttgtcagggaggaagtaggagtttaaggagagtggtgaaggttaggggtggaagagggtgatgtgcaggtgacaggtgaggacacctcttggagaaactttggatatgtcacagtgtgggccaaggcttaaacgttatgcactcagagctggagaagccttcaagaagaactaggatgaaggattaggagaactggcatttgaaaagtggagtggccctggagcaggccatacctcctcgtagctcattttcctcatgtctaaaatgagccaaatggtcttttagaggctaggtgcggtggctcacacctgtaatcccagcactttgggaggccgaggagggaggatcacttgagcccaggagtttgagaccagcttgggcaacatagtgagaccctgcctctacaaagaagtggtgcgagactgtagtcccaggagctaaggaggctaagctgggaggatggcttggcgtgggaaagtggggactgcagtgagccctcatctctccactgcctctagcctggtttgcagagtgagaccctgtcttaaaaaaataaaaataaaaataggctgggcgcggtggctcacgcctgtaatcccagcactttgggaggccgaggcgggcggatcacgaggtcaggagatcaagaccacggtgaaaccccgtctctactaaaaatacaaaaaattagcccggcgcggtggcgggcacctgtagtcccagctactctggaggctgaggcagaatggcgtgaaccccgggaggtggagcttgcagtgagccaagattgcaccactgcactccagcctgggtgacagagcgagactctgtctcaaaaaaaaaaaaaaataaaaataataaataaataaataaataaataaataaaataaacccctcaaatggcaacagcaaaaacacataaatggtctcttaaattccctggaagttgtaaagacagtaagtacatgccggtacctccctcagttgcttgagctgttctcctggaactcactgcccttcagatagccacaacacttgacacacaatattttccatacccgtaggcatctatcattcagaggaagaggcttatcttccagtctttgtaccctgcagggcccaatgcaggctggctggtgggcacctggcctccaggaatgcttcctggaatagcaatgaatggcgctctagtctcttagagtctcagcatttatgtccatttcaattaaagaaaaaaaaaaaaaaagaatcgcaggaggtggtgtagtgagcagcacaggataacgcgcttcgtaggtatgaactcagttaaccccacagtcacactatgaagtgtgttatccccatttcccagataagggaaaagacagagaggttaagtaatttgaccaaagtcaacagctggtgactggagagccaggtttaaaaaccggatgccggctccgtgcagcagcccgccgatggctactggagcggagaggttccgaggtttcaggggcattttgtcctttcccacttctgggccgtgggctcccccatagacgatcccgcgggcccttcctcctctgacaccctcggatctggttccacctttcccggaccgcagctcagccccgcgcctctccagctcttcgatgaccggttcccggccgtgccccgggccctccctcggagcgcgcgccgccaggggcacctgtccctgcgcgggggtgtcgccgcccctcggcgccgccgggcgcttgccgctgagccgtggcgcccctggcaggagcactgcaaggacgcctcccgggactgcaccgcggccctgcgcacttggggcgacggggccaggcgcgggggacggctgcgggctgggagggcgcgcggaggagacaccgctgaggggacgccgctgagggcgccacgcggggggcgcggctgaggcgcctcgaagggcaagcgccaagggggcgcgggcgccgccggaagctggggcggggcgcccagcgggatgcggtgaagggcgagcggcgcggcggctgcgatgagtgcctctgcggccaccggggtcttcgtgctgtccctctcggccatcccggtcacctatgtcttcaaccacctggcggcccagcatg

SEQ ID NO: 14553 - DNA, 2300 bp, Homo sapien
taaatacataacgttggtatattgaagacgaaattaaaattgtccttcagttttgaggccatgtgtaaagtttaaccatattgtaaaatatctattccgtattagaaatagctagttgacagcttatacttctcaaaattcatattgttatgtacacaaactaagtttctatatgtgaagttagtgagtctttttgtgttactccaaaataaaggcaatgatttatttttttcccagtgccaatacaattttgagctaagcactcaaggtggatactttacattttaaagctggaatcagcaacagccctatgggaaaccagacaaagcattgacttttaaatgtagacttttaaaataaactgttttcttttggaactacaattagaatagttaatattcatccttaaaccattattatgtgtacattattgttgctattgtgataatagagaattttatttatttttatgccagcttatattgtgagaacacatttagtcagtttgggttttatcaatcctgttaatgcttgtccttggaacatctttcgcgtattcacggtttgtagttgaaaagtttactgtaaaaaaatcaaaaacaaaaaaatgtattgtttttacagaataaatttattggaatgtgtactgggagtaagatttgaggttgtaagcaaactaagttagtgtaatttggcttcatatatgtaacgtgaggtattaatgtaattcatatattaaagcaaaaattgttcacagcaagctgacaatagaatcaagtgcaggtgagggtttttctttttctttctttttttttttttaaacactctctgggttttagattatttgaaaacactgtaggggatgatggggagatgactacatgatttgcttacacttacatatttaccagcccagtggaccctagattttgtaatttgatattatccatgcattgatttgtatcccattttcttttggttttcttgatgagagctaataaaaacatgagaaaatgtgagcagacctaaaagcctagggccgttaataatgatgatggtgatgatggcagctaagggtatgaaagcaccagtccatttatcattccagggcacagtgaggaggtggctgtttgtatttttggtgtgtttctttcatttagtgaatactgattttctctagtatactcaacatacaatcccaaacatgaaaagttcataaaaagatagtagggatgtcgatctaatacttcttccttaaaaggtcctttttaattttgaatatttgaatgtattttttaattaatgaaatttaattcatcaaaagacctcttcattgctcacactgaaacataaggggaatgtagatggcattttgaattggaatatacaactcacaaattttctttaaaagcgttttatgtgtatatatgaaatgtttcaaatttaataagatttgtctttataagaggccaaaaataattttattaaaaatatacacagaaatacaatagaaatatttccagccaccaataaaacaaatgttcattaaggatagagataaagttactgatccctatttagctgtttaaattcacacaaaaaaatttagtaaaagtaattttcttgaaacagcagcaaataataaactttccttgggaaaacatttttcaaacaacatttaaaaatattctgatgatttgccttttatattgagtttaataatgaagcatattcatcttatttgcaaaagttactcctccagtctgcattcactgttttgaattttttaatatgcacaggccatattctcttttgaatagtttcatttcatgctcactactgttggcactaaattgtaattttttacacttataattattttatatgtcaaacaatattgagatggatgatcaagtttattcacaaatgattttgaatatatttctttaaacaaactgtttctcaagaatttccattttccttcaaaaaaaatttacacaataccatatagctcacacatacagtgcagagcaagaatgtacatattcttaagtactcacgtatgagaagagagtgaaatgggacaaaatatcagtaccagtataacaaaagttagtaatttagaaaggaggaacatgaagtaatatttttattccactttttcttctgcctttgtttttatgaagaactctggtttgtagatacaacgataggccaagagctgaggaagaactccatatgctatgtttaatgctaaaaaaaggatttttgcttcttcagggactctgtagacataagca

SEQ ID NO: 14554 - DNA, 2300 bp, Homo sapien
caaatcttgcctctctaagcaatactgtattacagcataaaaaataaccagttattctaccttaaaaactttgccttatcttaaggacaatctacagttcagatgcgaagctattttcagtctactggaacctgaataagactgttttttcctcttgatatctgaggttgttagtgttggaaaggatcctagagatgattttatagttgcagcaatggatatgcagacagttgaaatgattagtccataacagagcctgaaccagacaccaggtcccccaattcctggcctagtgttctttccatttgacaatcatgccaaaccaaatatttaaaaagtgattatgtccatccattacttcaacttcactaaatttcagtctggccactcgtgatgtcacttccttttgtgaatgggtgtatttttttttcttgatcttgctatcttcacttgactacaatacaacattttagagctcacactatatttatgccaattttctccatgactgtttccgttcctaaagaataccaatataatctctagaatgccttgaccctccttttcacaagatttcttatttcaagcaatcaactgccaaccatacaaaaataaaaataaaaaggatttcttctaaaacacaaagcacacatggcagtgttgtgtgtcttcctcaaagagcttaataaaaattgtgaatgctatgtattacatgcagacgctttctagaaaaagagcccaacgacaaccttgttatgtaggaagagagagctattgtggactgtagcaggaggccaagaataaggtttgagattctacctaaaacaaatatggaggtggaaaggcacaagaagcttgctggacccaccagtcagaggtaggctgcaagctctcggctatcagaggtcggtttaaaagaacgatgggcaccagagaggcacgtaccccaggacaatgatagggcaggcggggcaccgggaatcgcgctcagggaaaactcaacaagtctagaaggcaaagagatggatgaatgactgccaagaggctcccgctggcctctggatgaccactaccactttccaggatttactgcccgccggcactcgccggctcgcggacagccgctcaccccgctgccgtacctgccccgacgttcgcccgggacccagggtatccaccaatgaccctgcccggagccgaagcctccgtcgcaggcccgctgcccggcggcgtggcttcccggtcggcaccggctttccaggaggaaggcagcgtcgggcctgcgggggccggacccgccttcgaaagtgggcggaaggatggccgccctggcggagtgcgggcgaggccgggagcccttgcctcagccccggcccggtcttcttcgtgccgcgccgccctcagccctcaccacagccggccgcgagctgcgggctcggggctgaggcgatggggaaagggggcgggcgcgccatcatgaaggggaaaatggtgggcgggcgggcccgcgcgcggccgcggtactcacccgggccggccagtgcgggtagcccttcatcttggcgaagaccaggtcgcccgctttgtactcgcggggccgcggacgcgccatcccagccgctccccttcctggtagtccttggtcgccgcgaagatgccgggaggccgcccccccgcgggccgacgaattgcgccgcgctccccgcgggcctcaagccgggcggacgagcggccgctccgacgaggggaagcggcgaggcggcggctgaggcaaggggtgggcggggggcgcagcaggcccggcaaatcacggcccggcagcgggggaggggagcccccggccgttcggcgctcgcccgcgtccggccgcgccaaggtccccgccgccgccgccgccgccgccgcgcgcgctgctcaccagcgccgcgtcgcctgcctcatgccgccgctgccggtctccctcccgggctcccgggcgcggcgcgagcgccgggcctcgcgtctgctccgaattccttctcgggcagcgaccgcaaacacgatcttattattgttctcgcgcgcgctcagcatcccccccccgccccgcttcccgcttcccgctcccctccccttccctcccgcgcgggccggttaattcctaggtacacggccggctttcgcggagaaaccgagcgcgccagcccggcttctcggctggcgggcgggcggtgggcgcgtcctcccccagcaccgaagcccgcgccgggcgggcgggagtgcctactccggaggacgcccgccgcctgctctcttttgtt

SEQ ID NO: 14555 - DNA, 2300 bp, Homo sapien
ctaaacctgaactgtgatcgcatccctccattgtttactgccctcccctggttggcttccaactgacaacctttcccctctcatttctctcctcttccctatatccaccccgtgcccacagggaggctggactgtaggggcaagcaggcaacagctagggctttgacagctagtcagagggatgtgagtttgacatatgaggatacagaaatcattctacagcttcatgagcaatgcgtgacatcatggcagctgcatacggtaggttctaggagagagagatgttagcagatcatcacaactgaggcaaagaggacctagactcatcttccacagtgagaaaagaggaaaaaaacgaacctgtaggacaggtgagtacaggtcaataccaaaaaaaaaaaaaaaaaagaaaaatcatgagatgcaagtagtaaggaaatgcattagtaaagtaatgtaaaagcactgctaacaaagtaaacaatccacaggaaatctagagactttaaagccccatcataggaagcccagcaccacagaacaagagcaggagttaaaacacacacacaccattctacaaggccagagaggggggcggatggtggggaaaactgtagcttctgtaaaagggagagagaacagacacaaatgagaactgtccgtgtgacaaggtgagggccacagaaagcagcatttaggagctatgccagctgaccccttaaaggaggtgggttacagcatgattaaagaagcagcattcgttcattggacagactccaaacgattccttgaattattctacttactcctcacaaaagagagtgttaggaagattcctactctcaaaatgtctttgaaagcagccagctagggaatttagagtaaaatagtggtaaatgaacatgttctagagctaatgaactgtatatgtacatacatctccagaaagggatgctaatttcaaaaacgttgtccaaaaggttgccaggattggaaacaagtgaccggccagtgcaagtccttttcacaaacactgcaggcctagaaaacgcacacagagagaaacataatcgcttatggactttggactcatgtggatacaggttcgaatcccgtctgtgccactcagcaaatgagaaaacctcccatgactccgattaaatagctcgccctaggtgggtcacactgcattgttaagggcagacctggggcaagaatccaataaggtcgctgactccggagcggtgctctttccggcagcttggtgcccagcagagggtcccctcgcgccgccgtcccccaggcctggagcgcctttgtcccccactcaccagagagcagccgcggaagtggctggctgggggtagccaggagagggtcgagtcagcgggaggtgggcgtgggagcggggggcgcgagtggggagaacccccagagtggcacggacgggaggggaagggggcggccgggtggtgattggctgggctgcggcaggcagctccgggccaagaacaaaagagagcaggcggcgggcgtcctccggagtaggcactcccgcccgcccggcgcgggcttcggtgctgggggaggacgcgcccaccgcccgcccgccagccgagaagccgggctggcgcgctcggtttctccgcgaaagccggccgtgtacctaggaattaaccggcccgcgcgggagggaaggggaggggagcgggaagcgggaagcggggcgggggggggatgctgagcgcgcgcgagaacaataataagatcgtgtttgcggtcgctgcccgagaaggaattcggagcagacgcgaggcccggcgctcgcgccgcgcccgggagcccgggagggagaccggcagcggcggcatgaggcaggcgacgcggcgctggtgagcagcgcgcgcggcggcggcggcggcggcggcggggaccttggcgcggccggacgcgggcgagcgccgaacggccgggggctcccctcccccgctgccgggccgtgatttgccgggcctgctgcgccccccgcccaccccttgcctcagccgccgcctcgccgcttcccctcgtcggagcggccgctcgtccgcccggcttgaggcccgcggggagcgcggcgcaattcgtcggcccgcgggggggcggcctcccggcatcttcgcggcgaccaaggactaccaggaaggggagcggctgggatggcgcgtccgcggccccgcgagtacaaagcgggcgacctggtcttcgccaagatgaagggctacccgcactggccggcccgggtgagtaccgcggccgcg

SEQ ID NO: 14556 - DNA, 2300 bp, Homo sapien
ctacgttcttcttctacctgacccttagatgttggtgttacctggctccaaacttgggcactgcttttctcattctacagtttcctgggcatcctccgttatggtttcagtgaccacttatatactgatatcactcaaaagtctacattctgtcttgaccactttctctaagctgtgtatttagctgcccactaactagctctctggatggcccatggaaatctcaacacatcccaaaccactcaagatctcatctctaaacctgcccattcttcatggatttctgcaccttggtgagtgtcaaaactaatcatcctgttgctccaaccagaaaccagggaatcagtttctactcttcctccttcctacccacctaccacccaaagaatcggcaagctctgtctcagcccttgtcttatctctcctggggagagaatatcaatgcaggtcctgccccaagcctctcaccctcaagtctagtcccatgctggccaccaaagtaatgtctaaacctgaactgtgatcgcatccctccattgtttactgccctcccctggttggcttccaactgacaacctttcccctctcatttctctcctcttccctatatccaccccgtgcccacagggaggctggactgtaggggcaagcaggcaacagctagggctttgacagctagtcagagggatgtgagtttgacatatgaggatacagaaatcattctacagcttcatgagcaatgcgtgacatcatggcagctgcatacggtaggttctaggagagagagatgttagcagatcatcacaactgaggcaaagaggacctagactcatcttccacagtgagaaaagaggaaaaaaacgaacctgtaggacaggtgagtacaggtcaataccaaaaaaaaaaaaaaaaaagaaaaatcatgagatgcaagtagtaaggaaatgcattagtaaagtaatgtaaaagcactgctaacaaagtaaacaatccacaggaaatctagagactttaaagccccatcataggaagcccagcaccacagaacaagagcaggagttaaaacacacacacaccattctacaaggccagagaggggggcggatggtggggaaaactgtagcttctgtaaaagggagagagaacagacacaaatgagaactgtccgtgtgacaaggtgagggccacagaaagcagcatttaggagctatgccagctgaccccttaaaggaggtgggttacagcatgattaaagaagcagcattcgttcattggacagactccaaacgattccttgaattattctacttactcctcacaaaagagagtgttaggaagattcctactctcaaaatgtctttgaaagcagccagctagggaatttagagtaaaatagtggtaaatgaacatgttctagagctaatgaactgtatatgtacatacatctccagaaagggatgctaatttcaaaaacgttgtccaaaaggttgccaggattggaaacaagtgaccggccagtgcaagtccttttcacaaacactgcaggcctagaaaacgcacacagagagaaacataatcgcttatggactttggactcatgtggatacaggttcgaatcccgtctgtgccactcagcaaatgagaaaacctcccatgactccgattaaatagctcgccctaggtgggtcacactgcattgttaagggcagacctggggcaagaatccaataaggtcgctgactccggagcggtgctctttccggcagcttggtgcccagcagagggtcccctcgcgccgccgtcccccaggcctggagcgcctttgtcccccactcaccagagagcagccgcggaagtggctggctgggggtagccaggagagggtcgagtcagcgggaggtgggcgtgggagcggggggcgcgagtggggagaacccccagagtggcacggacgggaggggaagggggcggccgggtggtgattggctgggctgcggcaggcagctccgggccaagaacaaaagagagcaggcggcgggcgtcctccggagtaggcactcccgcccgcccggcgcgggcttcggtgctgggggaggacgcgcccaccgcccgcccgccagccgagaagccgggctggcgcgctcggtttctccgcgaaagccggccgtgtacctaggaattaaccggcccgcgcgggagggaaggggaggggagcgggaagcgggaagcggggcgggggggggatgctgagcgcgcgcgagaacaataataagatcgtgtttgcggtcgctgcccgagaa

SEQ ID NO: 14557 - DNA, 2300 bp, Homo sapien
attaatataaagataatgaccaaaactttcaattggacagattaaagttattgaagtgggccaccgcctgggacatagacattgtggtgtatttataataggcataggtggcattcagtaatattgtcatcaaggatctctcttggttacaatattattgtaggtaacaaatttaagttaatccagaaattggttttagatgcagcagaaaggaaagggggagagggtttgcagaacagagactattttatttagtcctaccaatctggcctgagacaggctttcatatctgcttttatagagaagaaaagaggggccaagaaggctgacttcctcagccagtttccagttgctaggaatgagctatccctgggtcactatgactgcaaaaccagaggtttatctgctaccgtatctcatagcacagaagccactaagatgagtaaccaccaaaggaattaagacaagcacacatcacaactaggctacacaatgctactggcacgatgaaagaggcagaaaaaagtgcctgggggtcacaacagggcaaaagcacatcgagtggaggcttggtggatcagggaaggtttctgagatgtggtgacattccagaaagtccttcaaagatgcactgtgttacaacaaacagagaaggaggtgttagaagaaaggcctcaatacgggggcacggaggaatgagaggtaagcagtttagatgcggaatgaatctagcaaagctacatcaagaagttagccacgtgaaaaaaaaaaaaaagaatctcctcccacggcaaggtccatcacgtgaggccaggagacttcaagcctacaaggaaaggcgccacacatcaggcccaggacactcacctgtgtgtccaccccaggagaggcagaaggacccgctggaccccaggacgccaggacgcccagacacccacacattcttcctcgtacaccttgttccctcctttcccttctcttcccttcagaagccttccacctgcctgtgccttccatagccacaaccaggcacactctgggtggctgagggcaactcacttcatcttccttttcctctcagagagggaaggaagagctttgtttccttttcaaggatccccaccagcagcaaggcaggtggaagaaactgagggaagaggaagcaggacccccgccgcccccccagtctagcctttacagactccttttaaggagctgaagaggttgggagaggcttgccctgccccggggcagcagaaacccgggcgctgctgcagcagctgtgggcgatctccgtcagctcctgggctccaggatcctgcggcctcagcccctccgcgtctactctcggggccaccacctccagttggcttctccagggcacttcatttcattccgtccctagcatccaataagacgcgaaaaacttaatcccattttacaactgaagccactgaggcccagagagcaaagccatttgtcctgggaaagtggtcaagctgggactttgactcttcagaccacccaagggaaggggtgtgtgtgtgtgtgtgtgtgtgtgtgcgtgtgcggtggggggcgcttgttttgagttcttaagaaaacctcctggcgacccccttcttccacatcccaagacgctcgtcccgcactttctcgggaatgaggtttctgcaggcgagggcggcgctgccttcttcctccgcggcagtgagaccccgagggcgccccagggtaggaggggaggccgaatcatctcctgagaagagcgccagagaacttcagagcgtttcgcccttccccgggagaggcaaacaccgacacgtctgtgtcttttaccaacaagtgccttcaagcccggcgggggcagacacctccgcgccggccgccggcgaggtctccgcggtctgcgggggccacggcctcgcctcagctgcgctgatttagggcgttatccggtcccggggcgggaggcggcctcccgggcggcgaagcagcgcccgcggcgtggggcgaccgcgcggtgggcggaggggcagggggaggggcggagaggcgtccccggggcgcagggggcgggcgtgcgggcacacgcggtgcgcggcgggggcggccatcgtgctgcgcagcctgggcgcttggggagccgcccacttcgccgggtcgcgccccgacggccggagcgtggatgcggcggcgcccgccgagccggggcggacgcggggcggcccgggcccgggagacgcgccggcagccccggcaccgcagcggtcgcaggatggccgaggtaagcgcggcgc

SEQ ID NO: 14558 - DNA, 2300 bp, Homo sapien
gcccagcaggggaagggacctacccaagtttgctgagttacatttagaactacggtaattacatatcagaactaaaattgattgtcaggttcttactctagtgcaccgagcatgaacacaccatactgctcagctattttttacctcagtttatttattgttttattcagaagaggacccctatgctgaaaagcacagagctaaaagggaattgatttagctttttgtactcaaaaggtgagtttttaaaatattcaagggatggttactgatctaaagggctttactgtcccatcaagttaaacattttgatgaacagtgtgattgtaaactgtaattcctaatgtcatgaggtggttaacaaaaatttgaacaataatcagtgacaagtactcttacaatggttataaatcaaaacatcctgctccattttgtgttttaattgcagaggtgttcaaaattagtcacatagcacagcaaagatttaatgctatttaagctatcaccagaaatatgtacaaaaaattacaaggctacactgacagtttaattggtgattgaggaaatttggggtgctacagtcttttctcgaatattttgaggtatagtcaaccttaaaggtgaggtccagataagaggctctcgagctttttgggcttctatactgtataattttgggaatgttaaatcttttctgaagtctaactgctgatgtccctagtttaccagatattatatgccatgagaagtatattgagtaccttattaagccagggttaatgaagtaaaatttatatatctaggctcccatcttaagatagaaaaaaaagctgttgaggtcttcaagtaattctaccgtttttatttctatttaaaatgttttcaaatttagcatcattattttatatcattagattgagagattaccttgttgagaattttcatgcctatgacaactatagtgatgtatcctttttcattccagatattgatttatttgtgccttcttcttgattaatcttgccacagatttatcaattttattgttctttgtatagacttaacttttgattctttgatctctcaactgttctttgtttctttacttcattaatttttgctcttattttcatcacttccttccttctactttttttttttctttttttttgagacggagtcttgctctgtcgcccaggctggagtgcagtggtgtgatctcagctcactgcaagctccgcctcctgagttcacaccattctcttgcctcagcctcccgactacaggtgcccaccactatgcccggctaatttttttatatttttagtagagatggggtttcaccatgttatccaggatggtctcaatctcctgacctcgtgatccacctgtctcggcctcccaaagtgctgggattacaggcgtgagccaccgcgcctggccagacttctgtttttctaatatatgcatttaaaatcataaatttccttctaagcctagctttagctgcatcccacacattgtgatgtcatatacttattatcatttaattcaaattattttacagtttccactgtggttcttctttgacctgtaggttatttagatgtatattacttaatgtccaaacatttgggagttttaaaaagttatgtttttgatactaatctataggtaatttttactgtgatcttagaacatgtcctgtataatctcaacactctgggtagggtgtggtggcttatgcctgtaatcccagcactttgggaggccgaagtgggaggatcacttgagcccaggagttcaagaccaacctaggcaacatagggagacccccgtctctacaaaaaataaaaacaaattagctgggtgtagtggcacgcacttgtagtcccaactactcaggaggctgaggtgggaaggttgcttgaacctgggaggttgaggctgcagtgagccatgactgtaccactgcactccagcctgggtgacagagtaagaccctatctcaaaacaaaaaaacaaaaacaaaaacaaaaacaaaaaacacaccccaaaatgctggaatttgttgagacttaatttttgagcctaccgggtgcggtggctcacgcctgtaatcccagtactttgggaggccttggcggtcagatcacttgatgtcaggagtttgagaccagcctggccaacatggtgaaactctgtctctactaaaaatacaaaaattagccaggcatggtgatgcatgcctgtaatcacagctacttgggaggctgaggcatgagaatcactggaactca

SEQ ID NO: 14559 - DNA, 2300 bp, Homo sapien
gctgcctgacatccttctccaatacatattttccagcttatgttagctagagtcagtttctattgttaaaaccctcaaactctcactagtcttctgaacaaaagtgaaggaaggaatgtgtaagaataatgaaagaaaaatcaatgagagagaaaaatctgtagcaatgatgagtaccttcaaaaatattttgaaagaccaataaaatcagcaaacctccaataaatctattcactgaaaaaattaagacaaatcacaaaaacttttacaaaggagaaaatgtatatgaaagattctgaagtttaaaaagtatgatcttcaactctatacttgattaatgaaggagataaattaccaaaatcaactgaagtgagaaacttgaatgtactaacgactgtggaggaaatgccaataaactgtttgaaaaaaaagcacccccctcctcccaaagggcacagagccggattggtctagggggaggtaccatagaaccggtgctatttaaacctctctggagcatggagaaagaggaagctgagcagccctgaatagcctaggacaagagagacctgccaatcctggactccagctgcagctggctctctgccttatgtagtggttggcctgcggtgaagcccactgttgagaggcatttgaactgttgtatggacaggtcatcttgctacgccattctgacccagctgtcaccaccctcacactttttagttatctatcagtggctggtgtcaggcaggtaagcccacaacactcacccaagtcatgctcattaaccctctgactggctgcccttatcccacgatctccactaagttcaagcattttttccccagtatcagaggaggaacactgtttattccagtctacatgcttcaagtagaagtgaggaaaccaaggcccagagaggtgtgtacttacttgcccagtcctcactaggatgaagtcagggttaggactagccccgactgggcgctgggagctaacagctaggggaggaactgcatgacttttgtcctggagaaatgttatggcaggtggacaccagggcacaggcatatacccgaagtgtccagggcagacagggactgctcgtcaccccagatgggacctgctaagggcccaaaaagagactgaaggtgggaaatgtttttgtttttcagtgtgaagcgttgccaaacatatattctaggtttgggaatcctcgggacctttggaagccagattcagcgaagatgctgtaccttttggggatagctctaacacgaggttaacgcaatgctccatgtccctggctgggcttagctgtgagtgcgtcgacctctggactctgtgcaaatggacactctgtaactgacacagctggtaggggttaccgagagagctgggttcctggtctggtggactccgccggatatgcaacgagctctttatggcaccttggagatggttgcttttagtgccgttgacagcgggctcagagcaccaagtgagctagcaccgtatttattagtaaattactccataactctagggctcccagaagaccaaaatcatttgagcagattgcacccagagcaccgcgtggagagagaagaaagcccgccacccacagaccgcttcctcctaccacaggtcccccatcgagttgcatttgttgtccctccctaggcgcatttctgagccttcctttcttaaacatacaccgagcgaaaatgcgccggagggaggcgatgttgcctgtgagccaaagccggttcggcaccaagacagaagcagagagaactgatctctctcccggtacccatgacaatctcagagctagatctatatcgtcccgcgcccagcaagaagcactgtgtgactgtactcccccgacccccaggacatccccacgcccagcttcccaggccggtcttctgcgcggctcaagtagcccaggtctccacgcaacaatgaagcgtgggcggccccagcagcttcatttgcatatcgccgcggcttggccaatgggctgcgcaggggctttggaacgcagtgttgccatcggcgtgcgcgcgtgtgtgcgagtgtgacagcggctgtggctgtggccgtggccgtgggaggcgggcccggcggagcccagccgcggggggaccggcccgggctcccgctccccgagcgcgtcgcggccgcgtggcccagccgagccttgagaccaccccgcccctgccggtcgcagtcgcgatgtcggtggccgggctgaagaagcagttccacaaagccagccaggtagggaggcg

SEQ ID NO: 14560 - DNA, 2300 bp, Homo sapien
tttattttaacacctcataatcaatagctgcagcactttcaaagtcattgaaccagtgctgaacgttttgagtctcttgagacacatgttggaagctaaggtccaaccagtcaaccctctgtcttcttgtttcagctttcacactgtaaatgagtggcccaaaagttctcttcattgccatgttttcacatttttttggtcttttttttgatgattttgctgcttaaagcaccccccaggcacagtgctgaagtgaagtctagcgttcctaagtggaagaaggctgggatgtgtgttgcagagaaaatacgtaagttagataagcttcattcaggcatgagttacagcactgtaggctgtgagctcagtgttcaggaatcaacaatagatgttaagtaaggcgtctttaaacagaaacatgcataaaataaggcaatgtgttgattgattgacaaaaatattgtgagcttgcaggaacccaactctatatttcccctaggaacaatggctccatattcacaaattcgttgttctgtgactttatagaccacaactacagtaaataaaaaggatcgattgtccatagatgagttagttctagtttagcccagccctccctacccttcactggctactcttacctctcctgtctccacactgacctgtcctctgctcacttgccacaagtccaatcattttacatagagtggagagacagccttgaagatcctcttcttggtcagaggaagtcaccagagtaagtaagggaagaatgagtgaggaaagcaggcagggccaattgctcttggcaaagctctagcagtaaccggaacgcagcaaccacagagaaggcaggagaacaactttaggggtgaacagtccaggctctagagagaggcagataggggttccagtcctggcttctccactcatggtgggcaagttatcctcccagcctcagatttatcctaggtgaaatgggataatgctcgaactactgctgctgtgaagatcagatagacacaaagagcttggtactcgacagacacccaaggaaatggcgactgtggtaggacttaggtgggggcataatgcagcctttaagatcaatctcctggcccttggcttatcctgctgggactaggacaaggacagggacaaacatttccttttacttctcctcacctccagaagtacacaggcaactcaccccagtctcttgtccgcgacactcttccccccaaccccaaatcccaggcctggacacggcatgattctggcacctgtggagctctcagttccccaagcccggctcagacaaggaggcgccaggtacccagttaagaggcgctcctgcaagatcctcgtggtccctggctgccaaaggtcccaggcctctgggcagtgagcgctccacagtcccttgtgtggcgtctatgctgcgcggaggaggcgcaggccaggagagggccattggtctccactatggtcctgcctggccaggagtgcctatggctcttaggcacgagccagcggttccgggcaaacctctgtgtggctgctgggcctgactttgcagagctggcgcccgggtctgggcggggtgggtggaggctatgggaggtggggccgggggtgggctcggggggagcgacggcatccctgctccggctccggctgaggcggggcggccaggctggcttgcggcgcagcggccgcctttccccagtgcgcctgccggcggcggcggtggcggcgtcggcaatcccggctcttggcacaacgcctggcggccggcccagggcgaggagtggcttccaggaagcgggcggaggagcgttccagccgagtcccgccgtcgccgcggccccgcgcgctccgagcggcccgggcctggccccacacggcgtctcttcgcgcccccggcgcctccagctcaagccgagggcgcggtgccggcgcgcaggctgacgggcgcctgggcgcgccgtgcacttgccgggcggtgcaggtggcggcgcgcgccctccgcctctgggccggggccagcgcagcgctctgcgcgcccggagggggcgggagaggcggggcagcccccgtcccagccccatttaacttcgcggcggcggcggcgactgcggcgccgcgggctggaggccggcgtcggggaaggtcctggtgccggattccgcacgaggtgttgacgggcggcttctgccaacttctccccagcgcgcgccgagcccgcgcggccccggggctgcacgtcccagatacttctgcggcgcaaggtgggtgca

SEQ ID NO: 14561 - DNA, 2300 bp, Homo sapien
tttaagtggggtatttagcccatttacatttaaggttaatattgttatgtgtgaatttgatcctgtcattatgatgttagctggttattttgcccattagttgatgcagtttcttcctagcatcaatggtatttacaatttggcatgtttttgcagtggctggtaccagttgttcctttgcatgttgagctcttccttcaggagctcttttagggcaggcctggtggtgacaaaatctctcagcatttgcttatctgtaaaggattttatttctccttcacttatgaagcttagtttggctggatatgaaattctaggttgaaaattcttttctttaagaattttgaatattggcccccactctcttctggcttgtagagtttctgccaagagatctgctgttagcctgatgggcttccctttgtgggtaacccgacctttctctctggctgcccttaacaatttttccttcatttcaactttggtgaatctgacaattatgtgtgttgcagttgctcttctcgaggagtatctttgtggcattctctgtatttcctgaatttgaatgttggcctgccttgctagattggggaagttcacctggataataccctgcagagtgttttccaacttggttccattctccccgtcactttcaggtacaccaatcagacgtagatttggtcttttcacatagtcccatatttcttggatgctttgtccatttctttttattctttttttctctaaacttctcttttcgcttcatttcattcatttgatcttccatcacggacaccctttcttccagttgatcgaattggctactgaggcttgtgcattcgtcacgttctcgtgccttggttttcagctccatcaggttctttaaggacttctctgcattggttattctagttagccattcgtctaatttgttttcaaggtttttaacttctttgccatgggttcggacttcctcctttagctcggagtagtttgattgtctgaagccttcttctctcaactcgtcaaagtcattctccatccagctttgttccgttgctggtgaggagctgtgttcctttggaggaggagaggtgctctgatttttagagtttccagtttttctcctgttttttccccatctttgtggttttatctacctttggtctttgatgatggtgacgtacagatggggttttggtgtggatgtcctttctgtttgttagttttccttctacaagtcaggacgctcagctgcaggtctgttggagtttgctggaggtccactccagaccctgtttgcctgggtatcagcagcggaggctgcagaacagaggatattggtgaacagcaaatgttgctgcctgatcgttcctctggaagttttgtctcagatgagtacctggccgtgtgagctgtcagtctgcccctactagggggtgactccggggtcagggacccacttgaggaggcagtctgtccattctcagatctcaagctgcgtgctgggagaaccactactctcttcaaagctgtcagacagggacatttaagtctgcagaggattctgctgccttttgtttggctgtgccctgcccccagaagtggagtctacagaggcaggcaggcacccctaggtggagtaggtggagtctacagaggcaagcctcagcaatggtgggtgcccctcccccagcctcgctgccaccttgcagtttgatctcagactgctgtgctagcaatgagcaaggctccgtgggcataggaccctctgagccagacgtgggatataatctcctggtgtgccatttgctaagaccattggaaaagcacagtattagggtgggagtgacccgattttccaggtgccgtctgtcacccctttctttgactaggaaagggaattccctgacccattgcgcttcccgggtgacgcgatgccttgccctgctttggctcaggctcagtgtgctgcacctactgtcctgcacccactctccgacactccccagagagaggaacccggtacctcagttggaaatgcagaaatcacccgtcttctacgtcactcatgctgggagctgtagactggagctattcctattcggccatcttggctccacctccctcacctttacttattctatttattgcttacttattctgtttttacaatttataaaactagttttggagctgaattttggggaatggcctttaatatcatgagaatatcaagaccatccattgcatttttttgttttttaagcatcttttccatatatactttgcatgcc

SEQ ID NO: 14562 - DNA, 2300 bp, Homo sapien
aagttccgatttcctgctggctgtgaaatacttgacagcgttcagcctctgtttcttttcttttttttttttttagcttaatcccaaatatgatagtaagtctcagtttcttgatctgaaaaacagaaattattcaatgacagtctatgtgaaaactttaaagttttcaaagccactatctagcttaggaaagtcctcagctttaggggttaaagtttttaaaaccactgcctggttcaggaaagccctcagctgtagccattattagctatgattattattgtggtggctacacatacattaatgaggcaggaaaatgctcaaggataacaagcaagtatccagattatctcatcagaccaagacagatgcatatgcatgcatgatcatgttttagctcagagccatttgtctaaaaggctcttgaactcagaggcccaggagtatcaactttgctttgcagtggagccatcgcttttgttaatcaatgaaattgacataatgctcttcttttttttttcctttttagcaccaaccatgtgcctagagctaactgtgttaagaagagcatgcttcaagtggctggagtgagcaattcaacttgtggaggaatgagaagtgacagtgttgagacaagcaacataaaaccccagggtaaggtagaaatcactgaaagtcaggcaaaggaactggcgtccagtaatgagtcaggctttgccagcctctggccctacagatggctctttgcagaggaaaaaattaagccaggcccgagggcacagatcctaagggaatgctggcagctctaggctgtctatgagagtccagagatgctgcttcaccctggggctttaggcaagtccctttccctcccagagcctcagcatcccttctagcaaatgacgttctgcctttctcctaggatggctgtggggatcaagggagacagtggccatagggatactatgttaactgcagatgcggctgtaggagcactttgctaacttccaacgtgagttcagactcttcaggctatttggcacccagatctatggtgaggtgtgacatatgggatgtaaagtttgatgcctgctccgactccagtcttgctaacacacacgaaacctttggtaaatcatgaccctgccttggggaaaagggcagtctgggagagcttcttcaaggcagcctggcttcaatgcagtctggggcatgactgagataggcatacgtggtgaggaactggagggcaactgggtaaagagctgcagtgtgggcagaggtgtagtgtgggtcacatcgcggatagccactggccaaagcagggaacagagacagaatgaggaagagctctgtggggagggtggggcacagggtggagaaccttcaaagtccaaagagtatgacttgttgggattcaacgctgtaggcagtagggagccatggaaggctcttaggtggagaaatgacagccggacattagtgagcaagccctgtctccctgagcagcatgggtggtcctctgagcacgccaggcacgagtgtgcagggagctggtgcaaatgcctctgtgtgcgggtgagcatctgtgttgtgactctgcccacgcatgtgcttcagcgtgccgagtggctgcacgccccagatccatgcggcacgtgccggccggtgagggtgctgggcattgggaggtggcggggagggcgacgtatgcgtgttgtttgtgggcatgtgttagagtgtgcatgcgggccgtggggcctcacagcatgtgtgtgcacactccggcatgtgcgtgtgtcccccacccccaggcctgccccacccatgcatgtgacctgccatgtgatttgaagctgtctttcagaatcactatcagtggcccctgaggagcgtcagccatggtaggtacatgcctcactgcctgctgcatgaatggtctgcctgccccgctgccccagctccacacagggggcatacctggagcctcagagccaggctccctgcccctcccttctggagctgcagacttgctctttcctctttctgtccttgtgctgctggctgtctcactttgctccctgtgagccatgggactcagtgccactgctcaaggtctccatggctgagcctgggggctcttacaacaggctccatgcccaaggtggcagttgtggaaccatcagagagggcacagagctcatggtttatggtgtaggggctgggagcttggagggggttgtgtggggggctggactcaggcggccagaggcctgggaacatcatcctgggcacgccgt

SEQ ID NO: 14563 - DNA, 2300 bp, Homo sapien
gagtggtggcatgtgcagcccatgctggcactgatggaggctgaactgcgtaaatcccaggtgctgttcagcgtgacctgaggggcacactacagcgagctcgagctggatgtcctgggtgcccaggcatgaaaaatgttcacccttctggacgtggtgaactgcaaggcccacttcatccacgatggccctgaggacacctctgaccagctggtgctggaggtgtcagtgatggcttgggtgcctatgccctcatgcctgcggaggggccaaacagacctcctgcccatccaggtcaaccctgtcaatgacccaccccacatcatcttcccacatggcagccttatggtgatcctggaacacacacacaagcctctggggcctgaggttctccaggcctatgacctggactctacctgtgagggcctcaccttccagctccttggcaccccctctggcctccccgtggagcaccgagaccagcctggggagccggtgactgagttctcctgctgggagttggaggccggcagcctagtctatgtccactgcggtggccctacacaggacttgacattccgggtcagcaatggactgcaggccagccccccggccatgctgaaggtggtggctgtccagctggccatacaaatccaccgcagcacagggctgcatctggcccagggctctgccatgcccatcttgcctaccaacctgttggtggagaccagcgccgtggggcaggatgtgaccgtgctgttccatgtcaccggaggcctgccgttcagggagctgcagaagcagggggctggtggggtggaggatgctgagtggtgggtcacacaggcgttccaccagcaggatgtggagcagggccacgtgagatacctgagcactgacccacagcactacaccgaggacaccgtggagaacctggatctgcaggtgcaggtgagctgggaaatcctgagcaatctgtccttcctagtgaccatccagagagccactgtgtggatgctgcagctggagccactgcacactcagaacacccagcaggaggccctcaccacagcccacctggaggccaccctggaggaggcaggcccaagccccccaaccttccactgtgaggtggttcaggctcccaggaaaggcaaccttcaactacagggcacgatgatgtcagacggtcagggcttcacccaggatgacgtacaggctgcagaggtgacctatggggccatggcacgtgcctcagtggcagtggaggacaccttctgtttccatgtcacagctccaccatatttctccccactctgtaccttctccatccatattggcggtgacccagacatgcctgtcctcatggtgcccgagggtggtgagtgtgtcctctctgctgaccagctcttcatcaagagtctcaacagtgccaggtacctctatgaggtcatggagcagccccgccatgggaggttgacttggcgtgggacacaggacaagatcactatggtgacatccttcaccaatggagacctgatgcatggccagctggtctagcagcatgatgactccgagatcacagaagatgatatcccatttcctgctgccaccaggaccagagcagtggtgacgtggcctgggaggaggtatggggtgtcttctgagtggccatccagcctgtgaatgaccacgcccctatgcagaccatcagctgcgtcttccatgtggcctggggtaggtggcggctgctgactacagacaacatggccttcagcaatgctgattcgggctttgctgaggcccagctggtgctgacccaccaggacctcctctctggcagtatcatggccacggatgagcccatgcagcccatctgccgcttcatccaggaggggcctcaggaagaggcgagtcctgttcacacactcaggctgaccacggctggatcccgctgcaggtgtccgatgggcagcaccaggccatcacggtgctggaggtgcaggccttggagccttacctctgtgtggccaatggctccggcctcatggttcctcaaggaggccagggtaccatcaacatggccgagctccacctgggcaccaacctcaacatctgcagtagggatgaggcccactaccacgtcacagacagccctcactggggacagttgctccaagccactcagccagccacagccttctctcagcaggacctgctggttggggctgttccctatggccacaatggcagcctcagctcctgcaacaccctggccttctcaatggatgtgggaccag

SEQ ID NO: 14564 - DNA, 2300 bp, Homo sapien
ttatgattttcttccctgccacgcctgttttcatgggcagtgctgagccccggtcctggcagagctcagaaccaggctctcatgagctggggcaagtggggcctagggaacctctgggttgaggaccttgcaccccactctgcagctgccctgctgatttggctcatgcaacctctcctcctgggctcaagtgatccttctacatcggtctcccaagtagctgggatttgggctaccacgtttggctaatttttgtatcttttatacagatggggtttcacctgtagcccaggctggtctcgaactcctgggctctagtgatctaccctcctcagcctcccaaagtgctgggattacaggtgtgagccactgcgcccggccttgtgccagcttttaaatatcaacaaggacaaattagagaacagtggaagagggtgagcagcatgatgaggtgatacagaaataatttcacatgaagaactgggcatgcctggcttttttttttttttaagctattctgggttggatgctgaggctcacacctgtaagcctgtaatcccagcactttgggaggccgaggtgggtggatcacctgaagtcaggagtttgagaccagcctggccaacatggtgaaaccctgtctctactaaaaatacaaaaaattagctggaattggtggcatgtgcctgtaattccagctactcgggcagctgaggcaggagaatcgcttgaacctgggaggcggaggttgcagtgagctgatatcgtgccattgcactccagcctgggcaacaagagtgaaactctgcctcaaaaaaaaaaaaaaaaaaaagaaagaaagaaaagaaaatatatctatgcaccagagctcaacactaggttaggagcatttctgagatttggagctattcaaccatggaagttcctggcacatacatcaggtattcacaataccctttctcaggtgtttggtcactgctagtgagcctgcctggatcagtgtttcccaaatggcagtcatttgcatctttgcatttttttggggggggggttgtgggggtatataccataccagattttttaaaaattgacattaaaaatacatgtataaaatgtgtaaagtgcactaatctaaagtgcactggatgtattttttattgatgtacatacttttgttatccatcacccaggtcaaaatacagaatcagcaccacagagggttccctcctcctccttcccagccaataatcttctcctcctacctaaccaactgttcttacttcaatcactgtcaactagtattttacattcttgaactgcatataaagtgtctcaagtttcacttaacacttttcttgaaatacacttgttttttgccactttttatttgacctaagaagtaacattaatgaaacaatgatttgacgtgataggcatttccctcctaatgagcactaaaacacttaactatttgaaaaaagaagtttctccgtgtaccagctaatatattctcctcggccgccgttggtacacggaccacattttgtttctcaaagcaatccgatgatttctgaggtcctttgcagcttgaacacggaacgactgtggtgatcgagtagccaaaagttcacggaatgcactgtcacaattgtgattccgccatagcgccgtgcatccatccaacacttgtttaatacctatatttaatacctaataccttagactgtcctaggctgtggacacagaagactaaaccccacttcctgagttgaagtgggggaaatagaggagtaaatcatttcacgatgtgtggttaaatgctacagctcaggtaaccacgagcacacagagaaagggcagtttctagaaacagggcggagaggagaccgtgagtgggcatttcccagagcagtctctgccagccaccctgctgtgatcactttgccacagagcagccccggcggtcaacctcagcctcccttagcaacctgagcgccccgcccaggtgccttactattggtctcgtggagcgggatgggcagctctgccgtgcaatcccagctcgcagcccttgctccgcgtgtactcacgggaggactcgcagacgttactgccctcttgcgtgccccggccacccccgggcggcttgtagccggtgcgcggggtggctggggctacgtgcagagctgtcgcggagccggaacagcagcggtgaagcccctcggctcggccgagaccgccgtgcccattgctcgcctcggttgccgccgctttagccgcagccgctgctgccgccgccg

SEQ ID NO: 14565 - DNA, 2300 bp, Homo sapien
tacactcaccatccgaggtttgcaggacttttgtttcagtattgaacagatggaactgtttagttcttcatctttgcaggtataccaaatgtgcctaccaggagtctgctttatagccattgaaaagcaagaagtaatatagtaaaattttgcctggctagaggctttggaagacaagtattttggcttaattctattaacgtggaaggatgaaggtgaaaaaaattcaaaactttaatatcctgtttattgcaatttgaaaatatagccaatgattccacttttcttctccagtaagtttggacattctgatctacttggtgttttattacagaactgctagtgtgcctgagtcttacattgtgaagatccttctctaaaacttcacatgtaagagaatataaatgatattggataagatcaggctggatgagaactgatacctgtaaatatgcgatttagacgaaatctctgattgttttcttatttaactcataaaaataaaacacattggctggaaggtgggagcaggaaggagatttatgtcttttaattgcacgtcattgtttcatatagagaaaacatatagtatccctggttttggacctacagaaggaaacacatttttctacctgctgtatgccagaggttcttgaacacctggagggattactgcagcacagattgctgagccctactccagagtttctgattcatcaggtccagggtggggccggaggatgtgtatttataagaagttcccaggtgctgctggagctgctagtccagagactacatttttgagaactgctctcatatactaactgtaagttgcagagctctagaaaaaaagcttagtttggtgtgggataagaagcacacaggttatggagaaaatcatgaaagattcaacccttgatcccagcctagtgtggatttcaggtaacaagcaatacacagtgacataacaaattcttggttttcatgactgcaagtgagagccaagtatcaagtgagaaattcagcttcatttgcaaggcttagagaggccaggtgattctagaaaaatgggccttgtaattctcttaaaccagtaaagagctttaagtggttattaaattgaaagctttgtgttcttacttattttgtattttattttatttcttttgagatggagtcttgctctgtcgcccaggctggagtgcagtggcgtgagcttggctcactgcaacctccatctcctgggttccagtgattctcctgcctcagcctcccaaatagctgggattacaggcacccgcaaccacgcctggctagtttttgtatttttagtagagacagggtttcatcatgttggccaggctggtctcgaactcctgacctcaggcaatccacccacctcggcctcccaaagtgatggcattacaggcgtgagccactgcacccggcccaaaagctttgtgtttttaaagatattagacatgtttcttgtttttaaaagaaatcttaacaataatgtaggagagtaagacaaacatttttccaaaaaagagaaattgttgtgattattttgtcttattggaatgtcggatactatagtcggcttcattaatcatcaagcatgctatggattttccatttttataggatctatatctcagttaaggtaatactggtaattcttgtactccatttgaagatgaaaaatataggccaaaatcacagactttgcacagaagctgcataatgaagacagctctggaggaacacatagatacacacacacagacacacatatatataaagtatatacacatatattttttaaagtttattttttacagttttaaaagttttaaagcaaaacccagcccttcccctctcccagagtgggcggcccctcccctttctctgagtgggcggggacagcggttgcatgggcagctttccttatgatgccacaggtccctctggacatgctgctgcctggccacgcctcctttccctttcatctttctcactgaccaatgggcttggagccttaaggccgcgcccctattctgcgttccattggtgccctggttacgccacctgtggctcagttgcacagctgcctggtaggtgactggaggcattgagcagtgctcactggtatttcgctgatgtggccccaaccccgcttccctccccaccccgcgatgtcagaaaaaacacaacaggggaaattggccgcagccaagaaaaaggtaaaacacaccaggtcatggcccccaacccagccacagatcccctccgatgac

SEQ ID NO: 14566 - DNA, 2300 bp, Homo sapien
tcactggtatttcgctgatgtggccccaaccccgcttccctccccaccccgcgatgtcagaaaaaacacaacaggggaaattggccgcagccaagaaaaaggtaaaacacaccaggtcatggcccccaacccagccacagatcccctccgatgacaagacctgtgccagagtccataccactcctgaggcataccagatggggccccccaaccccagcccctctgggctcccccaaccaaagcctagtcagtcagccccaccccttcagcaagcagcccagtccctgcccttgccaatcaccccagggtgactttgggcaggtgactcctggggctccctgctccataatcagccctcacctcctgccaccccaagcccaacctccctgggctctttgggcttgcgtctcccaggacctgggtcccccagccccaggccctgccctcaccagtcatccctgggtggctttgggctggtgactcccggggctccctactgcagactctgccctcccctcctgctgccccaagctcgacctccctaggcttcttgggctggcgtctctgaggacctgggtcgaaaccgtgtgtttccctcccccatcgtggagcagcgactcgggcatcgcgctgatgtggtcccctcccctgggaggagtggaatgcaatgatgtcacagtgcccctaggaactgtcattactgctgcaagaccggcctttgatcttacaacccagtcccctaagttttctcaccccatttctggttcctctggttgcagcacaaatttccagctggaaggggagtggagactatgggacctaggagcaagaggtttcaggctgccttactcccttaacatagacattgacagtgggaaaagcctacacttcccctgtgagctcaaaatgttcacagtatctctgggtggcaatgggagaatgggtttggtttggttttttcccaggcttctactttccagagagactttaacatttttttctgagttctccacggttctgggaccagactgcccttcagtcagtggcctctgaagtgagatttgctcatcttctgtggaatagatcttgggaaactgaacttgacagcttgaatcttcctcatatcgtctcaacctggggtactttgagtgccacaggataaatgtgggacatctttctgaagcatcattttcccttgattctcttgagaaaatgcattaatgtacttagggatgacagacacataggtttccaagcgtataccagacttcgctctgaaatgaggcttgggttgtcctctttctgataaattcccagatttaatagaaaagctgccttctgccatgaggacacattgatatgaaagtgtgagaggtactggtacgcttcttcacgctagcagacctgtgaggatgtatgactctaaaccacacggcctacagttcctgcctgcttaatgtttacttttctacctctgcccctggttttggtccctggaagctgctgattcatggcaaaaccccagagcttggagtcagaggactgagtttaagttccagtattgccttttttgatctttcttttttttttttttctatccatgatatcaatccctctcagtcactaagtgattgtgacaacaccttgtacagttgttggtggcattacatcagatggtatataagggtattttgtcaaaactgtaaaggaggatgtggctgtaggggctgatcattctcatgagtgttaccgctcttctttcccacagttaaaagcatattggcagaggaagagccctggcattccagcaggagctaacaggaaaaagaaaatcaatggcagtagccctgacacagccacttctggtggttaccactcacctggggatgtgagtctcggcgggccagggtcctggggacagggggcccaaggggcagtagagggtaattgttaagattgtagatggactgttgggtactggttaagaattctggatttgaatcctgcctctccatctgctaagaattgattagggattgattagcatatgatttagggcaagttgcttgaggtctttgggcctctcttttcacatctgtataatagaggtggtattttttgacttccatttgtgaagtttaaatgagattcgttattgttgcttttatgtgaatccttagtacatggcctgctgcaaacacccaggacaccgaggaaatggtcgttgctgtttgattttcctcatccccagtctcaaggggaagccaggccaatgagaagagccacttgccatcaggctg

SEQ ID NO: 14567 - DNA, 2300 bp, Homo sapien
accttctccttccataaagtcgctgtggagccaaaataatggggtcacatgtcaggagtcacctgccttgtcccgaccccacccttgttggcccatgccaggactactcacctgcagcttctccatggccccctgcagggcctggtgggtctccccacacacagattcacccccagtctctggggctggggccgctacctctggctttttctgggacgaggccactgggtgagccaggggctggcagcacaccctttgctcctcctgggcattggctccagcggagttgaaaaatgccacctgaaggcaagaggtgagtattcttgtaggggtatacacataacaaccggggcagggagatggagcatagccccctcctttcgggcctcacagagtgcacctgttggtcacaggtgaaatggtgtctgaccactggctcccaggaggagtgaaagtccacagaagtcagaaggcggggaaaccaagaacataagggggtttcggagggaccacagaggaaggtggcaaagtaggggcagggaaagtcaggctcaccatggcctcccggctctccaggtcccctgggatgttcggcatgggccgaggcgcctcctgctcactgtccagatgtcctcctccatctcctgtggggggtggccagaggggtcctcagacaacccaacaagggaggtacagtgggcccgcctctgcccccacactcactgtgtaaccttgagccagcccctccccagaggggaatgagctgttctttattttgaattttaagaaccaagatcttgctatattgcccaggcacagtcccactaccgattggtgcaggaattctgacctgctccctttctgacctgggccagttctcccatccttaggcaagccgatgacctgttcccaggaggtcaccatactgataccgaacttagtgcggacacccagttggcataatgaccagctgtcttaaaggtctcttccaactcctcaatcctacgctgctaacagtccccctttcctcctggggctctctcctcttcctctgagtagtctcccataccttccccagggagagccatgaggctcaactgggctttagctgctgtttctactggctggtagcttccaggttctcctaaggggccaggaaagagggtgagaaggtacagaggttgccaggttgtccctcttggagccctgtcctcaacaactccctcccctgggtctcctgcaacatttggcgggccctcttagccaccgatttgccccgagcttcctcctgctgcagctggtccatgagccaggtctgcagcagtaactgcctgtgcagcgcctccttctcagaggccagctgctgacaagcagccacctgctactaagcaaccacgaactgctgcaggtgacacaggtactggtcttgctgctgctgctgactctgagcctcttggctcttcagctccacgtgcaggaaaaccctgggcatgagggcatgtggtggctggcttccagattcctggcccattaatagggtagcgagggcactgtggggctctgtggcctgcccaggcccctggccccttgctccaggcgtacaagactgcctcctttgcctagaaccacatgcctccttccacagcctcaaatctcatgtcctttttcccagcatttaaactgtaggccacagactggtggaaaagcaggggcagccaaccaccatctgctaagtgtgccacatacctaatgtttccaagtattatctcatttaatcctcagcacctctgcaaggaaaaggctaacttccttttgaagttaaacagagacttagagatgcaaagtagttgaattatgaccagtggaaccgaggccggaatccagtatgaatctaaggagtcttttttgtttttctattttgttttaagagagtgtcactctgtgtctcaggctagaatgcagtggtgcaatctcagctcactgcaaccttcacctcccaggctcaagtgattctcgtgtctcagcctcctgagtagctgggattacaggcatacaccaccaggcccggctaattatttttttttttttaattttagtagagatgaggttttgccatgttggccacgctgatctcaaactcctgacctcaagtgattgtcccacctcagcctcccaaagtgctgggattacaggcgtgagccaccacaccccaccaaggagcctcttataccactgtctcttcctctgtgattgggggggctccatgcctctagctgggatgatgatgtccagacctggga

SEQ ID NO: 14568 - DNA, 2300 bp, Homo sapien
cgggaacgtctgttagtgggtgaaagcacataatgcatagttcattagcttttttaaaaaatcacatgtaattgtgttacaaaaatatatgtatagtaatggcatttacttggtattacttggtttgtgtgatagaataaaatattagaattttatggtgtttgagttagttatctattgctctgtaacaaattgagcagcttaaaataacaaacattatctcagtttctgtgggtcaggattctgtccagtttaccttgggttcactggcttggcctctcaccaggcagtgaaggtgttggtggtggctgtgatcatcccaaggcaggatagggagagaatctgtctccaagctcaggttggcaggattcatctcagaggctgctgcactgggcctccgtttctagatggctattggtcagaggctttttacaataccttgtcacgtgggcctctccatagggcacctcatcacatggcaactggcttccatcagagggagcaatggaaagagcaggagaagggtgaccaaggcaggcatcgtagtctccttgtagcctcacctcagaagcgatgttacttttgctgtattctctttgttagaagtgagtcactaggtcgaggggtggaattttacaagggtgtgaatggcaggaggtgagggtgatcagggccatttagaggctgcctaccagtgttgaagaaaactgttgacttctatgagctgtagcagcagacagtgctatgcaaggagaatggctgtctcagaagtccagctcctcacatgggtttaaacgtgttgccttttcccccatacattttgtttaaatccatggtcatctttgccatttagtggtgtggtttaattgcatatttgggttagtctgtatgtaaacatttaacataggtgtctctgggttaaacaggaatcctattcatcttcttcaccgatatggtttgtggactctgatgagccaaatctgacatcagttctggaacgtctagaagatactaaggacaacagttcggtaaggaaagaaaccaagctattttctcttttcctcatgaacattatatttagaaattaaatgttaaatgataatattatataaaaacatgattaataactataatcttagaggaattaaagtctgggtattttaagtcctccaaatcttatttactacctggtttctctttattatttcccacatgtataatcttagtttagattagcaattcgggatctctttttccctgaattctaaccattaagccaagcaagcattttgggtggagaccactagccaaggtgggaagtagaaagaagaccaaggtggaagtgaagggagagatggggagaatgacaccagaactagtgggagggaattgccttttctttcaagggtctgtaagtctgcagtaaaagtcaaaggtattcaaataggaagttttgtttttgtctttagtatataaagaagcataactttccattttgcaaaaactttagaaatcttttttcttgattataaaacttataagcaaccattattgagaagattagtaaaatataaaaaaataaaaatctcacataatttctctacctaatataagtactgttgacatgatagctagtttctatcagtatgtattgcttctttgttatcaaagtacttatacccttacagatatgtttaaatagttgaggtcatattctataaatatctataaatagctgggtgctgtggctcacacctgtaatcccagcactttgggaggccgaggcaggcagatcacaaggtcaggagtttgagaccagcctggccaatatggtgaaacctcatctctactaaaaatacaaaaattagcccggtgtggtggcaggtgactgtagtcccagctactcggcaggctgaggcaggagaattgcttgaacccaggaggcagaggtttcagtgagtcgagatcgcaccactgaggtccagcctgggtggcagagcaagactccatctaaataaataaattatgtatacacacacatacacacaccctcatatatatatacacacatatgtgtgtgtatatacacacacacacacacacacacacacacacacacacatacacctacacatgaccgattgcctcgcctctagcattgggaatcagtcaccgtgctgtccttgtggagtcttgtggcccaacaagaggaagctctcccctgacattgcccctccaaagtgcgccacttccagtgcgccccactgtcatgcccggcctgtggacagccagaccctgcc

SEQ ID NO: 14569 - DNA, 2300 bp, Homo sapien
gatttcctgctggctgtgaaatacttgacagcgttcagcctctgtttcttttctttttttttttttttagcttaatcccaaatatgatagtaagtctcagtttcttgatctgaaaaacagaaattattcaatgacagtctatgtgaaaactttaaagttttcaaagccactatctagcttaggaaagtcctcagctttaggggttaaagtttttaaaaccactgcctggttcaggaaagccctcagctgtagccattattagctatgattattattgtggtggctacacatacattaatgaggcaggaaaatgctcaaggataacaagcaagtatccagattatctcatcagaccaagacagatgcatatgcatgcatgatcatgttttagctcagagccatttgtctaaaaggctcttgaactcagaggcccaggagtatcaactttgctttgcagtggagccatcgcttttgttaatcaatgaaattgacataatgctcttctcttttttttcctttttagcaccaaccatgtgcctagagctaactgtgttaagaagagcatgcttcaagtggctggagtgagcaattcaacttgtggaggaatgagaagtgacagtgttgagacaagcaacataaaaccccagggtaaggtagaaatcactgaaagtcaggcaaaggaactggcgtccagtaatgagtcaggctttgccagcctctggccctacagatggctctttgcagaggaaaaaattaagccaggcccgagggcacagatcctaagggaatgctggcagctctaggctgtctatgagagtccagagatgctgcttcaccctggggctttaggcaagtccctttccctcccagagcctcagcatcccttctagcaaatgacgttctgcctttctcctaggatggctgtggggatcaagggagacagtggccatagggatactatgttaactgcagatgcggctgtaggagcactttgctaacttccaacgtgagttcagactcttcaggctatttggcacccagatctatggtgaggtgtgacatatgggatgtaaagtttgatgcctgctccgactccagtcttgctaacacacacgaaacctttggtaaatcatgaccctgccttggggaaaagggcagtctgggagagcttcttcaaggcagcctggcttcaatgcagtctggggcatgactgagataggcatacgtggtgaggaactggagggcaactgggtaaagagctgcagtgtgggcagaggtgtagtgtgggtcacatcgcggatagccactggccaaagcagggaacagagacagaatgaggaagagctctgtggggagggtggggcacagggtggagaaccttcaaagtccaaagagtatgacttgttgggattcaacgctgtaggcagtagggagccatggaaggctcttaggtggagaaatgacagccggacattagtgagcaagccctgtctccctgagcagcatgggtggtcctctgagcacgccaggcacgagtgtgcagggagctggtgcaaatgcctctgtgtgcaggtgagcatctgtgttgtgactctgcccacgcatgtgcttcagcgtgccgagtggctgcacgccccagatccatgcggcacgtgccggccggtgagggtgctgggcattgggaggtggcggggagggcgacgtatgcgtgttgtttgtgggcatgtgtgtgagtgtgtgcatgtgggccgtggggcctcacagcatgtgtgtgcacactccggcatgtgcgtgtgtgtgtcccccacccccaggcctgccccacccatgcatgtgacctgccatgtgatttgaagctgtctttcagaatcactatcagtggcccctgaggagcgtcagccatggtaggtacatgcctcactgcctgctgcatgaatggtctgcctgccccgctgccccagctccacacagggggcatacctggagcctcagagccaggctccctgcccctcccttctggagctgcagacttgctctttcctctttctgtccttgtgctgctggctgtctcactttgctccctgtgagccatgggactcagtgccactgctcaaggtctccatggctgagcctgggggctcttacaacaggctccatgcccaaggtggcagttgtggaaccatcagagagggcacagagctcatggtttatggtgtaggggctgggagcttggagggggttgtgtggggggctggactcaggcggccagaggcctgggaacatcatcctgggcacgccgt

SEQ ID NO: 14570 - DNA, 2300 bp, Homo sapien
ctttgatcttacaacccagtcccctaagttttctcaccccatttctggttcctctggttgcagcacaaatttccagctggaaggggagtggagactatgggacctaggagcaagaggtttcaggctgccttactcccttaacatagacattgacagtgggaaaagcctacacttcccctgtgagctcaaaatgttcacagtatctctgggtggcaatgggagaatgggtttggtttggttttttcccaggcttctactttccagagagactttaacatttttttctgagttctccacggttctgggaccagactgcccttcagtcagtggcctctgaagtgagatttgctcatcttctgtggaatagatcttgggaaactgaacttgacagcttgaatcttcctcatatcgtctcaacctggggtactttgagtgccacaggataaatgtgggacatctttctgaagcatcattttcccttgattctcttgagaaaatgcattaatgtacttagggatgacagacacataggtttccaagcgtataccagacttcgctctgaaatgaggcttgggttgtcctctttctgataaattcccagatttaatagaaaagctgccttctgccatgaggacacattgatatgaaagtgtgagaggtactggtacgcttcttcacgctagcagacctgtgaggatgtatgactctaaaccacacggcctacagttcctgcctgcttaatgtttacttttctacctctgcccctggttttggtccctggaagctgctgattcatggcaaaaccccagagcttggagtcagaggactgagtttaagttccagtattgccttttttgatctttcttttttttttttttctatccatgatatcaatccctctcagtcactaagtgattgtgacaacaccttgtacagttgttggtggcattacatcagatggtatataagggtattttgtcaaaactgtaaaggaggatgtggctgtaggggctgatcattctcatgagtgttaccgctcttctttcccacagttaaaagcatattggcagaggaagagccctggcattccagcaggagctaacaggaaaaagaaaatcaatggcagtagccctgacacagccacttctggtggttaccactcacctggggatgtgagtctcggcgggccagggtcctggggacagggggcccaaggggcagtagagggtaattgttaagattgtagatggactgttgggtactggttaagaattctggatttgaatcctgcctctccatctgctaagaattgattagggattgattagcatatgatttagggcaagttgcttgaggtctttgggcctctcttttcacatctgtataatagaggtggtattttttgacttccatttgtgaagtttaaatgagattcgttattgttgcttttatgtgaatccttagtacatggcctgctgcaaacacccaggacaccgaggaaatggtcgttgctgtttgattttcctcatccccagtctcaaggggaagccaggccaatgagaagagccacttgccatcaggctgtccctttaggagtcactgaaagggccccagggtgggatggtggggagataagaaccacgagagaagttggcacaaaggagttatgggaaaaagggtccaagataggcagaaaagaagcttttgccagttgatgggggaagaaaggaagtcagagggcttagacagtgaggggggacagaacatctccatgtgcactctcatctcttgcagtcagcaacaggtatctacggggagggccgtgcatcctctactaccctggaggatctggaggtaagaggccctgggccgaggtgcagtgaccctgcaggccagccctccaacctcctcccacagcaggggcttgttgcccctctgccagctgaggcagcccacacacccccaccagccctaatgattattctctctacccctccccacaatcttcctccaactccttctctctgcatgcacctcagagccagtaccaagaactagcagtggccctggattcaagctccgcaataatcagtcaactcactgaaaacatcaattcactggtaagagtccagtggggtcccctgattacagctggtcaatcctggactccagtttcctcttggggccctgaagaaaggagctaggggcccctgatgccaagggcaaatggggagctgggcacccaggtctcacctggagggaccccagagcacagaacatgcagcatgggtcttctgcac

SEQ ID NO: 14571 - DNA, 2300 bp, Homo sapien
tcactggtatttcgctgatgtggccccaaccccgcctccctccccaccccgcgatgtcagaaaaaacacaacaggggaaattggccgcagccaagaaaaaggtaaaacacaccaggtcatggcccccaacccagccacagatcccctccgatgacaagaccggtgccagagtccataccactcctgaggcataccagatggggccccccaaccccagcccctctgggctcccccaaccaaagcctagtcagtcagccccaccccttcagcaagcagcccagtccctgcccttgccaatcaccccagggtgactttgggcaggtgactcctggggctccctgctccataatcagccctcacctcctgccaccccaagcccaacctccctgggctctttgggcttgcgtctcccaggacctgggtcccccagccccaggccctgccctcaccagtcatccctgggtggctttgggctggtgactcccggggctccctactgcagactctgccctcccctcctgctgccccaagctcgacctccctaggcttcttgggctggcgtctctgaggacctgggtcgaaaccgtgtgtttccctcccccatcgtggagcagcgactcgggcatcgcgctgatgtggtcccctcccctgggaggagtggaatgcaatgatgtcacagtgcccctaggaactgtcattactgctgcaagaccggcctttgatcttacaacccagtcccctaagttttctcaccccatttctggttcctctggttgcagcacaaatttccagctggaaggggagtggagactatgggacctaggagcaagaggtttcaggctgccttactcccttaacatagacattgacagtgggaaaagcctacacttcccctgtgagctcaaaatgttcacagtatctctgggtggcaatgggagaatgggtttggtttggttttttcccaggcttctactttccagagagactttaacatttttttctgagttctccacggttctgggaccagactgcccttcagtcagtggcctctgaagtgagatttgctcatcttctgtggaatagatcttgggaaactgaacttgacagcttgaatcttcctcatatcgtctcaacctggggtactttgagtgccacaggataaatgtgggacatctttctgaagcatcattttcccttgattctcttgagaaaatgcattaatgtacttagggatgacagacacataggtttccaagcgtataccagacttcgctctgaaatgaggcttgggttgtcctctttctgataaattcccagatttaatagaaaagctgccttctgccatgaggacacattgatatgaaagtgtgagaggtactggtacgcttcttcacgctagcagacctgtgaggatgtatgactctaaaccacacggcctacagttcctgcctgcttaatgtttacttttctacctctgcccctggttttggtccctggaagctgctgattcatggcaaaaccccagagcttggagtcagaggactgagtttaagttccagtattgccttttttgatctttcttttttttttttttctatccatgatatcaatccctctcagtcactaagtgattgtgacaacaccttgtacagttgttggtggcattacatcagatggtatataagggtattttgtcaaaactgtaaaggaggatgtggctgtaggggctgatcattctcatgagtgttaccgctcttctttcccacagttaaaagcatattggcagaggaagagccctggcattccagcaggagctaacaggaaaaagaaaatcaatggcagtagccctgacacagccacttctggtggttaccactcacctggggatgtgagtctcggcgggccagggtcctggggacagggggcccaaggggcagtagagggtaattgttaagattgtagatggactgttgggtactggttaagaattctggatttgaatcctgcctctccatctgctaagaattgattagggattgattagcatatgatttagggcaagttgcttgaggtctttgggcctctcttttcacatctgtataatagaggtggtattttttgacttccatttgtgaagtttaaatgagattcgttattgttgcttttatgtgaatccttagtacatggcctgctgcaaacacccaggacaccgaggaaatggtcgttgctgtttgattttcctcatccccagtctcaaggggaagccaggccaatgagaagagccacttgccatcaggctg

SEQ ID NO: 14572 - DNA, 2300 bp, Homo sapien
tttttgtaggaaaacatctctaacttaagcctgtaggattcccaaagattaaaagcaggcaaatatgatttcagtcaaatcatagcattcaagtagtctcaacccaacatatttgagaattgttagaaacaatgaatatgtttcccaaagactaggttttggaattatcagatacagaacacagacttcaaatattagaattgtgagaaaatagttacatgtcaaacctaatataaaagaaagatggactcattaaattgagcaacagaaaggccaccaggaatgaggaggaggacctgaaaagaaaatggatgaactagaacttacagaaataaaatatatagctgggtctggtggctcacacctgtaatcccagcactgtttgggaggccgaggtgggaggatggtatgagcccaggagttggggagacaagcctgggcaacatggtgagaactcgtttctgtaaaaaataccccaacaccaccaaaaaaaaaaaaaaaaaaaaagtagctgggtatggggcacgtgtctgtagtcacagctagtcaggaggctgaggagggaggatcacttgagctcaggaggcaagggctgcacgtgcatgccactgcagtccagcctgggtgacagagtgagactccgtctcagaataaaatgaaataaagaaataaaaaatgtaattgttgaaataaaaaactcagtggatggattagacatcagaagaaagaattagttggttagacaattatctcccaaaagtgagtcagtatgttacacagagagacatgaggatagatgatagggcagaagttggtggggttgtagggggagggagaccagaatgaggtctaaaatatgtcttagtggaatcccaggaggagatattaaaattatattagaaagtgagagaaatagaagttctaaaggcaatagaaggaagtccacataaatcagtcacaacaaatgtaaatggactaaagttaccagttaggtggaactaataaaagaatatccagctgttttaatccatcatatttaaaatataaggatatgagaagattgaaagtttttataaaggagagagagtaatgaagatatggcagtatacattaaccaaaaacaagtgatggagcttcagtatcaaaaaaggattttggaacagaaagcattagtaagaaacttgatgctgactgttaattaggaggatgtagcaattttcatattttatgtacctgtcaaaatagcctcaaaatgcaggagaaaaactgataaaaccacagggagaaattgacaagtctgccagcatatttggagatttcaccataccctgcttaccataagtaagttacacagaatgcccatatgtagatttgaataaccagtgaatggacatggtgtaatggacaaatataggcctttgtacccaataattagatattctatattcttctcaagcatatgtggactgtgggagaaacattaattatatattaattcgtaaagcaagtcagaagatttaaaaacaattggtaccatccacaccatataatttataatttaaatatgaagcaattaaggttagaaggcaataatgaagagattaacaaaaagctacatgaatttggaaattaaacacccttgtaattcatggtataaaaaactcaatacaattttagaatgcttagaattgaaccatagttaaaatatgaaacttctctctgttcctgtctctctccctctccctctctcttcctatctggaacattcaagaagctaatctttttcaatgaagaacaccccaaatactgaaaagtaggaaaaagacagatggcatttcatggtaatcccttcccccaagagtgtagaatgtttctttagcttctttgatagtttgtttacttatttattaagtacttactataaaccagactctgctttaatttgtgatgaacaacctagagattaagtcctgccctatggattttatattagagtgagaaaaacagatagctaagtctggagctcaggggtgaggcccaggttggaattatagattcacttgaccaaggtgaaacctggtgtgccccctcctacttcacatccccagacatacttctggaacatttctgttctattcttgtgtataaactcttccttttgagcctctctccattaatgcatgtcaacctctacttgtcttttgttgattttgaggccacttgcccatataacttggaggatattgaagaagaatcataccgacctggttctgctacctaccagctgagttactttggtc

SEQ ID NO: 14573 - DNA, 2300 bp, Homo sapien
actttttttgtttccctctgtgcctatgcttaccaagtctttttattttttactttttattagctctttcaatcctcttaataactttaaaagagggtattattaatatctgcattttacagatgaggcaactgaaggtaggtaacttgtccaaagtcacaggtggcagagcaaggattggaaccagacagtctgactgccctaggcccaaccaagaggagctgagagcaagccacggggcagaaggatgttggaggctggttttctgttcagttaacatgaaatgcaggctgtaaccttaattccaggacattactgagaaagtcttccaaagccagaggggttttttttgttttgttttgttttgttttccatgaccatgacttttgagcaaaaatttggttttgtttaaaggcaatatggtgctctaagaaacttccactcacacttatggagggaatggtagttgagctaaatagtgaaatgctgtagcacacagcctttagggcagcttctgacctatttctatggtcaggaaagacacctatctttgcctgctgcccacagcctctagttattcaccttcagaatttcctagtctgtgatcacattcagatgagagatccgttttgttttttccagggtagcaggaagtgagtcaccacctatactaagcagtctagtcttctgtgtataaatgagcaagggtggggagccagatctgagaaccttgtgtaatgctgagatgctccaagagaatccaagaggatgtcaggattatgcatggtggtaaagtggtctcatgttagttgtacccacagctctcatcagaagcagacacagatactttttgtaggaaaacatctctaacttaagcctgtaggattcccaaagattaaaagcaggcaaatatgatttcagtcaaatcatagcattcaagtagtctcaacccaacatatttgagaattgttagaaacaatgaatatgtttcccaaagactaggttttggaattatcagatacagaacacagacttcaaatattagaattgtgagaaaatagttacatgtcaaacctaatataaaagaaagatggactcattaaattgagcaacagaaaggccaccaggaatgaggaggaggacctgaaaagaaaatggatgaactagaacttacagaaataaaatatatagctgggtctggtggctcacacctgtaatcccagcactgtttgggaggccgaggtgggaggatggtatgagcccaggagttggggagacaagcctgggcaacatggtgagaactcgtttctgtaaaaaataccccaacaccaccaaaaaaaaaaaaaaaaaaaaagtagctgggtatggggcacgtgtctgtagtcacagctagtcaggaggctgaggagggaggatcacttgagctcaggaggcaagggctgcacgtgcatgccactgcagtccagcctgggtgacagagtgagactccgtctcagaataaaatgaaataaagaaataaaaaatgtaattgttgaaataaaaaactcagtggatggattagacatcagaagaaagaattagttggttagacaattatctcccaaaagtgagtcagtatgttacacagagagacatgaggatagatgatagggcagaagttggtggggttgtagggggagggagaccagaatgaggtctaaaatatgtcttagtggaatcccaggaggagatattaaaattatattagaaagtgagagaaatagaagttctaaaggcaatagaaggaagtccacataaatcagtcacaacaaatgtaaatggactaaagttaccagttaggtggaactaataaaagaatatccagctgttttaatccatcatatttaaaatataaggatatgagaagattgaaagtttttataaaggagagagagtaatgaagatatggcagtatacattaaccaaaaacaagtgatggagcttcagtatcaaaaaaggattttggaacagaaagcattagtaagaaacttgatgctgactgttaattaggaggatgtagcaattttcatattttatgtacctgtcaaaatagcctcaaaatgcaggagaaaaactgataaaaccacagggagaaattgacaagtctgccagcatatttggagatttcaccataccctgcttaccataagtaagttacacagaatgcccatatgtagatttgaataaccagtgaatggacatggtgtaatggacaaatataggcctttgtacccaataattagatattctatattcttctc

SEQ ID NO: 14574 - DNA, 2300 bp, Homo sapien
actcctgacctcaggcgatccagctgcgtcagcctcccaaagtactgggattacaggaacgagcactgcgcccggccaaaaccccgaaaatcttgaaggcctttccccttccccgcccgggctcaaacaacagccggagacgccctgccacgccccgtcgcggtcccggggagcaggctggctgactgagggcgaccatgggccccgaaagggctgcgggcgacgcgggctcccacctcggggcgcggtgactggggcgagaggtgccggcagcccccaagccagccccgcagcaaggagccagagagacgcgccctccccctcctcccacccaagcctcccgcagtcccggcgatcggggccaggccagtcgcgggagaaaggtgcgcgctcacccggcccggggaaccggggcctctcctgggcaggttcccctttgtcccgggactccgggctcttcctctccgccctcgccctgccgtgtgaagccgccgctgggcgcctcaccgtgatgttgcagtggagcctgagctgccgcggcggctcctggttcttgtggaaaatagaggacaacaacttcagcttggccttgaaccctgacacggacattttactctcacctctggcgggaggggcgcggaaggtgagccggtcgggagccgctgtcatggccgcgaccacccgcgggacctctcggcggcgctctcgcggctccgcctctccccgctgcctcaactctagtcggagtagggctggaaaatggcaaggggcaccgaggcctctgcggggagctgtgtggcggcctgggcggctgctccccttgtaacagactccaccgacaggaggcgctcctcctgtcaagccacagcttaaaaggacaacagcaccaccgcccccgctaccgcctgggaaagggctgcccctaccccgctcccgtccctctcgtccctcacccctcacccctcacctctcacccccgcgcgcccggtgcgcacccgtttcggcgggtgcacgagtccagagcatgtgcgcgcttccggctgccccctcctggctttgacccagcactgctggacccatctagtccgttcctcacactcgcggactggaagctccaggctgcacaaccaccaactggtgtgtgtgtatttaggggcggggggaggtacaaaaccaccaactcgtgtgtgtgtgtgtgtgtgtgtgtgtgtgtgtgtgtgtgtgtctcccaagggaacagcactgctgagttcaggctatcagctcatggactgtcagcaaaatacagtcacaagaaggctatgtgctgttttgtcttttgcagtgatgtcatgttgctcatgttttatgtttttcagagttcattagtttctttttgttctcagtaatatccagctcaatagattgtgtaagtagaatacccccaaactgaaagtcacctacataaaatatagtgaaaaatatgtcacccacttaaactatagttgaaaatatgtactcattagttttgtgtagccaacactggataatgggtaaggaagggcacaggatcccagggctagactgcctgggttcaagttccgatttagctgcttgctggctgtgaaatgcttgacagctttaagcctcagtttctttttttttttttaacttaatcccaaatgtgatagtaagtctcagtttcttgatctgaaaaacagaaattattcaatgagagtccatgtgaaaactttaaagttttaaagccactttctggctcaggaaagtcctcagctttagctgttaaagttttaaaagccactttaaagttttaaagccactgcctggctcaggaaagccctcagctttagccattattagctatgattattattgtgctggctacacatgcattaatgaggcaggaaaatgctcaaggataacaaccaagtatccaaattatctcatcagaccgaaacagatgcatatgtttgcatgctcatgttttagctcagagccatttgtctaaaagactcttgaactcaggggtccaggcagtatcaactttactttgcagtgaagccatcacgtttgttaatcaatgaaaacgacataatgctctttttttttttttttttttttagcaccaaccatgtgcctaaagctaactgtgtcaaaaagagcatgcttcgaggggctggagtgagcaattcaacttgtggagaaataagaaataatagtgttgagacaagaaacataaaaccgcagggtaaggtaggaatcactgaaggtcaggcaaaggaactggcatccagtaatga

SEQ ID NO: 14575 - DNA, 2300 bp, Homo sapien
caactgccagcagagcaccccaaacctaaagaaccctgcacagctgtctctgtggggcatggcgtgtccatggatgtaaagattttccaatgtgtgcttacgggcctgtggcatcaccctcagtcactgtcaaagggtagctaggccctgcccgctaggcaccatcctgagaatctgctgagctttctaactagtttatctgttgtttgcagtgaaagatgccctgaaaagaaggggtgtgggtgggaagagttctgatttgaggtcccctgatccaggcatgctcttcttccccagttgcaggaatcaggggactctatctgtaaatgcgggctcaagccatgccccccagctccctctttcaaccaggtgccaccctctgcttctcttccatagacagcctagagctgccagcagtcccttaggatctgtggcctcaggcctggcttaattttttcctctccaaagagccatctgtagggccagaggccgtcaaagcctgactcattactggatgccagttcctttgcctgaccttcagtgattcctaccttaccctgcggttttatgtttcttgtctcaacactattatttcttatttctccacaagttgaattgctcactccagcccctcgaagcatgctctttttgacacagttagctttaggcacatggttggtgctaaaaaaaaaaaaaaaaaaaaagagcattatgtcgttttcattgattaacaaacgtgatggcttcactgcaaagtaaagttgatactgcctggacccctgagttcaagagtcttttagacaaatggctctgagctaaaacatgagcatgcaaacatatgcatctgtttcggtctgatgagataatttggatacttggttgttatccttgagcattttcctgcctcattaatgcatgtgtagccagcacaataataatcatagctaataatggctaaagctgagggctttcctgagccaggcagtggctttaaaactttaaagtggcttttaaaactttaacagctaaagctgaggactttcctgagccagaaagtggctttaaaactttaaagttttcacatggactctcattgaataatttctgtttttcagatcaagaaactgagacttactatcacatttgggattaagttaaaaaaaaaaaaagaaactgaggcttaaagctgtcaagcatttcacagccagcaagcagctaaatcggaacttgaacccaggcagtctagccctgggatcctgtgcccttccttacccattatccagtgttggctacacaaaactaatgagtacatattttcaactatagtttaagtgggtgacatatttttcactatattttatgtaggtgactttcagtttgggggtattctacttacacaatctattgagctggatattactgagaacaaaaagaaactaatgaactctgaaaaacataaaacatgagcaacatgacatcactgcaaaagacaaaacagcacatagccttcttgtgactgtattttgctgacagtccatgagctgatagcctgaactcagcagtgctgttcccttgggagacacacacacacacacacacacacacacacacacacacacacgagttggtggttttgtacctccccccgcccctaaatacacacacaccagttggtggttgtgcagcctggagcttccagtccgcgagtgtgaggaacggactagatgggtccagcagtgctgggtcaaagccaggagggggcagccggaagcgcgcacatgctctggactcgtgcacccgccgaaacgggtgcgcaccgggcgcgcgggggtgagaggtgaggggtgaggggtgagggacgagagggacgggagcggggtaggggcagccctttcccaggcggtagcgggggcggtggtgctgttgtccttttaagctgtggcttgacaggaggagcgcctcctgtcggtggagtctgttacaaggggagcagccgcccaggccgccacacagctccccgcagaggcctcggtgccccttgccattttccagccctactccgactagagttgaggcagcggggagaggcggagccgcgagagcgccgccgagaggtcccgcgggtggtcgcggccatgacagcggctcccgaccggctcaccttccgcgcccctcccgccagaggtgagagtaaaatgtccgtgtcagggttcaaggccaagctgaagttgttgtcctctattttccacaagaaccaggagccgccgcggcagctcaggctccactgcaacatcacggtg

SEQ ID NO: 14576 - DNA, 2300 bp, Homo sapien
agacagcttctttaggactctccagtgacaagctagtgccagttctgtggtcaagggttgacatgggttaggaacagaggtaaataaacgcttgagctgctggaaagttccatctgtgcatccccagcctcccctgcatcttttcctttttgtgtaaatttccattcctggtaaggatggacacatggagaaacccatcttttttaatacaatgtcatcccaaaaaaaatcacttggaggggtggtggcccagaattctgcatccaggggcttagtgcagacttctcaggctggcctggaggtggtgctatttgcatgtggtcagtctgggataataaagatgctaccagggtattggataagaatcactagctgaacttcactttgcatctctgtaattggattcaagaggttaattagtgaaaaacaggtgaatttcacataatctttggagtggtgcagaggactttctaacacaaaactcacaggctataaaaagataagattaacaaatttgactgcaaaaaaatttcaaatttctatatttaataaaccagcagaaaacaaacagcaaactgagaaagagtagcaactgctgtgacaaagggataattttcttaatatacaaagagctcttacaaataaatccaatttaaaaatgggaaaaggaccgggcacgtggctcatgcctgtaatctcagcactttgggaggccaagacggctggatcacctgaggtcaggaattcaagaccagcctgatcaacatggtgaaatctctgtctctactaaaaacacgcaaaattagccaggtgtggtggcgcacgccggtaatcccagctacttgggaggctgaggcaggagaatcacttgatccgagatcgtgtcactgcactccagcctgggcgacagaggaggaaaaaaaaaagcagtcatttcattgcaggtgcctccagtaattgctcagtgcaaacatacataactattctatcacagaccattaagggtgtctctctccatttttagattttccgcttgagtttccaggtagtttctcacctgttttcaagcagggttggggcagccgtttcttcaacagcgccagccgtaaaacacaaagatggaggccaacctcccacacccgggcaccctcccttcccccatactgagattgacaagtaagcaacccggtgatcagtactaaaatggagacgtcagccaggtgcggtggctcacacctgtaattccagcactttgggaggctgaggaggaaggatcgcttgagcccaggggttcgaggtcagcctgggcaacatatggaaaccctgtctctatgaaatgtagatcctgtctgtgagtgtgtgtgtataaataaatatatatatatatatacaaatacatacatatatatatttaaaaaataaaatggggacgtccaacacgtgtactaggggcggtgtctctgcctggggaggtggtgatgacagggcaggctccacccaggagaagctggaagaatgggagttccgcggcagaggaggcggggcagggcgttcctccaaacacaggaataccacgtgcgaaaacaaaggggtgtgcgaagaccgggtgcatgtgtacagctgcaaactgggggaaaggcgccaggcttgggcgatgaggatttgttcccccatggattcccttcctgcccagggtccgctctcgccggtcgagggtgcctaacaatactccttgccacaaggttcgcagccgaaaaggtccttcaagtccggccatccaactttcactttttatagacaaatatacagaggccttagataagtgaaacggcttgtctcgggttacagctctagccaacacagggtttctgacggtcagtctgcggattttcctgcctctggtccgcaggcactgcccaggctgtcagccccaaaccctactccggggaccgcggtcaggttcgtctccgggcggactacatctcccacaatgccttgggcccagcctccctcctgccgcccggctgggtgccgtctccaccaacagaaaggcagaatttccagggccgttctcggcagccaatgagcgcggcggtgggcgggcctctcccgtccattgttctcggtgccccacgggcttgagccggggtgaatctggaggggccgggccgagcccgggggcgctttcgcacgcgaagcaaccgctagagcaggacctggtctcccgagaggtgagccggagaggcaggcctggagccacgcggaccccgggcagtagcccgaggtgagggaatagtggg

SEQ ID NO: 14577 - DNA, 2300 bp, Homo sapien
tagtctccatagtctctcacagatggccttggagattaccaaatggagggcggttctagcctccctgctccctggcccagttaagctatttcagatctttggacaaaatctcacttttgtcctttttcctttttcaccctcttgataaaatatcccacagccatatgggaaatggaagtagaattgccgggaagcaaccaggaaggaagtagtggtggcgcatgcctgtaatcccagatactcaagaggctgaggcaggaaacggaagtaaaattgccgggaagcaaccaggaagggctgtggcagctgccaggcaaaggtctgaactctgccaggggctttgaggctgggaatgctgagtagggaggcagaatgtgcacgctgtggttcccgaatgaatggctctgagggaggaaggcatcttggatgatcccaggttttgggattgggtgaggcaggataggtggcggtgctactcacaaagaggaaaggcaaggagaggcagtcaggggacatgctgagtttgagattccaggaacaacttcagcaggtgagtaggtggcaggaagaagccaagagagacttgaaatcaagacaggaaagagctgatggggcaaggtcctgatcctggagaagtggaggggaagctccgggtggaggttactatgaagctgaaagcatagctccaggctgagcgtagaggtgagaggctgagggagcgcagagagtttgttggcctggaggtgggaaacagcgggagttcacacctgacgggttcagggttctcagatgtgagctgagcctgggagctgacattctgagaatggccaaagggtacacagccattgtggggactgggaaagggaagtgacgaaagtcaggtaaaagacttgcagaggtggaccagagggccacgttgagggtgaagcaattgtgtttttggttatgttttgctttttttttttttctctttttcttttccttttgaagacagaatcttgctctctcacccaggttggagtgcagcggggcgacctcggctcactgcaacccctgcctcccgggttcaagcgattctcctgtctcagcctccagagtagctggaactacaggcgcctgccaccacgcccagctactttttgtattttttgtagagatgaggttttgccatgttgcccagggaggtctcgaactcctgagctcaggcaagccacccacctcggcctcccaaagtgttgggattgcaggtgtgagccactgtgccagctctttttaccatttattgtagacttttttttttttgagatggagtcttgctctgtcacccaggctgcagtgcagtggtgcgatctcggctcactgcaagctccgcctcctgggttcatgccattctcctgcctgagcctcccaagtagctgggactacaggtgcccgccaccacacccggctaattttttgtatttttagtagacggggtttcaccgtgttagccaggatggtctcgatctcctgacctcgtgatccacccgcctcagcctcccaaagtgttgggattacaggtgtgagccaccacgcccagcctagttcaggtttttaacacagtaaaagacagactcaggaaaagaatggaactctactttattaaggaatactgagcatccatcctataagaactaagcccattctgagcacaggccccatgtgtaggaggaggcagtttcccatttcctggaaatgccttatctcctcttccttcacagcaaaccccttcacctgccgtcatgcccgtcttcactctccaggtgcgaggatcccgagaacaaagccctggtagcatcctgagatcaagggcgacacctgtaggacaaactcctgattcaagcccaaatatctccagggaacagatatgtcctcaaagttaacacttctttaaaaataatgttcttggccgggtgcgctggctcacgcctgtaatcccagcacttcgggaggccaaggcgggcagatcacgaggacaggagatcgaaaccatcctggctaacgcggtgaaaccccgtctctactaaaaatacaaaaaaagaaattagctgggtgtggtggtgggcacctgtagtcccagctactcgggaggctgaggcaggagaatggcgtgaacccgggaggcggagcttgcagtgagctgagatggcaccactgcactccagcctgggtgacagagtgagactccgtctcaaaaataataataataataatgttcttagtatacaaaagctacccgacaggattctagctcggcatat

SEQ ID NO: 14578 - DNA, 2300 bp, Homo sapien
ttttctcctaggaagaggttgtttaggatcctaattgtagttcggaggttcattctaaaggttcttctcgattccctttttctaaagacaaggagaacgacccccttgcaggcaccccgtttggtttctagtttggaagtgcattctaaagggtcttctccatggctttttctcccaaattaagttcagtgggtttgtctgcactgagactttttgttgacactaagttaagagggatagaaggaatttccatggccctgcttcgcaactgattctctagaaagccctttctgttatcctgtccttccctcacctaaccacaggctgctcctactgtgggggcaagcacagctctccccaccttcattgaatttgaacctttcatctgttaaataagaagtgaaacctacaatgcagggttccaggtttccttctcagaaccaaaccagataaaatgtgtaaagtaggtcctttccctgaggctgcacgattctgggctctcccagcccttccttggtttttttttttttttttttttgaaacagtctccctctgtcacccaggctggagttcagtggcatgatttcagctcactacaatctctgcctccccggttcaagcgattctcctgcttcagcctcctgagtagctgggattaccaccacaccaagctaatttttttgtatttttactagatttggggtttcaccatgttggccaggctggtctcgaactcctgacctcaagtgaccggcccgccttggcatcccaaagtgctgggattacaggcgtgagccactgcaccggtccgtccctggtatttctatcaagtcatttcctttgaacacacctccatttagcacgtagcatttcgcaaagcatttaatagcactgcattgtagttatttgggttgcacataactccgtggcagcgttttagaaaatgcaccctccgctgcattgcattccttaagaggaaggagtgtctcctttttttttctcccaccacagcacactcgctgcctggtgcttggcccgaattgctccccaactgttgaatgaaagtcaatggtattaatctcgaatgacccaggactgtgcaagcaggaaatgaggaattgtgtgagtggtaagtgagggggggaggaacagagtggtaaagcattaccacagctaccaaccatgccagagaaaagcactttaagtggcagaaaaccttaactggagtcccagcttcgtaagggcagagacctcagtcccaagctgtctcgatatattcatctgcatagtaaggataaatagggactaacagggttaaacagctgccctcggccctaagtgaaaatactttataaactggcgtggcagctcatgcctataatcccagcactttgagaggcccacgagttcaaaaccagcctgggcaacatagttagacctcgtctctattaaaaacaaaacaaaggccgggcgcggtggctcgcgcctgtaatcccagcactttgggaggccaaggcaggtggatcatgaggtcaggagctcaagaccagcctggccaaaatggtgaaacgccgtcgctactaaaaatacaaaaaaaaaaaaaaaaatcagccgggagtggtggtgggtgccttgtaatcccagctactcgggaggctgaggcagagaactgctcgcacccgggaggcggaagttgcagtgagccgagatcgcgccactgcactccagcctgggcgacagagcgagactccgcttcaaaataaataaataaataaaaaataaaaaacaaaacaaaacaaaaaatttttgtaaagacccctctcgctcataccaccagggccgcgcagggcgagagatctccacctcccctgggaggcaagacccacaccctcccaggtgcgcgagttgtggctgcggttcgcgaccccgccccacttacccagctggtagaaaagtcatcaatgattcgtctgaaacgaataggcgcctgagatattctcccattttatgggctaacgctgctgtctgtcttcgggcggcggcctctgggaaatgtagttccggagaacacggagtccttctggggctaggttttccgcttccggtgctcagtggctagccgaatagccgtgtttgggacctgggctcgggcttcttgcgtccccgctaagaacatgtcacggggccgaatcgtccgtattctctcagcttcaagctcctctacttttcaaccaggtcactagcccttgactcctcttatcaaacttccggaactgccaccccaccagtgactccacagg

SEQ ID NO: 14579 - DNA, 2300 bp, Homo sapien
ttttttaaataaaaatctttctttttttttagagacaggggttcaccatggtgcccaggctgatctcgaactcctcctggactcaagctatcctcccacctcagcctcccaaagtactgggattacagacatgagccacatgcttgacctgaattttaactgcagttaattatcacttaaccagcgaattcacacaggagaaatcccctggccgggcgcggtggctcacacctgtaatcccagctcttcgggaggccgaggtgggtagatcacaaggtcaagagatcaagaccattctggccaacatggtgaaactccgtctgtaccaaaaatacaaaaattacctgggcatggtggtacgtgcctgtaatcccagctacttggcaggctgaggcaggagcattgcttgaacccatgaggtggaggttgcagtgagccgagatcacgccactgcactcaagcctgggtgacagagcaagactccatctctactacaaaaaaaaaaaaaaaaaaaattcaaccaccttaggaagcctctcatttatgtatttctagcatgtaattagtgttgcacatgggaagggctaatagatgctgacagagtgaacaacttatctattttgtgtgtgtgtgtgtaacagggtctcattctgttgcccaggctggaatacagtggcatgatcacagctcactgcaaacttcaactgccaggctcaggcaaccctcccacctcagcctcttgaatagctgggactgcaggctcataccaccacaaccagctaacttgtatttttagtagagacaaggtttcgccatgttgctcaggctagtctcgaactcctggactcaagtgatccacctgtcttggctgcctacattgctgggattacaggcatgagccaccatgcccagccaaatttttttttttttttaagggaagggatcttgctatgttgcccaggctggtctcaaactcctcagctcaagcaatctgcccacctcagcctctgaaagtgctgggattacaggcatgagccaccatgtccagcacactttaatattcactatgggccctcaaaaggaaatgtttgtggggccaccaaaagcaaatgtctcttgaacctagtcacctggggggacaagtgtgggaaagtgcacctgtgttcccatgagacccactcaagaggagcagaaatcctgttttgctatttccttaattgctactagggctgggattttttcatgtttattggcccctctacatttttttctttaaaaaaattcacaaagcatgtttatatttgttagctcttttgattctccctatgatagtgtgaagacagggacaaaacgctaccatttcacactcccagatctaacaatagctaccaagtaattatgccatgcgtttcttctaaccttcgcaatatcactacgaggtagttcttactatcctcattttacagataaggaaactgaggctaagtgacgctggcagacttgcccaaggccacacagctggtaacagggactggtagtcacttgagtcctacatgagcacccttgctactacagcagctcctcccctttctagaggcctagatggaaagatgctggtgtcagcggggggcacaaaggtccacccagtcccacacatgcagagaggcatcatttgttgctgataacaaagtccttggtctgcagggatgccaggtgtgggtggtgaccaaaggagcagggtccatcccatttccatctaggaagatgtgacctctgtgagtgaagagaggttctacttggctccgtgttccatcttggctccgtgttccatcccaagatgtggcatcatagacctggactgtaccatcaaaacctgagaatacagaaaagagaggcttgacaatgagtccctaattttattttaaaataattttctttctatttttaatagagatggggtttcaccatgttgaccaggatggtcttgaactcctagcctcaagcgatcctcccatctcagcctcccaaaatgctgggattacaggcacccagcccctaaaatactttttataatttgttctatggtaccaaaacaggctattggatgaggaatcaaggcacttaaaaggctaaccacgggcaagtagcatctgccctcagtgttggcagctgatgactccgtggggcatgtaaccatgagcatccgttgtgcacctgttatgcgtgaggctcgaaggctaattctggacaagtattagctcttttaatcctcagaactgtatgacacagatactgttatt

SEQ ID NO: 14580 - DNA, 2300 bp, Homo sapien
cccatctctactaaaaataaaacaaatttggccaggcgcgtggctcacacctgtaatcccagcactttgggaggctgaggtgggcggatcacaaggtcaggagttcgagaccagtctggccaatatggtgaaaccccatctctactaataatacaaaaattagccgggtgtggtggcatgcgcctgtagtaccagctactcaggaggctgaggcagaagaattgcttgaacctgggaggtggagcttgcagtgagccaacatcaagccactgcatccagcctgggtgacagagtgagactccgtctcaaaaaaaagaaaaagaaaaagaaaattagccgggtgtggtggtatatgcctttaatcccagctactcaggggaggctgaggcaccagagaatcccttaaacccaggaggcagaggttgcagtgacctgagatggcaccactgcacttccagcctaggtaacagcatgacactccgtctcacaaaaataagtaaataaatttatcttagggcctcaccatgttatggagttgagtctaattgtttagaagagaagaggctaagaggctagacaaggacatagaaaaacattgttcagcctgggagaggctagatcccatgcagatgtggcccagtttttatcaaagtagcctgaggaccaccctaccagggccattaggagtgctggctaaaatgcatattcctagcatacttcccaaacatactgaattataatctcaagagggaaagcttaggaaaaatgccaagtttgtagactgacatggtgactcacacctgtaatcccagcactttttgaagctgaggcggtggactgcttgagcctaggagttcaagtccagcctggacaacatggcaagcccatctcttcacaaaatttaaaaagttaaaaaagaccaggtgtggtggcttatgtctgtaatcccagcactttgggaggctgaggcaggcggatcacctgaggttgggagttcgagaccagcctgggcaacatggcaaaaccctgtctctactaaaaatacaaaaattaactgggtgtggtggtgcacacctgtagtcccagctactcaggaggctgaggcaggagaatagcttaaactggggagacagaggttgcagtgagccaagatcacgccactgccctccagcctgggctacagagtgagactctgtctcaaaaaaaagttaaaaaaaaaaaaaaagccaaatttgtactcataaaacccagaggctacagaagctatagggtagcacctagtgttcttcatcttccccatctccagtcaggcttgagtcaggggttcacccagactgagcctagctgtgagaactgatttaacctccccgctcaccaccagctttgccttgtttcttctatggccacctccttttcccttgcctctggttccttacatggagatagtagagcctagtggctaacagtgtggacttgggttagacagactttggttcaaattcacaacttaatacttgtatgaccttatataagtggctgaagctccttgtgccttagttgtgtcatttgtagaatagggataattatagtacctatatcataggaggttgtaagaattaaatgtgataaagccctaaacactgcgcctgacacagtgaatactgataagttgtaattgttaatttttatcgttagaggaacccacctgacttccagcgggagaatggagggagaaatggggatgtgttcattgctctctttgatgaagctgttaagcttctctggcttctctaggaaggcctggagtataatgcttgtgctgtagtaaaaggggctagtgaaaggctaggagaagggttttggatgtgcaaaggaaaaaggaagctgtacgtgtaggcagctgagaccaacattgccaaataccaggacaccaacgccctttcaccagctgagtggcttccatggcctcctgccaggctaggacctgactcctcacttagagttcctctgaaatgttcatttgaagagctggctctgattggctactcctttgtattttagggcttattcccagaaagagatttcaaagtgcgccatggaggattttcagacaggtctatctttgatctaaagcatgtgccacataccaggtatggtcaattttgtgatccagccatccacacaggatgggatgggatggctgcaaatgcctgggggtattctgcctcctcatctccattcccaccccctcagcacacaggcacatgtgagtgcacaagtgtgtgcacacagatacacac

SEQ ID NO: 14581 - DNA, 2300 bp, Homo sapien
cttggttttgaagctctgacacatgcagaccaactagagaatctcagaagcagcagtgcctacgtctggggcttcagagtgaggtctggggcagagctggggtgggggagtgaggacgctgacactagcccagcaccaagcactgtatttggattttcttccacgatcttctttgactgtcatgaccaccctgggtggttggggctgtgttctgagaaaactactgccccgacccctccaaggcaattcagggtgctctggggcctgcctcagctgacagcctgctggtgcccacctctgcagacatctggcacttaggaatggcaggatgcccctatctttatcaggagcccctccctggctcaattcttctgtatgtttctcttcagtacaggaggctgctggtacaaatactgcagaaatgacaccaataatggggcagacacaacagcgtggcttagattgtgcccacccagggaaggtgctgaatgggaccctgttgatggccccatctggatgtaaatcctgagctcaaatctctgttactccattactgtgatttctggctgggtcaccagaaatatcgctgatgcagacacagattatgttcctgctgtatttcctgcttccctgttgaattggtgaataaaaccttgctctttacatacaatgcctggtcctctcctttcacccgtcttttaggggatgggaggaaaagggggctggagggcagagtgttcagtgagatggggctggctcaaaaagtccagaataccccatgccatggcaccagcctggcactgactctggcctcctacccattcattcagcaagcaaataacgcctgttgcatgccaggcttcgtgccaggcgcggggttctactctcatctctgccacctactggcgcaggcaagtgtcactagtttcctcgctagtaaaagggggctgcagacactacactgccgggctttactcaatacccccgccggacttggaggggagcgccgagttgggatccagaccctgccggccgcttcctctcttctctggccgtcagaagggttgccagcgttagcaaataaaaatactggacacccagttaaattcgaatttcagataaacaataattttatctaataaaatgtaccaaatattgcatgaacatactcgtaagaaagaaattattcaccgtttttctgaaattcgaatttaaccgggcggtcctgtattatttctggccttggagcattcattgcccctctcttgggctgcaaacacctggccctaaaacgggcgatcatttggtcctcaggtcctgcttggagctgacagcgggaaagtcccgatttcaggtcacttttcccggagctttcgcggagaaaacccgtaacccacccatgccgggccgcagctcagcctgttaaccccgcccctaacgggaggccctgcccacatctcgcgagagccgcgcggcccccgaaggctcgcaggcggaagtgagacgccggaagcggtcgttgccatggatcctggggacgactggctggtggaatccttgcgcttgtaaatcgtacggggctgggacatgggagctgggcctggagcttgcctggcgggcggatgggtgtgggtggaggcacgttggggatcctggtgcagagtgggccagctgtggcctcggggctcgccaccgtggaggactccgcctgggcctaggcccccatctctaggaaatggctccttcctgcgtgcgcgcgttgtgagattactagtaagagccgcgcttgtgaagacgcagtgcccagttagtttgcgccagcctctgagttcagctcagaacacagatgatctcattgattcctcacgtcaaccttgggaaatctgggtaccctgggacgtccacacatgaggaccgaggctcagggacatcaagggactggcctggtcccagaaacagggagtaaaatgggaagtaaactcagtcccacgtctgcctgactccagagtttgggccactgaaccatgcggctgccatcttggagttctttgagctgtgaagtgctgtgcatcgtgtgattctgtgtcccttttgtgcaggtaccaggatttctatgcattcgacctgtcaggagccactcgagtccttgaatggattgatgacaaaggtggtatacctttctagccctgaaggagagggaatctcactcctgagctgggtttcaggagctaagcctagagggacccaacccactcttctgggcacctgagagtcacttgtagcaatttgatgccccatca

SEQ ID NO: 14582 - DNA, 2300 bp, Homo sapien
tgggattcaagactccaaagctggagccaagctagcctcaaggtatagccccgctgagtggcaactccttcattccctgctcctggtgctgtccttactgcacaccaccctccctggtcctgctgctgtgtgcagaaggcagtgtgatgtggtagaatgtgggttttgactacaacgtgctgggctcataacctagctacttagtagctgtatgaccttagaaatgtcccttaacttctctaaagcctcaatattcttcacccataaaatgaagataataaggcccatctcccattaaatgagaccatttatgtcaaatgctcagcatggtgcctggctcatagacagcccttagtagatgcgagctcttatcagtctgtgagctccctggcggcacctgttgtagactcgccttcatatcccccagtgtgcctagcatatagtgtgtgcattttgaagggagaggcattccctagaaaaggtccaacccagcctcaaccaacatccctgacttcctgaggcacagaaccagcagcccctgaggacctcagatgtaaggcctaggagcttgggctggctgagtctgaagggaaacaatgtcacctctaatgcccttggttttgaagctctgacacatgcagaccaactagagaatctcagaagcagcagtgcctacgtctggggcttcagagtgaggtctggggcagagctggggtgggggagtgaggacgctgacactagcccagcaccaagcactgtatttggattttcttccacgatcttctttgactgtcatgaccaccctgggtggttggggctgtgttctgagaaaactactgccccgacccctccaaggcaattcagggtgctctggggcctgcctcagctgacagcctgctggtgcccacctctgcagacatctggcacttaggaatggcaggatgcccctatctttatcaggagcccctccctggctcaattcttctgtatgtttctcttcagtacaggaggctgctggtacaaatactgcagaaatgacaccaataatggggcagacacaacagcgtggcttagattgtgcccacccagggaaggtgctgaatgggaccctgttgatggccccatctggatgtaaatcctgagctcaaatctctgttactccattactgtgatttctggctgggtcaccagaaatatcgctgatgcagacacagattatgttcctgctgtatttcctgcttccctgttgaattggtgaataaaaccttgctctttacatacaatgcctggtcctctcctttcacccgtcttttaggggatgggaggaaaagggggctggagggcagagtgttcagtgagatggggctggctcaaaaagtccagaataccccatgccatggcaccagcctggcactgactctggcctcctacccattcattcagcaagcaaataacgcctgttgcatgccaggcttcgtgccaggcgcggggttctactctcatctctgccacctactggcgcaggcaagtgtcactagtttcctcgctagtaaaagggggctgcagacactacactgccgggctttactcaatacccccgccggacttggaggggagcgccgagttgggatccagaccctgccggccgcttcctctcttctctggccgtcagaagggttgccagcgttagcaaataaaaatactggacacccagttaaattcgaatttcagataaacaataattttatctaataaaatgtaccaaatattgcatgaacatactcgtaagaaagaaattattcaccgtttttctgaaattcgaatttaaccgggcggtcctgtattatttctggccttggagcattcattgcccctctcttgggctgcaaacacctggccctaaaacgggcgatcatttggtcctcaggtcctgcttggagctgacagcgggaaagtcccgatttcaggtcacttttcccggagctttcgcggagaaaacccgtaacccacccatgccgggccgcagctcagcctgttaaccccgcccctaacgggaggccctgcccacatctcgcgagagccgcgcggcccccgaaggctcgcaggcggaagtgagacgccggaagcggtcgttgccatggatcctggggacgactggctggtggaatccttgcgcttgtaaatcgtacggggctgggacatgggagctgggcctggagcttgcctggcgggcggatgggtgtgggtggaggcacgttggggatcctggtgcagagtgggccagctgtggcctcggggct

SEQ ID NO: 14583 - DNA, 2300 bp, Homo sapien
ttggcatttgaggtcctcatgctaaacttagagcctagcactcccttgagcaagccaccttctcccctgtgcctcccatttttttccctaaggtgagtgctcctaagtctgtggaggtgctcccctgctgttttctccagggtcctcagaggcccccccccttttttttctatagtaggctgacagagcaaatggttccaagggtgcctggggccagcctcagagctgtggctgcagctgtgaacccaggctgtgtcagaggaagcttggcttaagtataaataaccttagcagaactcaaggtccagtcacctgtggaagagaggtgaaactcgaaatgcagtgcccactccctctccctcctgagatacataaacacaacttggtgttgaaatttgagatggtacaatgggagtgggtgtggtttagggagagttgtatctgccctgcatagatttgggggcctgatgcagtggtccagacagacctgaaatctgattccagtgggacttctgggaaagtggctaaacctcttagcctgttcccacctataaaaatgaggagacagaaacctaccaaataagattccttcaagcatttaagtgatgcagcactcaatcaataccagcttctgtgtgttcacgctaatttctattatccatggactagagaagataggatgggggtttgatggatgcagaggagagggaggggggtcacaaaggaatgattaccggaaggtgataagagctatatctgtacaccatggctaagctgtgacaagaaagcagagaggtgtaaatgccagggtgggaggtgagaagcaaggagattggggggaaagccagggccagaaatgaaacgtccctgtcctgtgtgtcatgctcctggaagctgggcctccagctgggtatgacagccagtttttcatgtgagcttccccttctaggatgaggatccacagagctagcaaccttgctgagctagatactaagcaagagtcctagaagcaggtcccattatcaagccagatgggagtaggttctggtacggccactctgttccgtgttccagaggtatccagagtccaaggggtggtctgcacccccgctcctccatcactctctcctttgtgtacttgtctctccaatgagatggttaactcccttgggagcaaggaattatctgtcgcccctcttcttgtgtctagtgtagtgctctgaacaatgggtttcagttaattaagcaaacataaatgtattcttctggagcacagtgttttcctctgctcattatatgataccacttatccagaagttctttccaagaaagtccagacagctcctggggagaacaaagtgccaggtgtgagagggcaggtcctacagaattgttgcttccggccacagagtacttatgctaaaacatgtaaaagtattaaaattagggcagtgtggttattaccattttacagttgaagaaagtgaggttcagccgggtcacagcttgtacatggactcctgggtgcagtgcagtcctgggtgcagtgctctttccactttcttgacccagaggtctgcttcctgcccataagccaggccctccagctggatgcccgttcctcagaagcggccctttgtcccaccctccatcattctgcattcccattctgagcacctactgtgtgccagaacatttccagactgtgatgctggctgtgagagggcagagagcaaggtgaacacgggtcagattcccccaaagggcggaggtgatggggattagtttatggaagtcctttggtgcctagcacttggctggacactgtaaaaatgcctctgttagcctgggaaacctagcgacatccagtctcttggaaagaaaaaaaaaaaaagccaggcatgaaggcgtgtgcctgtggtcccagcttctggggaggctgaggcttgagcccagccctggaggttgagtttgcagtgagccgtgatcgcgccaccgcactccaacctgcgcgatactgccagatcctgtctcagaaaaaaaaaaaaaaaaaaaaaaaaaagcctgttacccgggaggagagctcctcgcccgacctctaccctcatgaagagaggctcagagggctgaagtgcctatttggccgaaagccgtggcagagtggcaaggcagggccaggggaagcggctccgccgccggggccgggcccctgtttggccggtgcccggtccttagcctgaaggtggcgggcttccgccagaagcccctggcggaagcggtgcccgcgtgcgggccagagt

SEQ ID NO: 14584 - DNA, 2300 bp, Homo sapien
agctttattgtgatataatacacataccatacaattcaccagtgtaaagtgtacaatttaatggttttgagtatattcacatagttgtagaactagcatcccctaaaagaaactccatacccattagcagccactccccattttccccaactctcccagccctaggcaaccactgatttccatctctgtggatttgtctattctagatatttcacctaaatggaatcatgcaatgctttgtcttttgtgactggatcctttcactaaatctgtttcaagggtcattcatgttgtagtatttccttttgttgccagattaatattccattgtaccagcggaattattagtacattattccaatataccacatttatttatcccttcattagttgataaacatttcagttatttccactttttagctattatgaataatgctgctgtgaacattcatgtacaagtttttgtgtggacaaacgttttcaattttcttgggtatatacctagcagtggaattgctggttaatatggtgattccatctttaacctttttttgtttgtgtgttttgagatagggtctcactttgtcgcccaggttggagtgcagtggcacgatctcggctcaccgcaaactctgcctcctgggttcaagcgattctcctgcctcagcctccccagtagctgagattacaggtgcccaccaccacacccgcctaatttttgtatctttagtaaagacgggttttcaccatgttggccaggctagtctggaactcctgacctcaggtgatctgcctgcctcagcctcccaaagtgctgggattacaggcatgagccactgcagacggcacatctttaaccttttgagcaactgcagctatttcccaaagtggctgcaccattttacattcccaccagcagtatatgagggttccaatttcttcacatcttcccctaaacttattattatttgtcttttttattacagccatcctccaataaattcaagtttttattttggaatgactttccatttaaagaatttcgaggatactacaaagagttccagtatatccttcattcatctttccctaatgggagagaaggattattttgaaaaaaaaaaaaaaaaaaaaaaaagagagagaaatgataccaagtaatccagctttagtctttgttgactgaagtgcgtattaggagctttggccagtcaaagcaaaaggtagcgaaaagatagtcacttcaaggtgtccaagttaagaaaaccaggaggtagaattcaaggagaccatgtcaaatcctgtcagcaaagtcaaggtcagaaaggaagccacttcctaacgacccacaccactggtggtctcatcacgctgttgcaccatttggatgttttctaattctcccgggctgttttctctccaattggactgtaaactcctggcaggctcaggcagtgctcggaaggtctctcacacggtccaaccttacgcgaaaagcacttattgaaagcacctcgatggccgggcgcggtggctcacgactgtaatcccagcactttgggacgccaaggcgggcggatcacctgagctcaagagttcgagaccagcctggccaacatagtgaaaccctgtctctactaaaaatacaaaaattagccaggtttggtggcgcgcgcctgtagtcccagctacttgggagcctgaggcaggagaatcgcctgaacccgcgaggcggaggttgcagtgagctgagattgcgccactgcactccagcctgggcgacacagtgagaaagaaaggaaagagagaaagagaaagaaaaagagaaagagacagacagacagaaagtaagcaagcaagcaagcaagcacctcaacagagacagagacgtaaagaaagagagacagagacagaaagaaagaaagcacctcctcagcttcccatagcgcaggagacttgctcgaccagagaacctacggtcagacgacacatccactgccacacccatacccaagccgggacgcggaaccgcttctacccgcccacaccggagaggttgctcgcgattggccgggcgggcacagaggcccgccttccgaaggtggcagagcagcctccccaactaagcctgggtcgccgcctcggtgaagggccgcggggccgagcgcgggaagtggcgtccagtcggtttttggcaggcgagagccagagcgtgagaaccctcccacggcgaggccaagccctgagactggactagcaaggtcgtgagtctctctgtcagctctccgcagcgaagg

SEQ ID NO: 14585 - DNA, 2300 bp, Homo sapien
gcaggtatgctgggtttcttaagtggtacacaggtttggagtcaattgtacttaaattttaaaggacagtgaccccagctgccctaaggatgattgtagagggtaatccaggcagctgatccatggaagcatgcatgcctccctacctcaaaatatttcaatctttatgcactctttaaatcttgtaggaagaggcggacttctctgactttttgctcacccctttcccccttcccatctacttttccttttctggtttcttgcaccatcaattatcctacatctatctgccattctcccctctcagctcctttagttaaggtctccccactcaagttaggaaaaaaaaaaaaaaaatcaccggccaggcatggtggctcatgcctgtaattccaacactttgggaggctaaggcaggtggatcaccttaggtcaggagttcgagaccagcctggccaacatggcgaacccccatctctactaaaaatacaaaaattagggccgggtgcggtggctcatgcatgtaatcccagcactttcggaggccgaggcgggtggatgacctgagttcaggagtttgagaccagcctgaccaacatgttgaaaccccatttccactaaaaatacaaaattagtcaggcatggtggcgcatgcctgtaatcccagctactcgggaggctgaggcaggagaatcggttgaacccaggaggcagaggttgcagtgagccgagattgtgccattgcactgcagcctgggcaacaagagcgaaactctctctcaaaaaaaaaaaaaaaaaaaaaaaaaaaaaaagccaggcatggtggcgtgcgcctgtaattccagctactttgaaggctgaggctggattatcactggaactctggaggtagaggttgcagtgagccgagaccacgcaattgcactacagcctgggctgcgagaccgaaactccgtctccaaagacaaaaaaaaaaaacaaaaaacaatcaacttttccctttactcttttgcagagagggagggtctcgctatgttgcccaggctgaactcaaacttctcggcttaagggatgcttttgcctcagcttccacagtaggacccaactttctcctttactcttggtacttcttgagctccaggcctacttttctctctctcactgccaaacatttgaaatcatcaccctttattaactccattgcttcattggctaacatactctttagacaagctcttcaactcagttctgtgcctggtgcacagcaggctccggctgcatgttagttccagccatcttgcacatttgcatctccttcctggagaaggaatttctccatggttagcagtgtgtgctcactcctagtcaccagggcctcatctccgtgttcccacaccctgaccttgctgccgccctaatgctgcggacccagtttccaggtacgccgggttcttggaaggtcctgccggtcaccctcccagccttctgccagactcactgagttctcaccctgcacagtcatcgtttccccagtaaccctgagagatctcccagtctacctcttcgaggcacccgttgccagtcctccatctctgtttgccgcgcgtccctcggttaccccagaggcaacacgtcaggctgccccgcacctccaagcctgcgcgaatgtccttgtagccagctatgaccaaacatttagggcgcacctgagcgccaggcccacgccacccctgcttgctttcacttaacagcctcgactaggccccctatgcgccaggtctcagtgaagaggacgcagtcccgggtcctgggcgctctttgccgggcgagacagctgcgtaggcagatcctgttcctctagtgggcggcctcggcccctgcccctgccccgaggcgcgtcagaggacaagaggcccaggtcgctggcagcggctgcctgcccgaccgcacagggtgcctagcacgggtggcggggactggagccgggcgggggccggccggggtcgggggtccagccctgagcggcgccgtccccgccccgccccgtcccgtcgcgtcccgccccgccctacccgccgccgccgtcgtcgccgtcgccgggcctgcgccgcgcagcccgcctcgggcgggaggcgggaggcgggaggccgggcccaggccggggcagcccctccaccgcaccgtcctgggccggtgcccaggtccgagtcgccttccgcctgcccccccccccccccaatcccccgccgcggcagccccagccaggtcccgccgccaggccggctcccgcccccgctccg

SEQ ID NO: 14586 - DNA, 2300 bp, Homo sapien
gacaagaaggaaaggaagtataagagtaggaagatgagatttaacttaaaaaaaaaccccaaaaacaggtaagattgtatacttaggataaaagagactttaggagtggggaagactttgatgaacagtggtttttgttgaaaactcacaggctcaatgaaaaattgagtcagtgaaataatttggctgtctgtcagggaagttgttaatgtctggagcccagacccacccttaatataggtgcgaatttagttgtaggttgctatggtctaacctctgcaggggccacattttccagaggaaattggtaatttggaatgggtaactagtggcaccatatccattgtcgtatgagaaatggcctggaagggaagtccagagtccccattgtgctaggcaaggtctcaaggctctagcccctgcctcgtcatcctctctctactttcctgtcgacttcatactcaagtgacgtgcataccgggctgtgtcagtcctccatatctttatacgtactgttccctctatctggaatattcggttcctcctgctccccacccataacagtctacttggcgaggacctacgtaatttacaaaatccttctcaagttttacttccttccttgtaaaactgtcctaatacaggcagaactaaccactgttttctctgtactttggtgcttccctatacatagttttagaattgtatgttttcccctgcatcgtatgttgcctgtcccacctattagactgtgagcttcttgcaggcagagaccctgtgaccccggcctctagcacctgtgccctaacctgacccatgagtgttcacatgctttcccacccaccccctttttttctctgctgcttgaaccagcatacacgatttaaacaaatgaaccagaactccaagtgggttttcaaatatttgaaagactaccctgtagatgactgaagattctgtgcacctccagagagccaagagcaagaatgaatggggacatgtgatcaagagatgaatttgggatcactaggagagaacacattagtattggtcaggatacttctaccaacagaagcctaaattggaaatagcaaagggagaacttttttggtacacagattccaaggaaagtttgaactgccaacctgcaggaaggccagggacaaagctggaacccaggaacacctgaacgagggcacctgaaagccaccaggaccctgtgtcctttgcctctgcttctctctgtgctagcttccttattcctcactgtaaactggcttactctacagggcaggaaacatggctgctgacagctgtggcctcacagctcagttttccaccacagagggtctggttttctttcccaattccagttaaaaatgttttagagaagaactttattggcacagccagggtctatagtcagggagattgggtaccgtgaatagcctggcttgagtttgatggcagtcagctgaggccaggagtgggatcatgtgggaacaaggtagttgccattggaaccacacggagtaggggaaagccatttccaaaaggagtagggatgggtgcagcttcgaaaacagaagggttggactcctttgctcccactttctaacaattacagccatttagcttcaggtactttctggatgctctcaggaaaataggagaaagaaggatggataaaaaagtctgtgggcacttccggccgggcgcggtggctcacgcctgtaatcccagcactttgggaggcccaggcgggcgaatcacgaggtcaggagatcgagaccatcctggctaacacggtgaaaccccgtctctactaaaaaatacaaagaaaaaaattagccgggcgtggtgtggggcgcctgtagtcccagctactcgggaggctgaggcaggagaatggcatgaacccgggaggcggaggttgcggtgagccgagatagcgccactgcactccagcctgggcgacagagccagactctgtctcaaaaaaaaaaaaagtctgtggggacttccaatatttagaccaggtttcggcagtgcttggcactagttcttggaaattgttgcatgatttgattatttttctgggtatcaggactcagcccatttccccctctggtgctgagaaatggaggccgaaggagtgatctagaagtgttaattgagcccctaatctatgctagttactgggggtgttgggggagacaggagagagatcccacggggttccggcctcccagggactcaggtcactaatggaggtggcttggcttgtctatgtgctgggc

SEQ ID NO: 14587 - DNA, 2300 bp, Homo sapien
gcaggggttatgtgatggataccacatgggtaccgctagatggcaggggttgaatcaaatagagtttctgccccaaggagctcatagtctggtggggacttaatgtgcccaaagagcaggcgtggacggaaagtgagcccagcaggttggcagggtgggaggctcttctggccttttccttccctgtgagccccacattggtgagacaggagctcctggtctcccacatttctcctgttccccttcagttggagaagagattgagatgacccctatggtgtttgctaagggtctggctgactctggctgctggggggacaagctctttgggcgactggtaagcgaggagctccgagggggtggatatgggtgtggccttcggaaggcctcccaggccaaggtcatctacgggctggaacccatcttcgagtcgggccgcacgtgcatcatcaaggtgtccagcctgcttgtgtttgggcccagcagtgagacttctcttgtgggcagaaactacgacgtcaccatccaggtactatgtcccatcttcacaccccattcttttattctctcaccccctcccctttcccagcccaggtcctgttaggatgcccagtatcgaggcagaaggcatctcagtctcaaccttatgaggctcctaggaggaccttgtggaaagcctgagatgcagcccagaattcagatgcttggcctcagagagcttgagagcttcaaaacgacttgggccatagttttcaaactctatgtttgcagcagaaaccttccccctgccccatacataatctctcatggaagccttgtttatatgtgagataaaaggggggtgctgtgggtggggtgggcagtcttcctggctctacacagagtggtctctgggacactgtcacataccataaggactcccaaaaatagttcagaaatcacttcgaaaacctcagtttgaaaagaagtccaaagccgcttgttatacaaaagaggaaaatgagatgcagagtggggagcagggaggagtaagcccttcctcccccagggctggaatcctcctctcagtcccctaacagaataggtagcccactcacttaggggtagacacagtggaggactgaggaatttctttgctcaccacatttggttccctcatccacaggggtgcaagatccagaacatgagtcgggagtactgcaaaatcttcgcagcagaagcccgggccgcgcctggctttggggaggtgcctgagtaagtacgcagcgaggaggacgtgcagtgtgcagcactgttgccttgggcttctgcaaagacagtgatttcacagcctcccaggggcatcctgcgttatgcccatgtgcaaataggctcacagccccatgctcagctcagtggcctcacaaaatgtagaaatagagacctcatttactctccacttgagaaaagcctctgctctggacttgagtcccgcccaccccggttcctcattctttagtgcagatgttgctgattgcagagtttggacacagcaatttctgggactccatgaaggtgatggggtgggttaagctaggcagactgatcaggacacttccgtggtatgcaggcagggtcagtgtggatttttgtaggagtcagctataaatggcaattgtttgcattttgagacttgaactctgacctttgcatacctggggtcccactggcagagagccacaatctggttgaatcctctctaaaggtgctccttctgtttgacacatacatgcctcaatccctcacccaagccacacagtctgcctatgcccatagcagggtttggttctaatcccactgaccaagagaatggacaggactctgaagccaaaaatatccatttcctttcccaaactcagggtggagctgctttcctttgctgtcctttgggctcggagctgagaattacattcttggaagggcccttcttttaggtccaagaatacagaattgggtgggagggaggagctctctgggccatacttcctgcttactgcagggtgaaactatgtttaggatcatcccactgtatctgatctaccggcctgcaaacaatatcccatatgctaccctggaggaagacctgggcaagcccctggagtcttactgttctcgggaatggggctgtgctgaggctccgacagcatctggcagctctgaggccatgcagaaatgccagaccttccaacactggctgtatcagtggacaaatggcagcttccttgtcacagacttggcaggtacgagggtgtgagggtgca

SEQ ID NO: 14588 - DNA, 2300 bp, Homo sapien
aggctcccagctgagtcctcagccccagaagaaaggcctccctagtcctcagggcacccggaagagtgctccaagttccaaggccacccctcaggcctcagagccagtcaccactcagttgttgggacagcctcccacccaagaggagggctccaaggcccagggcatgcggtagcctccgcagaggctgggggcctccacccagcagcagaccaaccaggaagcagcttgaactggatggagactttccaaatatggaactaactggagaaggtgcacgaaggagacaccacttggggacctctctgagcaggctctcgtgaatcagctcgtcatcagatggctttggtgcatggcacatagcccactggcctcttctggtgccactgtcacccagggctcccgggcctcaagcagtccccacctccaagtgcctggcaacctaggccctccttgaagtttacactttgccactgctggaggctcccctgagtcctctgcatgagttctgcaccccaagcccttgccccagcccagtccagcagcagatgttacaatctgagtgaggacatgcaggccaacttttaccctcctgcatttgcctggccctgatctcgcctgtcctcagggatccagacttcctctgctggtctggcctggtgactctcagggtatcttctccttccagctactttcgctcactgatctcagcttatcctgcaactaaccatccttgagcccagatggggctcagggcccttccagagcctgtcatgtccttgtgcagtggcctttgatgtgtgttcacgctcttcccccttcactcactcgcctgcttcccatgctcccttgtaccccctcgccacatccctgtcttggggcccagctgcagcctgctgcctgcccttcatggctctgcacatggccctttgcttgagggctccccactccctgcccaccaatacccaggtgaggaacagaccctctggcctctcaccccacttcagtgctctcttccccaacttctctcgggctctttgctcatgaggtgagagctggtgtgagggttgtgtcagcagctgtagccagagagaggtgttgactctgagagaccttgcactccatactgaaaggaggtggggtcacagtgaatttcacatcccctctcaaccaggagtggagggctaggtcccttccccatggggagtacacttgggtgttctaggagggatgcagtctatccatgcacttgggtggaggggagtctctgtgcctgggaattaggacccctgctccaaccatcgctcttgatcctggggccccagctctgggtcctcatgtatgggctcccaaggacccagcagcctggatccttccagagcatccctcctggaggcctgggatggggtaggtctgcagctagcctactccctttggaatgcaataaaggcagcattgtgtgccctgcttgccctcatctggtgtggttggaggtctgtggagtcaaggtccccctctcccaggcaggctctctgagggcattctgtagtcccaggcccactggaaaaatgaatctatattttggttcctggaccgaagttcagtcgcagccttctgtggccacagaaagacagcttgtgctgcttgcacaactgagctgctggtgtgtaccccttagcagggtgtctggggacttacgcctttggaattgctcttcattcagaagaggaacacaaaggaagccacccaggaaggaagcacagagctgggggctctggaaacgccctgtgtctctggctacagcaagaccagcccaggagcccaccagcacctgcctctcagctacttgctgaccatttcctgcttctcaagctgcagagaagcttttcattcccacccccacccggaacctccccttgcctaacatttcccctctatggtaacatctctgacttctctacctcctctgtgctcaggtgactccacatcttctgccccagtgtgtccccacctctcccagcctgtatacccagattactttggtgaactgagagctggagtactgttcattcatttattcattcacccactcattcagcagacatatactgagtgctactttatgccagaccctgggctggcagctgtttggaggcaaagatgtatgaggccatctcaggagagactacttgttaggattcttgagttttgaccaacagaaatgaacttggaccaacttaagcaaggaaaaagcgttcatgggaaggatgctgggatagctcacaaaaccaaaagaatag

SEQ ID NO: 14589 - DNA, 2300 bp, Homo sapien
attggtgggaggtcgaggctgtagtgagctgagattgcgccactgcacgccagccagggagacagagtgagaccctgtctcaaaaaaataaatgaataaataaaatgctaatatgagctggagaggcaagaggaatagaaggtaaaaagaacaacaagggaaatacactttttaagtacaatcaattaaatattaaatatttgggaacagtgagctctgaactgcttgggtaaaattcgccctgcctggtggccttaagcactcctgcaggtgggacccggcatcctaattctaccaggcctcttgttgctgccgtagatgagccccagactcggccttccattttgtattggatgatgaccacatgtgcccagatgttctcagtgagtagagtgggtcaaggagtaaactatatcggaaaccgttggataatcatgccaagcaggctgggggcttccagcctttggggtactggaatgctttcttcccctgggaccagctgaactagctctgtagttgccgggagagcagtgtgctctaacacttgggctagtccgttcccacaggaaaactagaagagtcacaagcaaagagtataaaagcccaagatatttctttagtctttgtatttagctctatgtcatcaatttttttttttacagggtctcactcctgtcgcccaggctggagtgcagtggtgtgattatggttcactgcagccttgacttcccaggcttaaatgatcctcccacctcagcctcctgagtagctgggattacaggtgcacgccaccacacctgtctaattttttctattttttgtagagacagggtctccctgtgttgcccaggctggtcttgaagtcctgggctcaagcgatctacctgccttggcctcccaaagtgctaggattattgctactttccaatatttctactacagactacgggaagtccatttttcaatgccaaatgcagaagaaaaagttgtatggatgccctttctgccaatcatcccaggtttaggagagaagaatgatgaggtcatgttcatggaacttgacgagtgataagcctctttatttgtccagtgcttggatacacgaatcgatgcaatgaaagagacctcgcctgtgaagagctaagaaatgagtgtgggcagaatcatgagaagaaaataaagagattgctgagcaactcttctgacagttcttgtgctttttgaatgtttcactcactacttataaaataacctattatgtcagagcctggcgagaagggatcctctccaactctttgactaataattccctaaaacaggaggtggcctgcagaagaactaaaaccagaaaagttaggtggttgcctctgaggaatgggatagagttggaggggtggagcagcccctttactgtcaacccttctgagctctgctggatggtgagggaaattatctatgtatatttatgtggtcctctccccactctgccctggcctggctcagctctaggtctcactcagcgggcgtctgcgggtgtgccgggcctcagaggctgtctccttaggaaacaggccaccaagaagcccaaggacatgctgaggtcccacagctggaggggcacagccgggacacctgaggtcctccagctgttggtctttccctggggtctccaccccaatctatccagcctcccaactccccagcctgtggctttttgccacattccacctgaaaagaccgcttggcttctggggtctgggatccctgctggccatgcctccttgagaggaggagcaggggagaagcccggagtctcctggcctggaggaggggagcagtgtgtcaggacaccccggatgggacctgtgacagcaatgacacctgccagcctgatgccgcttgactccctgccaggtacttcctaagcaggagcacgctgactcctcatgtgctctattacccaccaccagatgaggcagcaagttaactttggcagtcaggagtggagacctttgggctccaagctcaaggtccaccccaagacacacagcccattaaatccttgttgtagagattagggcccacaacgatgtgaaggttataagctgcactgcatggttgctgctggatgtgttgtgttcctggcttccctctggatgctgacagaaacaagggtgagagaaaaggacagtaggagaggagggaaggcgggactgaagaaaggaggggaagggggtagcacagggcaaagtggaaaagcaggtagcgtcctttttttcttcactagggcttggcgaaga

SEQ ID NO: 14590 - DNA, 2300 bp, Homo sapien
acagcccattaaatccttgttgtagagattagggcccacaacgatgtgaaggttataagctgcactgcatggttgctgctggatgtgttgtgttcctggcttccctctggatgctgacagaaacaagggtgagagaaaaggacagtaggagaggagggaaggcgggactgaagaaaggaggggaagggggtagcacagggcaaagtggaaaagcaggtagcgtcctttttttcttcactagggcttggcgaagaccccttcgaggacagctccaggcccatccctgtggtggccacccatggagacagtagtgctgctcagaggcatttagtttttgtttcttttctgtttttgaggtagagtctcgctctgttgccgaggctggagtgcagtggtgtgatctctgctcactgcagcctccacctctcgggttcaagcaattctcctgcctcagcctcccgagtagctgggactacaggcacctgccaccatgcctggctaatttttgtatttttagtagagacggggtttcaccatgttggccaggctggtctcgaactcctggcttcaagtgatctgcccaccttggcctcccaaagtgctgggagtgcaggcatgagccaccgtgccccccctcttttttttttttaaaggtagagtcttgctctgtggctagttttcaatcaaggtaacacatgggctctcaacagtgtgcggaactctgctagaaaaatcaaattatgagaacactgttactgtgtgatcccctattggaaaatgaataacataaaataacatacatttaggaaaaaaaaagtggagaaaaggccaggcgcggtggctcatgcctgtaatcccagcactttgggaggccaaggtgggtggaccacctgaggttggaagttcgagaccagcctgaccaacatggagaaaccccatctctactaaaaatacaaaattagccaggtgtggtggcgcatgcctgtaatcacagctacttgggaggctgaggcaggagaatcgcttgaacttgggaggcggaggttgcagtgaaccgagctcgcaccactgtactccagcctgggcaacaagagtgaaactccgtctcaaaaaaaaaaaaaaaaaggaggaaaatgccacacaaactcaatagtggtcatccctgagggctcagattccggggactttaacttccctcattctgtatatttctctaatgtttaaatgtttaatgatacacttgtaatgctttggtaattcaaatgacagatgaagaaaaaatgttttcaaaaagagggggtgtccatccaccatcctctccaaacttccaaaacaaccaggaggtgccggtactagcaagtatttatgcatcatagaggattttgtcctgagcgcgtaccattaattattaaagagatgttgtgaatcccgtcagatgagtttaatgtttagtgtgaggactggaaaactaaagcattcagcccttcgctttgcacaccgttggcttaggtattcatttaacaaagatgaaatgaaggggaaatggtgtgatttggttttgttttcttgacagacctgaaacacttttactatttctcacagctacactgctttcctcattttccagcacaggaaaattggttgctgttataataaatccccatctagtgagaaagggagatagagaaagatgcaaaatgaaagataaaatgcaaaaagctaacagcctggctggggaaaggaggccatgggaaggaaggagggggagggaaataatcacataggtggcttcctggaagaagcggccctaataggcctggaagaggtcagtttgggaactggggagagggcagaggagggcatctctgatggagaagcagcagccagtgggcaggagctgcagggagccaggttgcaagtgggcctgcttcctgtatccctgagaccgtgttggggtccccaccctggctgtggccctggcctctggggaggcgctgggcagaactgggtggcaggcccaacctactccgaccctggactctgcccaggaatttctgctgaagtgacaaggcaagccagagccaaagcaggttggacccagcttgtccccacagagacgtgtgcttccctctctctctgagagcgacctgttaaccgcaaatacgtgagtagaaacagggccccgcttctgtgtgcgctgctgtgcgtctgtgtgtgagccagggcattcccaggctctgcctgtgtgtgtgcacgcacatgcacgggtctctgagtatgtcagcctaactgggctggca

SEQ ID NO: 14591 - DNA, 2300 bp, Homo sapien
taaaaatcatattatacaaaattttgaaagttcgaggaaagaacatgaagtcagataccatagatttgtagggctgttaatccccatggtaatttcattttttccaccagttttcagcagtctgggggcaggactggaggaaggtgatgttaaatggacccgggagaaggcagctaaggcacaggggcctagttgttgttctaggcatttgacatcagtgagcccatttactctctgaggtagatagtagtcctagatttacagtggaggacagtggctgggagagatgaagtcaggagctcaaggtctaatagatggcagagctgggattcagacctcagggtgtggagctctctcacttgtggctgcctccagcatggttcaatgggggaaggcaaggaaaggaagacaaagaactgggtgcaggtggcacagtctttgaatggctgacccctgggtggagacggagatcaagccaggagggagaactggctgtacagaggctcaggtttagtagaagaggtgtggaagcagaataggtttggattttagacaggcaaagctgtgagggacccggcatctgcatgcctttaatgaacaggtgaggggggccatgagggctaaggagtctcctgggaatggactgacctataacccacaaatctgtgccagtcacaggggtaggagggaggctgggcctaggtcctttggtttatctcctttcccagccccattgacctcatgctcaagtcctggagtaagaattgaagcagacattcagctacaagtctgagtcttgtggaagtcaagcagttcgggctgggggtccctatacccgggcaaaatggattggggcagctggtgaagcgtgttccactttgtgccacggaatagtgaggctgaacatggctggtgtggtggaggcagcctaccttccagcagtactgggattgttcatgagccctctagacacctggtagggataggattctttgcaggggcctgggagtcttgggtgactttgtgggtggcacacgccagtgaggtttgggttacttctgtcagtgtgacccattttcagtccactgtcacagggtacagaagtgttcagggacctcaaggtgcaggttagagccaggggaggaggggtggggtggaattgatgttaggtggttggagctgagaggaagcctgtgacttcctggagtgtcccaggctgaggttctgtgtatgggaaaaagtgggctgagactccagaagcaggcagatgactcctatttttcctatctgcttctgcatcattcatagccccaggtctctaagtctagggtcccaaaattgcagaactggaaattagttacagctttccgggaacagagagggtaagtgaccagctcaggacagcacaaggcagtccgggcagtcagcaaggtgtggggcggtgcacacggggcttttcaggccagctgatcccccagccctagtccccaactccttcatttagtgcatggcccaaggaccaacaagggaggcgggacgccgaggtcctgcctaggaggggagggccgagaggactagagctgcttggagccccagaagcggcaaggtcagcgccgggagtcgtcaaggccgtacttctctgcagggcggggaggagaggtcgcgctttaaacttccatgaactctgttggttccaagcattttctccatgaagtatcctttatttacaagagctccagattctacctggaaaaaagacctcttaaaattgcagagcaaaggcagaaaaaaattatacgatttaggcggaataaagagtgatgtttaaaaatcttttcctttgttttttaagacatcttcaccaagccagtagtacttttataaggcagagaagcataaatattaatattgcttaatgggcttaaacttggtaatagagccacgtgccagtggttcggggcagtttcgccagtaacgtgctctcgggttaccctgctcgggccagagatcgaggctccggggacccggcacctgaacctgtgctgcagtcccagcgcgacagcagggaatccagcccgcagcacgcctccgggtctttgcagtagccgggccaaggcgggagcggctgcctctcagggtcgctccagggccgcgctaggaaaggtgtggacggtcggagaggacaggaaggagccggctgcaccgcgccagggtctccgcaaaccgggagcccagggagggcgggaagactggcgggggtccgaggcagcccgctacaggatacgtgatggacgcccaga

SEQ ID NO: 14592 - DNA, 2300 bp, Homo sapien
ggacgccgaggtcctgcctaggaggggagggccgagaggactagagctgcttggagccccagaagcggcaaggtcagcgccgggagtcgtcaaggccgtacttctctgcagggcggggaggagaggtcgcgctttaaacttccatgaactctgttggttccaagcattttctccatgaagtatcctttatttacaagagctccagattctacctggaaaaaagacctcttaaaattgcagagcaaaggcagaaaaaaattatacgatttaggcggaataaagagtgatgtttaaaaatcttttcctttgttttttaagacatcttcaccaagccagtagtacttttataaggcagagaagcataaatattaatattgcttaatgggcttaaacttggtaatagagccacgtgccagtggttcggggcagtttcgccagtaacgtgctctcgggttaccctgctcgggccagagatcgaggctccggggacccggcacctgaacctgtgctgcagtcccagcgcgacagcagggaatccagcccgcagcacgcctccgggtctttgcagtagccgggccaaggcgggagcggctgcctctcagggtcgctccagggccgcgctaggaaaggtgtggacggtcggagaggacaggaaggagccggctgcaccgcgccagggtctccgcaaaccgggagcccagggagggcgggaagactggcgggggtccgaggcagcccgctacaggatacgtgatggacgcccagagacaccgccctccagctggtgggggaggagccccagccaccaagaagttaagtgactggcccagttcacacagcaagctagtggctgtgtgcgtgtccggggtcctcatgggccccaggcctgcaatgcgtacgccccttcccctggctctgcctttggggtctcggacgcccgactagcactttggttaaaatgagaggaggacgggcgcctgcagcctgcccggtgctgtagctttgcggccgccccggcgcctgtgtaatccgaggcgtggcgcgccaggttttggcctgcgagggagcgcacgtgggctgcggcttctcgcggacgcccaggccccacccacccgggacccggcgcgcggcgccccagtttgactttcactacccccaaaggaggtctttccaccggcctcttttctgggtaacagctccagggctcacacttggtgaccccaccgaggtcaagtagccgctaagttacggagccggaattcgaatttggcggtcgggcttctggtggcctcgggacggaggtggctgtgtgtccctgggcaagtctctttccttctctgggtagcccagtcgggcgccccgcctgtcgtcgccgcgcatgctcagttgcgggcggcgtccggaggaggtggcgggcgccccagctgctttgcattgacgccagcacccgctggaggtcaccgctgggggctcggcgcggcacgctgccggcaaaacccggcccggatcacggagccggagccggagccgtaccgccagcaactcctgggtgcgcgcagccgtttctgcgcttctcgacggtgcggccccaggccccgctggagccgagctgctcccctccctaccctggcggacgtggcccggccgctccgaggggtttccctcggaccccgcgcctaaaccccggccagcgggagcgtctaaggctagccttgtaccccaccggcactcggcctgggggggcttttccgcgaggcggcggcccagcgggcggagcggcgtgggtgtccacatctaggcggagtctggagccggggaggcggcggcggcggcggcgggagcggggccgggcgcggccgggagctcgcctcccccgggggtcgtgccgcagctcggcgagggcagcgtggctcgcgcggcgtggactcagccgctcctgggtaaggagagcgcaaatctcctccccctatttccccggaagcgcggccgaggcgagcccggcgatgtgagaggcggccgtcggctcctgcctcaggaagggcatgttcggaggggcggcctcggcacgccacccgcctaagcgcccccttcccaccgcagccgccgccgccgcagcgcccgcaccgcgataaaaggggcggccgcgtttcctgacgcgagatccgcgctcgccgccgcccgcccaggcggcgatgacacggcgcccgcggcggcccggaggcgccgggtgggccgtttgctgaccggatcgcggctacccgccagcgtgtccgcggcgccgccgccagcatgggctgtgc

SEQ ID NO: 14593 - DNA, 2300 bp, Homo sapien
tccatggattcagccaactgaagattgaaaatatttaggaaaataaaaataaaacatgtaaaataatacagcattaagaactgtttacatagcattacattgtattaggtattataagtaagtagagacaatttaaagcgtagaggagaatgggaatatgttatataaggtacttgagcatccatagattttcatatatatgggtgttcctggaaccaattccctgcagataacaagggacaactgtacattgtgtgcccaaaagcgtacactaatactttcaaatgtctcttatttaggaaataaaatgcaaaatgtagttacccacaaaagttacaataatacttccttttagaccaatgattttttttttccaccaaactgtattcatctcttaaatcatgtaggaaacaaacaaaaggagttataagccatttatacaatagcaatagcttttataattatccatggtttcacttttattgagatctttatttcttcagacagctttgagttactgtctagtgtccttttattttaccctgcaggactcccttgaacatttcttgcagggcatatctagtggtaatgaactcccttagtttttttggtttgttttattttgtttttgtttttgtttttgtttttcattctggagatgtcttaattcctccctcacttttgaatgaagttttgccaaatataggatctttgattgacgattagctgacctccaaagtttctgatgagagatctattgataatcttattgaggatttcttgtgtgtgaccagttgcttctttcttgctgctttcttttttatttttcttcttttttatttatttattttttttgagatggcatcttgctctgttgtccaggctggagtgcaatggtgcagtctcggctcactgcaacttctgcctcccaggttcaagcaattctcctgcctcagcctcctgagtagctgggattacaggcacccgccaccacacccagctaatttttttttttgtatttttagtagagacggggtttcaccatgttggccaggctggtttcgaattcctggcctcaggtgatctgtctgtctcagcctcccaaagtgctgggattacaggcgtgagccaccacgcccagttcttgctgctttcaagattctctttttgtctttgagcagtttcattataatgtgtcttgatatgggtctctttgagttcatcttacttattgtttgttgagcttctttatgtcctacatcaagtttgggatattttcttcatacattttttctttccctttctcttcagcatctgggactcccgtgatgcatatattagcttgtttcatggtgtccttcaggcactgtaagctctgttcactatttttttaaaggttttttctctttcccagactcgataatttcaattgtcccctctctaagtgtgctcattctttcttttgcctgcccaaatttgcctttgaatctctttagtgaatttttcattccagttattgtacttttcagctccagaaattatttttggtttctttttagtttttttcatctctttacttagattttcatgttgttcgtacatcattttcttgactttctccacatctttctttagttcttttagcatcttgaagttgttgtaaagtctttgtctagtagatctgccattaggtatctttcagggatggttgctgttgatttagtttttttcatttgaattggctgtactttcctgtttgtgtgctttgtgaatttgtgttgaaaactggacatttgaatgtaataatgtggtaactctggaaatcattctccgtcttccccaggatttgctgttattgttttgttttgttttgtttttaattgtggtaggccatctctgtgccaaggatcagtctaatgtgtaaactcaaggtcttctcaggcattttctaagcctttccctaggcttgcataatcactttctagttttccctgtatatgccattgcttttcaatgccttagtccctaatgtctgactctcaaaggggataaaagagaaaaatgaaaggagaggaagggcactagccctttaaatctcctagaagtctcttcaactggagggggaatggcttgcaacaatgggagaaagtgcaacaatgcaccccttctttgtctgcacctctgtatcagtgatcagagcacagatccctgatatttggaggacatggttgtttttgccttccctgggtcctgcaagttgtgttcaggttgctttaggaacacatgcacagctgcccacc

SEQ ID NO: 14594 - DNA, 2300 bp, Homo sapien
aagtttcttggtatgtcataaagcctcagaaacaaagcagctgtccctgaggcggtactgtcctccctaagaaacagttaatcctggccgggagcggtggctcacaccgccgagatgggcagatcacaaggtcaggagttcaagaccagcctggccaacatggcaaaatcctgtctctactgaaaatacaaaaaattagccaggcatggtggcaggtgcctgtaatcccactactcaggaggctgaggcaggagaatcacttgaacccgggaggcggaggttgcagtgagctgagactgtaccacaacactccagcctgggcaacagagtgagattccgtctcaaaaaaaaaaaaaaaagttaatcctttaaagcctatttgttctccaaattacatcactttacagacactcaaatggtttcaagcaatataatcactcccatctcccttgatgatgtcccaccacggatagctcgggccatggaaaatgaggaatactgggactttgatatttttgaactggaggctgccacccacaataggtgagttcatgcagagctcagcagcgggagaactagattcccagggcctgtgtgaggaggctacctgaggagtatggattgtgcacaagcctggtacctggtcagggtggggccctaaggaaggagtaacagggcaccaggtggctctgagtcaccagggcctgggggagagtctgctggccacagtgatggcacattcatggaaagcatgcaactgagccagtgacttctccaagtagcacaggacttttttctgtgaaataaaggtatttctcctgtaggtggtaatatgttaagattgctgtaagagatctgctcagagcctagaaccaaaatttattagaaacacatacacatgtgataagagctgctcccagcttttggttgttctgttggtgataggcatagggacacccaaagccccagtcatcctcatctgggtgtgatcacagagagtgggagcaggaatggggttttgccttgagttttttcccttgcgggagaagagctgttaaccaaaggtggtagttggctgggcacacaagaaagggaggtccacagagctgattccagccaggactgcccactagggtgtctaggcagaggtgtgctcggttgggccatgggatggctcctcaggtctcatctcagtctgggtgacctgtccccaagataactccctgactttttcaggctccccttgagttaaccttctgatacgttctacttccctatctcccagcacagccaaggagagttgaaaagaatactccctgggcacatgagtctttgagcatctggtttacatgctagtgacattacatccatgtgaattgggctaaggcaggtcagtttaagtcctgtgatcacttctggatactgcctcaacacagccagtttcttggccttcacaggcaagggccagatgctgggtcaaggtgatttctcaagtaagaacctaacttggtggccagctggaaacctcaggggaaatcccctcatacttttaacgcccacctccagaaaggtgggtgttgagaaaattccattgcatacggcagtgtctggcttatatgacattttcaggaaatgttttcttataggcaggatgtctggccaatggcatgggtccagcaagtccaaaggagaggatagtgttcaaggtggtacaagcttagcctggagaaagggttattttgaggaacccactagtgcaagtaggaagctgaacctggaaggacagaatgagcaaactccccccaacaaatcgggagccccaacgaggctgaggtcagagctgctgtgggcagccagctctcacccgtgcatcatggtcccctgagggcaagaagtggaaccagagttggttggccccaccagagagaggccagcacagcccaagcaatctccactttgctgccctgcactctctgaaatttggcttggaacctattcaggccttaaacacttggcctgtttgtttgctttgttctaatattgtggggttttttctgtctataggcctttgatttatcttggtctcaaaatgtttgctcgctttggaatctgtgaattcttacactgctccgagtcaacgctaagatcatggttacaaattatcgaagccaattatcattcctccaatccctaccacaattctacacattctgctgatgtgcttcatgccactgcctattttctctccaaggagaggataaaggtgagctgttgtttacctgccacatttaatgggcagg

SEQ ID NO: 14595 - DNA, 2300 bp, Homo sapien
aaggacaggatagggctattcttctgggggtctcactccaagcctgtacactagtagagccaagtaactgttggatatccccactttagggcctccatctgtacatgaaagtctgcagggctctaaggtcaggttcatcatctctgttcccagcactgctcccacccagggttatctacctaatccagggttccattatccaaccggatacccagattagaaaccgagagtcatccttggttctttccactcctcaaccccccacatctggttgatcatctgaccttgcctcctgtcacacctaaatgttctcagattcatctcctgctgctgtcccagtgaggccccccgcaatcctttcgcatctgggcagttccaaactagaattcttgcctgccctgcctcccatggaatgcccttaccctactgccaatgtgatctttctgaaacagcatacctgatattgtcattcccaggagcagcttcccacctccctcaggatttaaactttaaactctacagctctccacactcacctcaacaatgagctcctctcatcatttcttctcctttgtcccagtcacaggccacttttgggccatgccaaaccactttagtttctgaagcttctgcccttgacctgttgctcccttgactggggcctaagatgactgcagtcatgcagggccagggcaagtggctcctggctgcatttcctcctctgtatcacgggactagcatttggcagagagcaaagcagaagatgacatctggcacacacagggagtgaacaagtgttcattcctcaccttgaagggtaaaccttctcagaactttccgtgctccctctggttcttatttctgtttttgttttttgtttttttccagaaaaaatcaaatcagactgtaggtaaaatagggtgtccagagaaggggactgttttctaaattatgaaaacaagtaacaacagagggacatctgtgtcaatatggctcagcatataaagaacccaatttttgctgtattgcttttaaactactctatagacaacatacaaatatatatttagagagctaactgaaaacagtttattagagcatttattgaaatgtcatggtggctcacacctgtaatcccagtactttgggataccaaggcagatggatcaggaattcgagaccagcctagccaacatggtgaaacaccatctctactaaaaatagaaaaattagctgggcatggtggtgcaggcctataatccagctacttgagaggctgaggcaggagaatcacttgaacccaggaggtggaggttgcagtgagccaagatcatgctattgcattgcagcctgggtgacagagcaagactctcgtctcaaaaaaaaaaaaacatttattgaaatgtaattcacataccatactatttgcgcacttaaaatttaaattattgaattttaatttaaatcaatttaaataaatttgcaaggctgatttattagctatacatctcaagagtctgtagggtatttccaaaaatgatcttatactgggacataatgtgttgaacttctaaacttcataggctatattttctaaccacaacacaacaaaatagaataactaatggttaaatttaaaatatcagctacaacaaatgagaaaatattctgaataatttgggaatcaacaaagaaataaaaccaaaaatgacattagttagaaaataacaaaaatgagaagcttatctgtcaaaacctatagaatgaagccaattatatagttaaaggtttatgttttaaatgccttaattacttttaaaagggaagaaaaaaaacatgggaaaagcaaaatgataatccagtgtggctcttggaaataaccaagaaaataggtgaagttctagccaaactagttaagatataaagacacaaaaatatacaaatttacagcagaaaatagaagtactgcacacatatgtactaaatcaaaagctttaaaatagttttaatggaatgttttaaattaaattgatgtaagaagtaaaaaaacaaaaaaaaaaaacaaaagaggccaataacatggaagtaattttagtaatttttaaattattatttaatttcttcaaaagttggctcctgacccagatggacaggtgaattctttagccctttaaggaatttttccatgttacataaaacttttcagagtcttgaaaaagatggaaaacttccagatcattttgtcaaactcacaaaactctgacatcaacctgacaaagatagcactaaaagggggaaga

SEQ ID NO: 14596 - DNA, 2300 bp, Homo sapien
ctggcacacacagggagtgaacaagtgttcattcctcaccttgaagggtaaaccttctcagaactttccgtgctccctctggttcttatttctgtttttgttttttgtttttttccagaaaaaatcaaatcagactgtaggtaaaatagggtgtccagagaaggggactgttttctaaattatgaaaacaagtaacaacagagggacatctgtgtcaatatggctcagcatataaagaacccaatttttgctgtattgcttttaaactactctatagacaacatacaaatatatatttagagagctaactgaaaacagtttattagagcatttattgaaatgtcatggtggctcacacctgtaatcccagtactttgggataccaaggcagatggatcaggaattcgagaccagcctagccaacatggtgaaacaccatctctactaaaaatagaaaaattagctgggcatggtggtgcaggcctataatccagctacttgagaggctgaggcaggagaatcacttgaacccaggaggtggaggttgcagtgagccaagatcatgctattgcattgcagcctgggtgacagagcaagactctcgtctcaaaaaaaaaaaaacatttattgaaatgtaattcacataccatactatttgcgcacttaaaatttaaattattgaattttaatttaaatcaatttaaataaatttgcaaggctgatttattagctatacatctcaagagtctgtagggtatttccaaaaatgatcttatactgggacataatgtgttgaacttctaaacttcataggctatattttctaaccacaacacaacaaaatagaataactaatggttaaatttaaaatatcagctacaacaaatgagaaaatattctgaataatttgggaatcaacaaagaaataaaaccaaaaatgacattagttagaaaataacaaaaatgagaagcttatctgtcaaaacctatagaatgaagccaattatatagttaaaggtttatgttttaaatgccttaattacttttaaaagggaagaaaaaaaacatgggaaaagcaaaatgataatccagtgtggctcttggaaataaccaagaaaataggtgaagttctagccaaactagttaagatataaagacacaaaaatatacaaatttacagcagaaaatagaagtactgcacacatatgtactaaatcaaaagctttaaaatagttttaatggaatgttttaaattaaattgatgtaagaagtaaaaaaacaaaaaaaaaaaacaaaagaggccaataacatggaagtaattttagtaatttttaaattattatttaatttcttcaaaagttggctcctgacccagatggacaggtgaattctttagccctttaaggaatttttccatgttacataaaacttttcagagtcttgaaaaagatggaaaacttccagatcattttgtcaaactcacaaaactctgacatcaacctgacaaagatagcactaaaagggggaagaaaactaaatcaattcccagttaatgtaagtggtgcctattttaaattttatttaaaattgtttctctcctttattaatattagtttatgctggtctaagtcaatatctcagactaaggacttttttggtgatgggtctagagaaagactggctgaggaggtgactcctatctgttgagaacacctgtattttggtaagtccttaacttgtgtgagactaacaaatatgcagaaatataactgtttcagggtggagataggaaaactagatttgctcacgtagtatgcttttcttagaaatctgaaatattcttacctgaaagtaataggggagaaagaaaactatacagaaggcttccttgccttcagtgtcataccccagtttttaaaagctctcttgttttcaggaaactttagatccaattgatgaggtcgctgcactcatcgcagccaccattcatgatgtggatcaccctgggagaaccaactccttcctgtgtaatgctggaagtgagctggccattttgtacaatgacactgctgtgctggagagccaccatgcggccttggccttccagctgaccactggagatgataaatgcaatatatttaaaaacatggagaggtaagaacaatgattgggaagtgtgttgatccctctctttcttttttaaacagctatattgagatataattcacatcttatacagttcacccatttaaagtgcacaaagtatacagtgggccggacatagtggctcatgcctataa

SEQ ID NO: 14597 - DNA, 2300 bp, Homo sapien
agtggggctgccaacagcagggccttcaccacagccagcggatgctgggccagcgttccccactcctcttaccaaagcacgtgaatcccatatgctgaaccaccagaacagcaggaactcttctgacttttgctcagtcccacagtctagcactgttcacctgactttcttggcacttgtccccagcaccgtcaacacttacctagcatacacgcacctctgggcactgtgctaggtatggtgccatcctaggaaaacctccagaggttcgcctgcttctctcaagtagagagcccatatggagagccggagtgagttgttgtgcacagggcaaggtgcagaaatacttggtagagccaggcctctgggtgtcactctgggagagcctgaggtgctgggccaggtgtagtaaggaagatgggagaagggtgactgagtgcacagaaaaaaggcaatggagtcagcgactttagggagctccacgcaagtgccggagctggtgccgtagagctgcggtggggggagagagatgctgggacgagagaactttctgacctggcatcccctggagggcctgtgagtgcaagcatgggaacgttctgggcgaggtgctgcagccatggtgaggccctgtggagcaagggctaaggggaggagctgcgagtgagttctgccagctaccagagcctggctgtgatggggtgagctctgctggccatttgggagctggaagttcggctgtgagtgtagaagacacgtcttgtgagtggccaacagtgggacgagacttcagtggttagcaagtggttagcctttcttctgtgcactcagctacccttctcccttaccacacctggcccaacacctcctcaggccctcccagagtgacccccagagggctggctctaccccctccagccctggcactggggagaaaggctagtgttcaatacaacagccaccatcccttcacccggccccacacatgtactagggtcccatctagaagagctgctccccccagcccactcctacctcactccatctgcgctcaccctgttctcatcctgccccactgtttgacttgactcccagcacaggcgccctggcacagcagggatcttgcagcgattccggttgcacatccacaggggcttctaaagaatgcactcaggacttctggcctcattcccaccccatggaccttacctcacccttttctccagcaccattgggccaaaatgagaccttatcaaagaaagaacaggacgcttgcctttttcctcaggttcttaattatgtttttagttttttgcgagtctctctgaaatcctgaagatgtggaagagtttgactaaagtacataaatactcagagctctttttttttttaaacatccaggatctcaagggtgttcagaaccttttcaaaaaaataatttagccatagatgagaagcagccactaggcccttccttgtaaagtggcccctgtgtggggatgcttcaagccaggtggaaggacggctggactgtgataggagtgagaaaagaacagatctttttctttgagggatgtgagcccccttagttgtcagacccagagaggcattgaaatgtgacagcagttacgtctcactccccaccctgacctaagtaatcgcctgctctgtggactctaggccagtagcctgtaaactctgtatattaattttgcctcagtttctttaggtcaatacgaacaacagagcggtggctgactacacataatgtttgggatcttacctgaagagcttctgcaaggaggcttccagatgtttaaagtttggcttgagttggggtgtcctcagaccccactgacatggagtagtcctcattctgagaacttggtatctgttatgagacatggtttggctgcgtgaggtggtgattggcttctcaccatgacaagccaccttaggctgccaggagaagctcttcctgggggaggggctgcccctaggtggagtggaaccagatgttggggtctcctgatcacattttctgctttacagactgatgaagagaagcagcagggcttacctgtggtgatgccagtgtttgacagaaatacctgcagcatccccaaatcccaaatctctttcattgattacttcatcacagacatgtttgatgcttgggatggtaagaaatcttccttaaaatagcatattttcctctaaataatggggaaccgcgtatgaaagagcagagtgcatttgactgtagaatatgatttggggcctgggctttcaagaacaag

SEQ ID NO: 14598 - DNA, 2300 bp, Homo sapien
agtggtggcatgtgcagcccatgctggcactgatggaggctgaactgcgtaaatcccaggtgctgttcagcgtgacctgaggggcacactacagcgagctcgagctggatgtcctgggtgcccaggcatgaaaaatgttcaccctcctggacgtggtgaactgcaaggcccgcttcatccacgatggccctgaggacacctctgaccagctggtgctggaggtgtcagtgatggcttggttgcccatgccctcatgcctgcggaggggccaaacagacctcctgcccatccaggtcaaccctgtcaatgacccaccccacatcatcttcccacatggcagccttatggtgatcctggaacacacacagaagcctctggggcctgaggttctccaggcctatgacctggactctgcctgtgagggcctcgccttccagctccttggcaccccctctggcctccccatggagcaccgagaccagcctggggagccggtgactgagttctcctgctgggagttggaggccggcagcctagtctatgtccactgtggtggccctacacaggacttgacattccgggtcagcaatggactgcaggccagccccccggccatgctgaaggtggtggctgtccagctggccatacaaatccaccgcagcacagggctgcatctggcccagggctctgccatgcccatcttgcctaccaacctgttggtggagaccagcgccgtggggcaggatgtgaccgtgctgttccgtgtcaccggaggcctgccgttcagggagctgcagaagcagggggctggtggggtggaggatgctgagtggtgggtcacacaggcgttccaccagcaggatgtggagcagggccacgtgaggtacctgagcactgacccacagcactacaccgaggacaccgtggagaacctggatctgcaggtgcaggtgagctgggaaatcctgagcaatctgtccttcctagtgaccatccagagagccactgtgtggatgctgcagctggagccactgcacactcagaacacccagcaggaggccctcaccacagcccacctggaggccaccctggaggaggcaggcccaagccccccaaccttccactgtgaggtggttcaggctcccaggaaaggcaactttcaactacagggcacgatgctgtcagacggtcagggcttcacccaggatgacgtacaggctgcagaggtgacctatggggccatggcacgtgcctcagtggcagtggaggacaccttctgtttccatgtcacagctccaccatatttctccccactctgtaccttctccatccatattggcggtgacccagacatgcctgtcctcgtggtgcccgagggtggtgggtgtgtcctctctgctgaccagctcttcatcaagagtctcaacagtgccaggtacctctatgaggtcatggagcagccccgccatgggaggttgacttggcgtgggacacaggacaagatcactatggtgacatccttcaccaatggagacctgatgcatggccagctggtctagcagcatgatgactctgagatcactagaagatgatatcccatttcctgctgccatcaggaccagagcagtggtgacgtggcctgggaggaggtatggggtgtcttctgagtggccatccagcctgtgaatgaccacgcccctatgcagaccatcagctgcgtcttccacgtggcctggggtaggtggcggctgctgactacagacaacatggccttcagcaatgctgattcgggctttgctgaggcccagctggtgctgacccaccaggacctcctctctggcagtatcatggccacggatgagcccatgcagcccatctgccgcttcatccaggaggggcctcaggaagaggcgagtcctgttcacacactcaggctgaccacggctggatcccgctgcaggtgtccgatgggcagcaccaggccatcacggtgctggaggtgcaggccttggagccttacctctgtgtggccaatggctccggcctcatggttcctcaaggaggccagggtaccatcaacatggccgagctccacctgggcaccaacctcaacatctgcagtagggatgaggcccactaccacgtcacagacagccctcactggggacagttgctccaagccactcagccagccacagccttctctcagcaggacctgctggttggggctgttttctatggccacaatggcagcctcagctcccgcaacaccctggccttctcaatggatgtgggaccag

SEQ ID NO: 14599 - DNA, 2300 bp, Homo sapien
ccctgccacgcctgttttcatgggcagtgctgagccccggtcctggcagagctcagaaccaggctctcatgagctggggcaagtggggcctagggaacctctgggttgaggaccttgcaccccactctgcagctgccctgctgatttggctcatgcaacctctcctcctgggctcaagcgatccttctacatcggtctcccaagtagctgggatttgggctaccacgtttggctaatttttgtatcttttagtacagctggggtttcacctgtagcccaggctggtctcgaactcctgggctctagtgatctaccctcctcagcctcccaaagtgctgggattacaggtgtgagccactgcgcccagccttgtgccagcttttaaatatcaacaaggacagattagagaacagtggaagagggtgagcagcatgatgaggtgatacagaaataatttcacacgaagaactgggcatgcttggcctttttttttttttttttttttaaagccattctgggttgggtgctgaggctcacacctgtaagcctgtaatcccagcactttgggaggccgaggtgggtggatcacctgaagtcaggagttcgagaccagcctggccaacatggtgaaaccctgtctctactaaaaatacaaaaaattagctggaattggtggcatgtgcctgtaattccagctactcgggcagctgaggcaggagaatcgcttgaacctgggaggcggaggttgcagtgagctgatatcgtgccattgcactccagcctgggcaacaagagtgaaactctgcctcaaaaaaaaaaaaaaaaggaaagaaagaaaagaaaatatatctatgcaccagagctcaacactaggttaggagcatttctgagatttggagctattcgaccatggaagttcctggcacatacatcaggtattcacaataccctttctcaggtgtttggtcactgctagtgagcctgcctggatcagtgtttcccaaatggcagtcatttgcatctttgcatttttttttggaggggggggttgtgggggtatattccataccagatttttaaaaaattgacattaaaaatacatgaataaaatgtgtaaagtgcactaatctaaagtgcactggatgtattttttattgatgtacatacttttgttatccatcacccaggtcaaaatacagaatcagcaccacagagggttccctcctcctccttcccagccaataatcttctcctcctacctaaccaactgttcttacttcaatcactgtcaactagtattttacattcttgaactgcatataaagtgtctcaagtttcacttaacacttttcttgaaatacacttgttttttgccactttttatttgacctaagaagtaacattaatgaaacaatgatttgacgtgataggcatttccctcctaatgagcactaaaacacttaactatttgaaaaaagaagtttctccgtgtaccaactaatatattctcctcggccgccgttggtacacggaccacattttgtttctcaaagcaatccgatgatttctgaggtcctttgcagcttgaacacggaacgactgtggtgatagagtagccaaaagttcacgggaatgcactgtcacaattgtgattccgccatagcgccgtgcatccatccaacacttgtttaatacctatatttaatacctaataccttagactgtcctaggctgtggacacagaagactaaaccccacttcctgagttgaagtgggggaaatagaggagtaaatcatttcacgatgtgtggttaaatgctacagctcaggtaaccacgagcacacagagaaagggcagtttctggaaacagggcggagaggagaccgtgagtgggcatttcccagagcagtctctgccagccaccctgctgtgatcactttgccacagagcagccccggcggtcaacctcagcctcccttagcaacctgagcgccccgcccaggtgccttactattggtctcgtggagcgggatgggcagctctgccgtgcaatcccagctcgcagcccttgctccgcgtgtactcacgggaggactcgcagacgttactgccctcttgcgtgccccggccacccccgggcggcttgtagccggtgcgcggggtggctggggctacgtgcagagctgtcgcggagccggagcagcagcggtgaaggccctcggctcggccgagaccgccgtgcccactgctcgcctcggttgccgccgctttagccgcagccgctgctgccgccgccggg

SEQ ID NO: 14600 - DNA, 2300 bp, Homo sapien
tacactcaccatccgaggttggcaggacttttgtttcagtattgaacagatggaactgtttagttcttcatctttgcaggtataccaaatgtgcctaccaggagtctgctttatagccattgaaaagcaagaagtaatatagtaaaattttgcctggctagaggctttggaagacaagtattttggcttaattctattaacttggaaggatgaaggtgaaaaaaaattcaaaactttaatttcctgtttattgccatttgaaaatatagccaatgattccacttttcttctccagtaagtttggacattctgatctacttggtgttttattatagaactcctagtgtgcctgagtcttacattgtgaagatccttctctaaaacttcacatgtaagagaatataaatgatattggataagatcaggctggatgagaactgatacctgtaaatatgcgatttagacgaaatctctgattgttttcttatttaactcataaaaataaaactcattggctggaaggtgggagcaggaaggagatttatgtcttttaattgcacgtcattgtttcatatagagacagaacatatagtatccctggttttggacctacagaaggaaacacatttttctacctgctgtatgccagaggttcttgaacacctggagggattactgcagcacagattgctgagccctactccagagtttctgattcatcaggtccagggtggggcctgagaatgtgtatttataagaagttcccaggtgctgctggagctgctagtccagagactacatttttgagaactgctctcatatactaactgtaagttgcagagctctagaaaaaaagcttagtttggtgtgggataagaagcacacaggttatggagaaaatcatgaaagattcaacccttgatcccagcctagtgtggatttcaggtaacaagcaatacacagtgacataacaaattcttggttttcatgactgcaagtgatagccaagtatcaagtgagaaattcagtttcatttgcaaggcttagagagtccaggtgattctagaaaaatgggccttgtatttctcttaaaccagtaaagagctttaagtggttattaaattgaaagctttgtgttcttacttattttgtattttattttatttcttttgagatggagtcttgctctgtcgcccaggctggagtgcagtggcgtgagcttggctcactgcaacctccatctcctgggttccagtgattctcctgcctcagcctcccaaatagctgggattacaggcacccgcaaccacgcctggctagtttttgtatttttagtagaggcagggtttcttcatgttggccaggctggtctcgaactcctgacctcaggcaatccacccacctcggcctcccaaagtgatggcattacaggcgtgagccaccgcacccggcccaaaagctttgtgtttttaaagatattagacatgtttcttgtttttaaaagaaatcttaacaataatggagaataagacaaacatttttccaaaaaagagaaattgttgtgattattttgtcttattggaatgttggatactatagtcggcttcattaatcatcaagcatgctatggattttccatttttataggatctatatctcagttaaggtaatactggtaattcttgtactccatttgaagatgaaaaatataggccaaaatcacagactttgcacagaagctgcataatgaagacagctctggaggaacacatagatacacacacacagacacacatatatataaagtatatacacatatattttttaaagtttattttttacagttttaaaagttttaaagcaaaacccagcccttctcctctcccagagtgggcggcccctcccctttctctgagtgggcggggacagcggttgcatgggcagctttccttatgatgccacaggtccctctggacatgctgctgcctggccacgcctcctttccctttcatctttctcactgaccaatgggcttggagcattaaggccacgcccctattctgcgttccattggtgccctggttacgccacctgtggctcagttgcacagctgcctggtaggtgactggaggcattgagcagtgctcactggtatttcgctgatgtggccccaaccccgcctccctccccaccccgcgatgtcagaaaaaacacaacaggggaaattggccgcagccaagaaaaaggtaaaacacaccaggtcacggcccccaacccagccacagatcccctccgatgac

SEQ ID NO: 14601 - DNA, 2300 bp, Homo sapien
ctgtcacccaggctggggtacagtggcatgatttggctcactgcaacctctgcctcctgggctcaagcaatccttccacctgagcctcccaagtagctaagatttgggctaccatgcttggctaatttttgtatttgttagtacagatggcgtttcaattgatgcccaggctggtctcgaactcctgggctcgagcaatctgccctcctcagcctcccaaagtgctgggattacaggtgtgagccaccgcgccaggccttgtgccagtttttaaaaatcaacaaggacagattagagaacagtggaagagggtgagcagcatgatgaagtgatacagaaataatttcacatgaagaactgggcatgtttggcctttcttttcttttctttttttttttttaaagccattcggtgagggttacttaagaaaatagggccgggtgcggtggctcatgcctgtaatcccggcaatttgggaggccgaggtgggtggagcacctgaggtcaggagtttgagaccagcctggccaacatggtgaaacactgtctctactaaaaataaaaaaattagccgggtgtggtggtgggtacctgtaatcccagctacttgggaggctgaggcaggagaatcgcttgaaccctggaggtggaggttacagtgagctgagattgcaccattgcactccagcctgggcaacaagagtgaaactctgcctcaaaaaaaaaaaaaaaaaaaaaaagaaaaaagaaaaaaagagaaaatatatgtgagcaccagagctcaacattaggagcatttctgagatttggagctattcaacaatggaagttcctggcacacacatcaggtattcacaataccctttctcaggtgtttggtcactgctagtgagccgcctggatcagtgtttcccaaatggcagtcatttgcatctttgcttttcttttgggggcgggggggtaatatcctgtaccagatttttgaaaactgacattaaaaatacatgtttaaaatgtgcaaagtgcactaaagtgcactggatgtattttttattcatgtatatacttttgttatctatcacccaggtcaaaatacagaaccagcaccccagagggttccctcctcctccttcccagccaataatcttctcctcctacctaaccgctgttcttacttcaatcactatcaactagttttacacgttcttcaactgcatataaattgtctcagttttttacttaacacttttcttgaagtgctttcgttttttgccactttttatttgacctaagaaataacattaatgaaacagtggtttgacgtgataggcatttccctcctaatgcgcactaaaaacacttaactatttgaaaaaagaagtttcttcgtgtaccaactaatatattctccgccctgtctccagaaaccgcccttcctctgtgggccggtggttaccggcaccattggtacacggaccacattttgtttcccaaagcaaccagatgatttttgaggtcctttgcagctcgaacacggaatgactttgtggtgatcgagtagccagaagttcacggaatgcactgtcacaattgtgattccgccatagcgccgtgcatccatccaacacttgtttaatacctatatttaatacctaataccttagacggtcctaggctgtggacacagaagactaaaccccacttcctgagttgaagtgggggaaatagaggagtaaatcatttcacgatgtgtggttaagtgctgcagctcaggtaaccaccagtacacagaggaagggcggtttctggagacagggcggagaggagaccgtgggtgggcatttcccagagcagcctctgccagccaccctactttgatcactttgccgccgagcagcagcggcggtcaacctcagcctcccttagcaacctgagtgccccgtccaggagccttactattggtctcatgcagcgagatgggcagttctgccgtgcaatcccagctcgcagttcttgctccgcgtgtactcacgggaggactcgcaggcgttaccgccttcccgcgtgccccgcccaccctcccgagcgtctttcggcgcatgcgcggactggagctgtgtgcagggccagcgcggagcccgagcagccgcggtgaagcgcctgtgctctgccgagactgccgtgcccattgctcgcctcggtcgccgccgctttagccgcctccgggggagcggccgcctattgtctttctccgcggcgaaggtgaagagttgtcccagctcggcccgcgggggagcccc

SEQ ID NO: 14602 - DNA, 2300 bp, Homo sapien
ccaattcaaacacgtaccgtgcctgcactatgttaagactaccggcaaagagggtaaaaagctaaataaggtctatcacagccctcaaggagttaaaggactagaggaggagtccatttatagtatagtatgtgtgcagttaccatttagtcaaggcaaaagaagtgtgagaaatcctaaaacaatagtacctacagtataacatgccatcaccgcccagagaaggaaagcaactagtgcactcgtcacgtcatgttgtaagtagtacttgcttacattatgtccctccctgacaatcccttccaacctctgtcaacctccttccccacaatcacacacacaaaaccacacaaccaggaagggaagccatggagcgagtactgtgaatcctaaaagcggctctgtaatttaaaagtgcaatggctgtacctgaagaaaatttgtctttagcttcatcaggtgaagaaaattggttttataacacaaggcccaccaaaccagaaaagcccaggaacgcttctccacaggactcacttagcacgagaaatcactctgagcaaactgacacacacagtatttctcaaatttttctttttcatttagcagatggtaaaggaatacaactgaagttaacaataaatgacactctggccattttgctccactatgaatgacagacatttaagctagttccatctggggaactgaaacagaatcatgttcatataataagccacacaaaccaaattaagtgtaatatgtgcacccaaacttgacaaaacttgtacttaatgcagcctgcaaatccccaagagtccacgacagaatacaagaatagtaacaatgatttatctcaactgatcttagcttcttcacaaacttgccaataatgacctttcaagaactgcaccgtttgtcctcatctgcgcaatccaacagttcagaaaaactgaagaaaatgcttcttctaaaaataaaacacttgttgtgggggggactactaacaaaaaaaaaggcacactggtttttactgtactgaagcaataaactctccaaataacttcattaaggagtgtcattagcaaagaatgaacaccaaaataccgctcaatccaattttcattgtgaattccgggatctagaaaattaaatgggacggtatcactctgctataagaactatttccaaaacaaaacaaacctatctaccccctttcttgatttttttttaaaaagttttagggtttttccttttttcaacttcacatacttcgtggctttgcaaaaaaaaaaaaaaaaaaaaagcagtaaaccgtatttaccaaaaaaaaaaaaaaaagttttgtttggtatcaaagtatagctgcaagctgagccggctggctgcacgggtcccagagcgcgtggggaccgcacgggtctcctgggccgctcgcctgcgacccgcgcgggtcagctgggccgcacccccgagaagccgcggagaggcaccgacaggcaggcgcggcccgacgtgtttaccgtccgcgtcgaccccggggagccgctccctcgcgcccgcagcacttgttcacggcgcggactccacggcggggactccacaccgcggccgcccgccccaggggaggagtgagcccgccccggcggcgccgacccggggacccggggcaaggattcggggcctcgctgggggcggagcgcctgaggtagcatcggcggccgggcgcgccccccacccggaaagcggcgacggcctctaagttgggctgcggagtgggaggcgcgccgagccccaagcagacaatgcgggagaagggcgatgcgcagggaggaggggtccgcagacctgaggtcccggcgccgcccggcgacccgtctgtccagcccgcccccgaaacccccgcagcccccgcccctcctccggggcccgccccaccgagcaaccgcaggggactggccgcgctccgcgccccgacccacaaatcacaaaacttcccccaactccgccaactaagttgcgctctcaccgtgcggctcccggggctcccccgcgggccgagctgggacaactcttcaccttcgccgcggagaaagacaataggcggccgctcccccggaggcggctaaagcggcggcgaccgaggcgagcaatgggcacggcagtctcggcagagcacaggcgcttcaccgcggctgctcgggctccgcgctggccctgcacacagctccagtccgcgcatgcgccgaaagacgctcgggagggtgggcggggcacgcgggaaggcggtaacgcctgcgagt

SEQ ID NO: 14603 - DNA, 2300 bp, Homo sapien
gctgcaccttgtaatggaaaagagctaggatttgtttttacttgtatatatgaggcagggtgtaagtagactctgcccttctgaagacaatgaaaaatataggtgggacacagtggtgtaggccctataatcccagcactttgggagaccaaggtaggaggatcccataggctcaggtgttggagaacagcctgggcaacatagtgagaccccgtctctacaaaaaataaaacaattagtcaggtgcaatggtgcacacctgtagtcctagctactgaagaggctgaggcggcagggtcacttgagcccaggagttcaaggctgcggtgagctgtgatcacaccactgcacttcagcctggcctcagaatgagagagcccaccttaatgttagcagctcaattgaagatattcactgagctttttaaaaatcaggtttttgagactcttttatttttattttttttaagacggagttttgctcttattgcccaggctggagtgcagtggtgctgtctcggctcactgcaacctccgcctcccgggtacaagcaattctcctgcctcagcctcccaagtagctgagattacaggcatgcaccactacgcccagctaattttgtatttttagtagagacagggtttctccatgttgaggctggtctcgaactcctgacctcaggtgatctgcctgcctcagcctcccaaagtgctgggattacaggcatgagccaccatgcccggcgagactcagttttcatctacttcctaaaataagttcaaaatttagaaaatagatatttcatatatcctaatctattttgaacatcccagtatataggcagatatgaaaggaaagtaatatcagaaataagaggaaatttatttgtattcttttagattcgcttatcatgtgaccttagaagagctagaatagaagtgagttctgtccaacagaatttttgctcagaggtgtcagtgacatcttctcctacaggcagttttttaaaagtgtatttcatttcctcctagaaaacaaacctcaagcagatggacagtcttatgcccttaatgatgacagcacaggatccttccagtgccccagagacagatggccagtttcttccctgtgcaccggagcccacggaccctcagcgactttcttcttctgaagagactgagagcactcagtgctgcccagggagccctgttgcacagactgaaagtccctgtgatttgtcaagcatagttgaggaggagaatacagaccgttcctgtaggaagaaaaataaaggcgtggaaagaaaaggggaagaggtggagccagcacctattgtggactctggaactgtatctgatcaagacagctgccttcagagcttgcctgattgtggagtaaagggcacggaaggcctttcgtcctgtggaaacagaaatgaagaaactggaacaaaatcttctggaatgcccacagaccaggagtccctgagcagtggagatgctgtgcttcagagagacttggtcatggagccaggcacagcccagtattcctctggaggtgaactgggaggcatttcaacaacaaatgtcagtaccccagacactgcaggggaaatggaacatgggctcatgaacccagatgccactgtttggaagaatgtgcttcagggaggggaaagtacaaaggaaagatttgagaactctaatattggcacagctggagcctctgacgtgcacgtcacaagtaagcctgtggataaaatcagtgttccaaactgtgcccctgctgccagttccctggatggtaacaaacctgctgagtcttcacttgcatttagtaatgaagaaacctccactgaaaaaacagcagaaacggaaacttcacgaagtcgtgaggagagtgctgatgctccagtagatcagaattctgtggtgattccagctgctgcaaaagacaagatttcagatggattagaaccttatactctcttagcagcaggcataggtgaggcaatgtcaccctcagatttagcccttcttgggctggaagaagatgtaatgccacaccagaactcagaaacaaattcatctcatgctcaaagccaaaagggcaaatcctcacccatttgttctacaactggagacgataaactttgtgcagactctgcatgtcaacagaacacagtgacttctagtggcgatttggttgcaaaactgtgtgataacatagttagcgagtccgaaagcaccacagcaaggcaacccagctcacaagatccacccgatgcctcccactgtgaa

SEQ ID NO: 14604 - DNA, 2300 bp, Homo sapien
aggtgatctgcctgcctcagcctcccaaagtgctgggattacaggcatgagccaccatgcccggcgagactcagttttcatctacttcctaaaataagttcaaaatttagaaaatagatatttcatatatcctaatctattttgaacatcccagtatataggcagatatgaaaggaaagtaatatcagaaataagaggaaatttatttgtattcttttagattcgcttatcatgtgaccttagaagagctagaatagaagtgagttctgtccaacagaatttttgctcagaggtgtcagtgacatcttctcctacaggcagttttttaaaagtgtatttcatttcctcctagaaaacaaacctcaagcagatggacagtcttatgcccttaatgatgacagcacaggatccttccagtgccccagagacagatggccagtttcttccctgtgcaccggagcccacggaccctcagcgactttcttcttctgaagagactgagagcactcagtgctgcccagggagccctgttgcacagactgaaagtccctgtgatttgtcaagcatagttgaggaggagaatacagaccgttcctgtaggaagaaaaataaaggcgtggaaagaaaaggggaagaggtggagccagcacctattgtggactctggaactgtatctgatcaagacagctgccttcagagcttgcctgattgtggagtaaagggcacggaaggcctttcgtcctgtggaaacagaaatgaagaaactggaacaaaatcttctggaatgcccacagaccaggagtccctgagcagtggagatgctgtgcttcagagagacttggtcatggagccaggcacagcccagtattcctctggaggtgaactgggaggcatttcaacaacaaatgtcagtaccccagacactgcaggggaaatggaacatgggctcatgaacccagatgccactgtttggaagaatgtgcttcagggaggggaaagtacaaaggaaagatttgagaactctaatattggcacagctggagcctctgacgtgcacgtcacaagtaagcctgtggataaaatcagtgttccaaactgtgcccctgctgccagttccctggatggtaacaaacctgctgagtcttcacttgcatttagtaatgaagaaacctccactgaaaaaacagcagaaacggaaacttcacgaagtcgtgaggagagtgctgatgctccagtagatcagaattctgtggtgattccagctgctgcaaaagacaagatttcagatggattagaaccttatactctcttagcagcaggcataggtgaggcaatgtcaccctcagatttagcccttcttgggctggaagaagatgtaatgccacaccagaactcagaaacaaattcatctcatgctcaaagccaaaagggcaaatcctcacccatttgttctacaactggagacgataaactttgtgcagactctgcatgtcaacagaacacagtgacttctagtggcgatttggttgcaaaactgtgtgataacatagttagcgagtccgaaagcaccacagcaaggcaacccagctcacaagatccacccgatgcctcccactgtgaagacccacaggctcatacagtcacctctgaccctgtaagggatacccaggaacgtgcggatttttgtcctttcaaagtggtggataacaaaggccaacgaaaagatgtgaaactagataaacctttaacaaatatgcttgaggtggtttcacatccacatccagttgtccctaaaatggagaaagaactggtgccagaccaggcagtaatatcagacagtactttctctctggcaaacagtccaggcagtgaatcagtaaccaaggatgacgcactttcttttgtcccctcccagaaagaaaagggaacagcaactcctgaactacatacagctacagattatagagatggcccagatggaaattcgaatgagcctgatacgcggccactagaagacagggcagtaggcctgtccacatcctccactgctgcagagcttcagcacgggatggggaataccagtctcacaggacttggtggagagcatgagggtcccgcccctccagcaatcccagaagctctgaatatcaaggggaacactgactcttccctgcaaagtgtgggtaaggccactttggctttagattcagttttgactgaagaaggaaaacttctggtggtttcagaaagctctgcagctcaggaacaagataaggataaagcggtgacctgttcctcta

SEQ ID NO: 14605 - DNA, 2300 bp, Homo sapien
actctggaactgtatctgatcaagacagctgccttcagagcttgcctgattgtggagtaaagggcacggaaggcctttcgtcctgtggaaacagaaatgaagaaactggaacaaaatcttctggaatgcccacagaccaggagtccctgagcagtggagatgctgtgcttcagagagacttggtcatggagccaggcacagcccagtattcctctggaggtgaactgggaggcatttcaacaacaaatgtcagtaccccagacactgcaggggaaatggaacatgggctcatgaacccagatgccactgtttggaagaatgtgcttcagggaggggaaagtacaaaggaaagatttgagaactctaatattggcacagctggagcctctgacgtgcacgtcacaagtaagcctgtggataaaatcagtgttccaaactgtgcccctgctgccagttccctggatggtaacaaacctgctgagtcttcacttgcatttagtaatgaagaaacctccactgaaaaaacagcagaaacggaaacttcacgaagtcgtgaggagagtgctgatgctccagtagatcagaattctgtggtgattccagctgctgcaaaagacaagatttcagatggattagaaccttatactctcttagcagcaggcataggtgaggcaatgtcaccctcagatttagcccttcttgggctggaagaagatgtaatgccacaccagaactcagaaacaaattcatctcatgctcaaagccaaaagggcaaatcctcacccatttgttctacaactggagacgataaactttgtgcagactctgcatgtcaacagaacacagtgacttctagtggcgatttggttgcaaaactgtgtgataacatagttagcgagtccgaaagcaccacagcaaggcaacccagctcacaagatccacccgatgcctcccactgtgaagacccacaggctcatacagtcacctctgaccctgtaagggatacccaggaacgtgcggatttttgtcctttcaaagtggtggataacaaaggccaacgaaaagatgtgaaactagataaacctttaacaaatatgcttgaggtggtttcacatccacatccagttgtccctaaaatggagaaagaactggtgccagaccaggcagtaatatcagacagtactttctctctggcaaacagtccaggcagtgaatcagtaaccaaggatgacgcactttcttttgtcccctcccagaaagaaaagggaacagcaactcctgaactacatacagctacagattatagagatggcccagatggaaattcgaatgagcctgatacgcggccactagaagacagggcagtaggcctgtccacatcctccactgctgcagagcttcagcacgggatggggaataccagtctcacaggacttggtggagagcatgagggtcccgcccctccagcaatcccagaagctctgaatatcaaggggaacactgactcttccctgcaaagtgtgggtaaggccactttggctttagattcagttttgactgaagaaggaaaacttctggtggtttcagaaagctctgcagctcaggaacaagataaggataaagcggtgacctgttcctctattaaggaaaatgctctctcttcaggaactttgcaggaagagcagagaacaccacctcctggacaagatactcaacaatttcatgaaaaatcaatctcagctgactgtgccaaggacaaagcacttcagctaagtaattcaccgggtgcatcctctgcctttcttaaggcagaaactgaacataacaaggaagtggccccacaagtctcactgctgactcaaggtggggctgcccagagcctggtgccaccaggagcaagtctggccacagagtcaaggcaggaagccttgggggcagagcacaacagctccgctctgttgccatgtctgttgccagatgggtctgatgggtccgatgctcttaactgcagtcagccttctcctctggatgttggagtgaagaacactcaatcccagggaaaaactagtgcctgtgaggtgagtggagatgtgacggtggatgttacaggggttaatgctctacaaggtatggctgagcccagaagagagaatatatcacacaacacccaagacatcctgattccaaacgtcttgttgagccaagagaagaatgccgttctaggtttgccagtggctctacaggacaaagctgtgactgacccacagggagttggaaccccagagatgatacctcttgat

SEQ ID NO: 14606 - DNA, 2300 bp, Homo sapien
ctgaggcgggaggatcacctgagatcaggagttcaagaccagcctggccaacatggagaaaccccatctctattaaaaatacaaaaattagctgggcatggtgacgcacgcctgtaatctcagctacttgggaggctgaggcacaagaatgccttgaacctgggtggtagaggttgcagtgggccgagattgtgccaccgcactccagcctggatgacagagtgagacagagtacaaaaagttcaatgatacgatttcagattgcataccgaaagtagcttttaagaacctactgtttgtcaattctgatctagtatcaaagaatatcacaattatttgagaaaactattaaggtagttctcccttttctaagcatatacctgtatttgcttaattttctttatatacttcaactaaaacaatatattgcaataggcttaatgcatgaaagatgtaagaatccaaatattttatattaagtcagaaattaaaacaataccactcctctaaatttttttgtagaaaagtaattttttgtagaaaaaatatctttataaaaatataattttaataatgattagtttattgtagtaaatgaattaataaacattttttaaatttctcagttttaacttctaatacagtaaacatttctagatataacctatataaacaaaagctctttggggctcttaatttttaaaaatgtgaagagatcttaagaccaaagagtttgagaactgatgggttataaggaatacaagaatagctggaagaaaaacacacacacacacacacacacacacacacacacacacacaaagaattcaggtgagagaagatgagagtatgagttccctaaattggcagtttaatgtgataagttaaatttactgtctcagagaaaaaaagcttttcttattttgggggaaaaggatagaatcttgggtgagagctttctaacttaacagactatatgaaagctaatgcctttagttatatgtgagattaggtctaaacaatttcataacattatgaatgatgctggtgaattaagagtaattacagcaagaacaataaacagagatggttttctgaagggcaaataaaattatttaggaaaagacttttgatgacctatgtgctaatgaagttaactgaaaggtacttcctaagggactatatggctgaataagtctcattgcatttttgaaagaccagggcaaatggtaaactgacatgagtaactctttttaatgcaagttcctgaattattactcggattagtgcccattaatgtacattttaatacataatagtaatagataccctcataacaataattctgagccatcaaggataaattttgctcagcatttaagaagtcagccaagtacatggatattttagaaatatagtgtagcaaaggtgtcaaagtagaagatctggcacgtaaggctttacctccagctatctgactgccattccaaaaagattaacttgtcacaggttctacagtggaaatgttccaataattgtaagagggtcttcccactcctggggaaagtgatattaggaagagccacagacacaatgctaaggaatggaaggtaaaaacgtggcagaagaattttatctccctgacaaagacaagttgtttcttcagctcagttattcattgtggtcatcaggacataaatgctttttggggctgggtaggggaatatattcctttaaaaggctatcttgttaaatttaaaattaatgtcatgcatttgttaaatcttttaattactatttgtttattaaaaagaatttcctaaaggaacatttgtgttgtgaaaatggatgtcaatatttaaagtcctgtctactacattaaaaatggcccagcagtgcctctacttagcagcagctgttgaaatttcctccaagtaattgtgtatatctaaaagtaaaagcctgcttttaaaaatatttaacaattcgtacttttaatttatttagatttgtgctattatcttccaccattagactaaactagttggttatgtgataaaacgcttttcagaggaagaatagtaagctagcctttttttttttttttttttaaatctaagctattcccatcttccccattctatgctggggtgatacaccacaagaagttacaggaacaactgctaaaagaattaaacatcttgggcctttacacagctgttgccatatcatggctttggtgcatggtcggtcacagatgctgtcaagaggcttatgtttagttatccttttgcttcccc

SEQ ID NO: 14607 - DNA, 2300 bp, Homo sapien
atctctgagataccatgtctcagattcactgtgtctaaaagtgaattcatcatctgatctctcccctgccacctacttctgctgcattccgccctttacctagttgttcaggacagaaacctagtccatcgtcacacttcttttacttctgctcccaccccaatgcccaatatcctgttaatgttaaatatttttggactctcggtttcttttcttgagctctgctttcagcagctgagttcacactgccatcatttctcacctgacttctctaacagctttctgactcatctgtctctaagcttgctcccttctgtcttttgagcgtattccagaaaaatatatttttgaaatacagatgcgatcctgcctttcccttgctaacaactcttcgattgcttttcctattgtagcgacaatacacttgtgaacacaagtaacatgttcagctggggctggcctcatcctttgtctctgtgctctttcttccctctgggccttatgcagtcttctgcctgaacgtagacacaggtcagtctctctagctttccttgcctgcctccctacagcaccatccacacatatacaccctttgcctggttaattcctattaagtcttccatcaagtctcagattagtaatatactgtaagggccagtctcaaacatgattgtaattatttaatatccattttgttcactgccgtatcctcgatgccaagcgtacatgtttaataaatagttgcctaatgattaaactttactgaaaagcttattgaagatttagggcagtgacatggagttgtactatacagtcccaataatgtcacagattttccatgtgaaatttcctggttgttgttgaaattgttagttactctatttgccatgtttagtgttcttggccctcaggttttaaaagttctaatgtatcttaaaaacatgttaggaaaatttgacaatacatgaaacatttattatgctttgaataggtgcagtttattatgtgtaaattatactttagtaaacctgtttaaaaattacctcataataaatacttttcaagatctagattaccatctgaaatagattttttttactggtggttttgtctgaatcacatacgcattttgcacttgtatatataccaactatttgggtgggaaaaatagcataaggttgtgaattcatttgaattgactatttgatggtatagttatcatgtttaagtagatcaagcgtggtggctcacacctgtaaatcccagcagtttgggaggccgaggcgggtggatcatttgaggtcaggagttcaagaccagccaggtcaacatggtgaaacaccgtctctactaaaaatacaagaattagctgggtagtagtgacacgtgcctataatccccagatactcaggaggctgaggcaggagaatcacttgagcctgggaggcgaaggttgtggtgagccaagattgtaccactgcactccagtctgggcaacagagtgagaccctgtctcacaaaaaaaaaagaaaaaaagaaagaaaaagtaaatgtggagagaacatattcttcttaccttaatgccttaaaagggatgctattatttatagtaattttactcaaaaatttgcacttacgggcttcatgaaattggtaagatttctacatgtgagaagaagttcttgtgtcattgtactattatgaagtagcttttgtttttgtttttgtcagtgctggactgtcttatgttcttgtggtcatgctaaaaagaaatgttgttagaagattcaaaactatgagtaaatatggcttatagttttatcaaatacaacagtctttaggatctggttttaaatagacaacataaatggttatcaaacagtacactgcatgagtagtgtctcatttcccttttggatagcattatttgataggttgaataggagaatgccatacatttagtatgtattaatttcaggaagaagttttattaattattctgtattgtatagaagatggaggtatgggactcagaattcagttggctttgtagctgatagaccagcattttacttaatcttaggagtgctggggccgggtgcggtggctcacgcctgtaatcccagcactttgggagtccaaggcgggtggatcacgaggtcaggagatcgagaccatcctggctaacacggtgaaaccccgtctctactaaaaatgtagaaaattagctgggcgtggtggcgggcgcctgtagtcccagctactcaggaggctgaggcaggagaatggcatgaaccccg

SEQ ID NO: 14608 - DNA, 2300 bp, Homo sapien
ggcttctgtgtggctgggatgcatatgggcagcctgctttgtctgtgagcacagcatttcattgcctttgctatgggtgtcactaactcagctgaagggatgcagcctaagagtcgggtgatgcatcctgtatgtctcaaatggccatagatttgatgttttctgcacagatttatctctctctgttttggtttgtcttgattttcagatcctaaaaattcttggaacccgaagaaaacaatcaaagaaccaaggcagctaataagatgcactgatttctattatgcttctaaatccaccattctgtgtagattccaaattcagagactcctcatcgtttcatattcttctctcaactgaacagccagatttaattactaaaacattttcagaattaagttttgcagtaagcatagatctggttttcttaggcttttcaagtaatttcttcttcacttagcccctcctcttatccctggtattgaaagtgagttttacaggccaggcatggtggctcacacctgtaatcccagtactttgggaggctgcggtgggcggatcacctgaggtcaggcattggagaccagcctgaaaaacgtggtgaaaccccatctctactaaaaatacaaaaattggccagacacggtagcaggtgcctgtaatcccagctacctgggaggctaaggcaggagaaccacttgaatccgggagatggaggtagcagtgagccaaggtcgtgccactgcactccagcctgggcaacagagggaggctctgtctcaaaaaaaaaaaaaaataggaaaagaaagaaaatgaggtttacagagtcatttacttgtagttagtcatgatttctattatattgaagaaaaacatatccattgtttagtttacctactagagaaaatagagttatatggcttcagttcgttaagttatttacaaaaccaaaataaataaataaataatttaaaaaagcaaatacaagtcctggactggtaggtatgaacttaattggagcaattttctgtacagttttccttgagtggaggtaactaagtagcttcagtataccttcagattgaattccagctcattgttagcggagaacatggtcagctacagctatgtttcgagatcttggttattttaaagaagtttccgctgcagttgtaacagatgtgaattactctagttagcaacccaaggaggttaaatcgctaacctgtctctgtagccttctgcttactgaaaatgcttttcattctgcaaaccacagaatctgtcttggaggaatcctctttaaaatgccaaatcctgactgcctttgttccctttaccaatatccaggcaaaaaattacaactctttctactcttagaccaggttgcttttcagcatttgttcattaaggtgttatatgtgcctgttgcaactaacaattctcgagaagtctgtcagcagttgtttggccaggtgtgcatagatggtaacactcatgagtaacacttgggttttcttgggtgaaagcatacctgtaaaattataaaggtcaacttgaatgtaaaattataaaggtccacttaatggacataagggcaagttacccagtttgccttctgaaagttacttaagctcgtattttctctgtgacatttaattacttggcattagtagagttagattcacaaagattaattagatcaaggaaaaaacacatatataaaatatcagataactatggtctgtccatatagtgtgtagaaaaaaatctgagaagtgatcttaggtggttcaacatttggataaatttaatgcggtaagaaaatctaagtgcagtattctttctcagtattccaagatctgtgggggaaaggtaggtagtattctttgtgccatgcccttttagacagttttgctagctgacatagaaataatacacaaacaagggagatatacccaaagggattttgtgtcctcctttgtttttgagacccagaaatagaatgaattaacttttgtgccctatgttcagtttcagtctagaaggcttgacaggaggagctggtgtcggaaacaagccatcctcatctctagaagtaagctctgcaaatgccgaagagctcagacacccattcagtggtgaggaacgggttgactctttggtgtcactttcagaagaggatctggagtcagaccagagagaacataggatgtttgatcagcaggtaagtcttaaatatgtctaatttggaaaaaatatatttcacaaaatatgaacatagaaggcaaggcttctgg

SEQ ID NO: 14609 - DNA, 2300 bp, Homo sapien
cagatttagctccagctcatttaaatgacttgcctaaggccgtgtaagtggctattagctgaacagtattaaactcaagagttcctggctattaatttctctgcttttttccaggtttttggagtaggtgagttttcaaggaggaaataagaatgatttaattttcttaatattatttatgtgataccttttctaagatggatatttccgggaatttgacagataaccctgcattttagtaagacgttactactactgatgtgtttctaaaatggactgtctttctgaagtggactttctgattcagtctttctagataaagttgttgttttagtgccttgctatgcttagccttcctggaatctctacttacccatagtttttatcttgtatggaacctcagagtaggcatttgagctgcttgtttcactctgatctagacgagttgcctgtagccaacttcctgttaaaagtctctgcctttcactgaggtcattttttagacctcacagttgtatttgaaacatagcaactgtttgcctcagctgccatggttacacatgaaacaagctctaaataatcagaagtctggcctaagtgagtcaagttcatgctagtaacggatttttcactgcttccctttcaatatgtgagtcataaggaggcagatttcattctgtgaagggaaaggattaatgataaagtcagttaacaattggaatgggctcttatcaccagaagtgtgctagtggacactagatgactgtctttcagggatgttgtaccaggaacttctgcaggtggttggattacatggtctcaaagctgctgtgaatttactgagagagttaaattatcaaatttcagttacctttacgttcatgtagaatcactatcatcttagaagaggatagggaagagatttaggcttctttccagatacactgttgttttgtttgtgatcttaagacactttacttgaatctcaatttccaattatttaaaatcagaggccaggcctggtggttcacacctataatcccagcactttgggaggctgagatgggtggatcatttgagcccagggatttaagaccagcctggccaacatggtgaaaccctgtctctaccaaaaatacaaaaaattagctgggcgtggtggtgcacccctgtaatcccagctactcaggaggctgaggcgggagaatcgcttgaacctgggaggcagaggttgcaatgagccgagatcatgccactgcactccagcctgggcgacacagtgagactctgtctcaaaaataaaaataggctgggtgcggtgactcacgcctgtaatcccaacactttgggaggccgaggcaggcggatcacaaggtcaggagttcgagacctgcctgaccaacatggtgataccccatctctactaaaaatacaaaatttagctgcgcgtggtggcgcgcacctgtaatcccagctactcaggagtctgaggcaggagaattgttggaacctggaggcagaggttgcagtaagtaaaccaagattatgcctctgcacatcagctgggtgacagagtgagactctgtctaaaaaaaaataataataaataaagtaaaatcagaatactattactgatattctactatatctgtatgaagaaatatttagattttcaaagaacaagtattgtatgtagtttgatatttccagtgaaattatttttaagtgattatgcatccagcagatatttattaagtacttactaagtttgaaacattgttagatgctatgagggatacagaaccactgtaaagaatggatactctaatgatccccattttacagatgagaaaactaagcctcagaaaagctaagtaacttctctgaaactgagcagctgttaagtagcaggagcagactttaacctaagtctgtctgaccacaaggcctgtgctctcacccgcttcttcactgccttattttactatgtgggtctaattataaggttttatgcttatctagaaatatgagagtatatgcttacaacgtgttcttcacttttttacttcacagatatgtcacagatctaagcagcagggatttaattactgtacatcagccatttcctctccattgacaaaatccatctcattaatgacaatcagccatcctggattggacagtgagtatactactttttaaaaaaattaaatatattaaatcttaaccactcttcctattatttttctcactttaaggccccataacattacctgccaaaatttgcttactacttcttt

SEQ ID NO: 14610 - DNA, 2300 bp, Homo sapien
aatcagacttctttttgacatttttattaaattgtaagactggaaaacatgcatgttcattaaatgcatatataaatataaactttaattcaattaccttgtaaaattgaattgctctgttaccagaacatttcctttatatcatatatatgttggaaatttccatatgtcagggatactctagacactcatcacgtaagatttttccttatgatccatgattttgtgacacatgaaggagatgttcttagattctgagtaataggggcagcttattttcattttctaaatctgtttgacatttggaggcacatcagaacacacattacagtagtatcttacttttgcacaagactctgcctgagaaactagtgtgtatttgtaccaacatttctttgatctgttacttggagtagctgcaacagcaaatagtgatgtcacttagcatttatctggggtatggagtggctttcataataggtaggtacagggctttttctctcatttcatttaggacattgagattccagaaagtctgataaagggaagttcatttattaatgtgtctatccagtaaatatttgagtacctactcttttccgtacaccaggctagaccatggtaggaggggggtgaactcacaggtagggttcctttcctcaccacatttacagatgagagcaagtgaatctaatagaaaatggtaaatgcagcaacttaaacatctgatgttataggactgacagacctaaggggtcagaaggctgactaaggaaaagtaatattaaagtttggaccagaaggaaactgggaattagctgggtgaattagtatgtggaaagcaagactgaggaatttgggcctcttgcctgagggaattggaatcatttacattgattaagttggtcgaataatgattagaacacttcaggctgaccatagtgagaatgtattgggaggagagattggatcagtagaaggctttttttttttgagaaggagtctcactccatcgcccgggctggaatgtagtggcgctatctcggctcactgcaacctctgcctcccgggttcaagcacttctcctgcctcagcctcctgagtagctgggattacaggtgcccaccactatgcccagctaattttttgtatttttagtggagacggggtttcaccgtgttggccaggctagtctcaaactcctgacctcatgatttgcccacctcggcctcccaaagtgctgggattacaggcgtgagccaccacgcccagccagtagaaggcttttgcaggattcaagttacagtagtagacaatgtcctaaaccaaggcagagagcagtggcaataggggaggaatagaggttgagctggaagacaaagtgaagaagcctgagtgaagtgtgatataaggattcaggaatggtgcccaggtttccattttgattaatgagttagatgttggtaccactcactaaatgaaggaacacaggaggaggaacaggtctgcaggaaaagataagttcacttacctgcttttggagctttagctgcctgtggaacatccacccacaggtgagcagggagaggaatgagcctagatctaaacagagatccggcttccagattagaaagatgtgagtcaccagtgtgttgtatgcagatcgttgttaagaggtggagtgaattaggagatttggggtgagggagaagagagccagatataaaatcctgaggaacatcactactagatgtttttagtatacttttaaggaagagaaccccaggtatgaattgtgatcattcttattttcataatctaacaggtatgtatttattagccaaattttttagaaactgcattagaattctgtatattcagaaatggagatgagaatgtaaacaaattattacatcattcacctagacagcatttcccggaaccgcataggccattgacattatgctgtttccccatgtgctgaaggccctggcataatccgagcatgctctaatgtcttctgtgaacctccttctcagctcagcagcagatgcggccagcaaggcggatctccatcagcatctctccgctcctccttaagtctaaaactctcttttctcttggctcttcttattcgagtgatgaggaggaggagttgcatagtaagtaagcaactttggtgtccagtgactgttcttgaaggtctgaccagctcagaaaatgctgtaggcttggtactaagaaattgtatgggggcttttagcctcttgcatgccatcctttgtaagtcatttgtcttt

SEQ ID NO: 14611 - DNA, 2300 bp, Homo sapien
caggctggagtgcaatggcgcgatcttggctcactgcaacctctgcctcccaggttcaagccattctcctgcctcagcctcctgagtggctgggatgacaggcatgcgccaccatgcccagctaattttgtatttttagtagggatggggtttctccatgttggtcaggcaggtctcaaactcccgacctcaggtgatccatctgcctcagcttcccaaagtgctgggattacaggcgtgaaattgattctttacttgacagcaagcaaaagatttctgttctgactcattatttttatttaggttttcatgcttatgagatagaatattctacttgaagtttaattggggttcctatggctgccctgcagttttttctgagttgccttctttttcacagaggcatcagttatgattctgatttagaacccttgcaatgaatgcttctctttgcactgcttttatagcttattctttctcctttctacagcagtggttttcataccatttcccccttatcttaaaaacagactgctgtattttgtaaacaatgcatatataaataaactgactgttgacaggaccccttgtggtgctgcttctgcctgccacctgccctctcacagaggccctagaggcaatcactgctgttctgtgggaaatgtctaaaatattttagaacacctaagcaaagtagtataaatggatgccttttctatataacggattgtttatttgaatgcccagctgctcttttgtttgtttgtttgttttgagacagagtcccactgtgtcacccaggctggagtgcactggcacaaacaatctcggctcactgcaccctccacctcccgggttcaagcgattttcctgcctcagcttcccgggtagctgggactacaggcgcgtgccaccacacctggctaatttttgtattttttagtagagacggggtttcaccatgttggcgaggctggtcttgaactcctgacctcgtgatccgcccacctcggcctcccaaagtgctgggattacaggtgtgagcaccgcacctgccccaaatgcccagcatttaagaaaatcaaccattgcaaattacctaagttagaacatgcccatcttggatggacttagattttatgtaggtttcttgaacaggtagatcactgaatctacataaaactcctaaaattgatctttcaacactgtgcctcaattctgtctgctcctcagtaagttccctcctaaaattgaacctagctgcatggaccagtccacagtcctgattgtcccgtgtgccaaaggctagaaaaaagttgtgatctctaccgttaaggaacttggatatgtggtcagtcataagattccttggtttgcaactcctattaacaagtaccctgtcattctgctacatatatgggtttcctttcaagcacccatttgttacaaaggagtttgtagattgaatgctattgtagatgaatagattccatataaaataattactgaataattgacaggctctttttaacatgaggtcactgaaaatccataattaaaacattaaaaatgggccaggcggtagctcacgcctgtaatccaagcactttgggaggctgaggtgggaggattgtgtgaagccaggagttcaaaatcagcctgggcaacatagcaagaccccatctctacaaaaaaatttgaaaaatagccaggcgtggtggcatgtgcctttagtcccagcttactctagaggctgaggcaggaagattgcgtgagctcaggagttcaaggctgcagtgagctatcatcacaccactcagagcaagactgtctccaaaacagacaagtgaacaagaaaacattagtgacggatctaaggaaacttagccaagttttgataacagaacctgggcgttgtggcatactctataaaaagccattcagcagccttcatctaccttttattctgcttcacttttatttaacttctgtagccctttaaaaaaaatcaatcttcttgtttttatttagtataacagaagagaactataatttcctgccacatagcccctccaagaaagattctgaatggaagagtggaacaaaagtcagtcgtacattcagctacatcaagaataaaatgtctagcagcaagaagagcaaagtgagtatcactgtgggcattgcttgtgatcacctcagtaggatcctgtcacagcctgcattcacaccaaaactggttaaatcatggggacataaatggaaataaattcaggattactctccgaaatcgcctaata

SEQ ID NO: 14612 - DNA, 2300 bp, Homo sapien
atagaatttgaattggaaattaatgattatattaatgctcattgagtcaaagacatcctgaaatactgtgaagtcataactaccaccccagtcttatttccttcacctcttgacactcctggggatggacagataatgcaacctgtgaatgggacagcaagtccattaccagggaaaaatgttcccaagtgccagcgtgaccactttagcaaattagatctccagtttcctctttagtcatgttaatgagaaatatgcactatgagaacaatttagaattgacccttgaataactcggatgataggtgtgccagccccacccccatgcagtcaaaaatccacataaaactttttgactcccccagaacttacctactaatagcctactgttgaccagaagccttaccaataacataaacagtcaattaatgcattttgtttgttatgtgtattatatactgtattcttacaataaattaagccaaaggaaaaaatgttattttaaaaatcataaggaagagaaaatatatttactgtttgttaagtggaagtagatcatcataaaggtcttcatccttgtcgttttcacattgagtagaccaagaaggaagaggaagaaaagaagggttggtcttgctgtctcaagggtggcagaggcagaagaaattccacatataaggggatctatgtagttcaaacccatgttgttcaggggtcatctgtagttacaggtgttaaacaagtgttaaattttcctcatctgtaaattaaaggaaatcatcaaaatctatgctcgctagcagggagcgcagaagaatcacttgagcctgtaagatatgtagactcttgggttccacccctagaagacaaggggggctgagattccatatctaacaggcactccagatgtcttcatggtgaacggtcctaaagaacgctgctcccagttatctctcaggttccttttacccttaaaattctttcaatcttggggccaggtgcagtggctcacgcctgtaatcccagcactttgggaggccgaggcgggcagatcatgaggtcaggagtttgagaccagtctggccaacgtagtgaaaccccgtctctattaaaaatacaaaaattagccaggcatggtggcgggtgcctgtaatcccagctactcgggaggctgcggcaggagaatggcatgaacccaggaggcggagcttgcagtgagccaagatcgcgccactgcactccagcctgggcgacagaacaagactgcatttcaaaaaaaaaagaaattctttcaatcttatttgcagcttaaatattaaaatatgtaatactcccacaggattctttatccccgttgcctgtcccaccccagaggtaaccactcttcttagttttttttgtttattttcctggagttcgcttgttaaagtaaatacaacttggattatttttctttcttttaagcatgaaagatagcctgttatatactttgttctgcactttgattttcctccccttaatagatcttggagatagatctatctgtgtcagtacttggaaagtgtccttattttttgtaagtggcattgtattctgctgtgtggtgtagtataacttattcaccagtcttcttgtgatactcatgtcattttcagtcttttgcttttaccaatggtgttgcattgaataactttggacataacatcatttcacgaatatgcaggtatatcttgtaaaataaacatagcctaaaagtgaaattgctggatcgaagaatataggcatttacaatttcaatagttatcaccaaactatcctccatggagtttttatacaaacttacagttccagggcaaatccactgtaaagcgccttacttctgcttgttatttgtcagatgggtcagtaccaggtggagctggatgggtgatgcttcagttagtgtcctctcctccatggagtttttatataaacttacagttccagggcaaatccactgtaaagcgccttacttctgcttgttatttgtcagatgggtcagtaccaggtggagctggatgggtgatgcttcagttagtgtcctccttttgcagcctcacagcccaaggagcgtcctcggtccgcagtcctcctggtggatgaaaccgctaccaccccaatatttgccaatagacgatcccagcagagtgtctcgctctccaaaagtgtctccatacagaacattactgggtaagtggagatatttaaagatagcacagttggcatctaggtgaccagagcataataatcacatcatatga

SEQ ID NO: 14613 - DNA, 2300 bp, Homo sapien
tcactctgggcatccaaagccaggagttggctccagctagagtccagacagcagcagaggtgaagttccctgtcacacagtcacagggtgagtgtgagccagctgtggcccacagggctccaactatctccccctctctccctctctctccaactcccaccccctctctccctgccctgccgtcttccatgcaaggcagcggtttcctggtccaccctggccttcgcagccccggccatcccatctgcattccagccagtggaaaggggaggagagaaagtgatgggcaagcctgttttaagggcatgtcccagaagttgcaccataacttctccattttcccaacagctagaactcagtcacatccacgcctgactgcgagcgggactggaaagtgccccgaggaaactccaggactccaacgccaagtaaagggagcgtagatattagacaggtagcagcctcttcctctacatgctgggtcaggggttggaaggaacctgggcacaccgccctgcctcccgcttctctgggagcatgcagagccgtcatctgccaagatcctggctcttgtcaaacccttcttgtcaagcagttgtcaagcccactggccagtgctttgcataactacctcctttaaccctcacagtgacccccggaggtagacattcttgtcctcttcttgctgatgaagaaatgggtccacaggtcacagtaacttgcccaatgtctcatgctggaaagaggaggaggaggaggaggaaaaaacacggttgcaactgacagaatgtggatttggagctaggcccacctgagtttgggttcaagctctcacgtgtggctctcatgtatgtgcaagcttggttaaaccacttgattctctgatacagacttaatgatagtagggttaaaagttgaggtcaaattctataaagcactaaacaccaggaccaatgcccagatagccctttacagggggagaatggccgccacattacagcagtggaactgggatttgaaaccaagccatatgctacattgtgggggctgggggctgggagcagtgttgcttccagtcattgcccagcaggcctagctccatgttccttggcctcccaggggtcagactgagtctgggatggggcttggggaagggagaaggcgccttccccatcagtgatggggcaaggtctccctggaaacctcggtcccaagatggccagtggagctttcctgggttgtgcctgatgcaggaaagaaaacgggccatcttggaggctttggcatcctgagagcctgcctggggggactgtcaagttgccaagggcaaggagagggtagccaactgcctcctccacctggctgctcagccaggtctccctgccttcaaaggacatttctttggtcaggaattgacaagaatgagcccagagtcatccaccccaagggtgtgtggcaaccatcccttgctcaacaccgaaggctgtagaatcatagtggggaaagaagcaacttcttcagaagcagttgtctaatgagcacagcttggaaagagccttggttcttctggatcatcactggggggatatttcgcagagcaagaaacttgcatgccccgtccatcatgtcccagccccggccccaggcccagccccgatggatctgcccggcctctctccttcaggaggtgggaatggtctcttccaacttgaagaggccatgaaggtgatcggccccccagctgctcttcttccctcaggcccaaccctacctgacctgcagcttggcccgcccatggcacctgcagaggttcaggccctgcccagggagccagggtgatttgggtgaatttcccagaacgggcacagtattgtcctgcatcttcccttgccttgttgggctttgggatgtggctctgcctcattaaaggtcaaggaaaagcctagaataggccggaggcttcttaacttgggatttgggatcaaattcagggggtccatgcacttgggtgggagaagaatgacacctttgttttcactaacctctgactgaggttagtgatcaagtgatccgcccacctcggcctcccaaagtgctgggattacaggtgagagccaccttgcctagccccagtcactgttgaggtcaccattttaaagctgaggaaacatgctcagcatggcagcagaagctctggcagtttctgtgtgtctggccccagctgcccaggccccctgaacctgaggggccttgctctggccctggggttggcctgggtttggcacctggcgctcgggccc

SEQ ID NO: 14614 - DNA, 2300 bp, Homo sapien
tgtggcttctctgcctcttttccagaggaggagtgagcaagagagagccatgtagccggacactcatttacaatttcactgaagcatgaaatcgtttcctacctttaccagattattacctaagtagaaaattgacttggagtgggaggcggcaggagagttacatacttttgaaaattaaaaatgaaaaactttgttgtttagggttttttgtttttcttggccccattaccagcaggaagacagcagcacaggcttttagggggtcaagatactggaatgcagtttgctttttggccatgttttcttttctttcttttttttttttttttcaggcttaattcactttatttttcttgtataaaaaccctgttgtagccacagctggagcgtaggtcctctgcatggagactctggtgagggtcttgacaaggtggtcagtgaattcctgatcgggagacttggtgaatacagtctccttccacaggtcagtggggcaggtagctgtggtcttcgagatggcctcaagggtgttggccatgttttctctaggtatatgagttttgccgcctgttggctgagccttgagttcaaagtactgaactggggcctcgggtcatgccattcactggacattaatgacagtgctttagaattcccctagattgagcaagtagtgaacctgtttcttggccatcactccatcactctgagcgccaggtccccaggcctggtggagaagggcaggcaagggaggcaggggaggcgctgcgttggcccaggatcctggcgtcagctgggggacctgggaagctctggcttcgtgtttctctgctttgctgaggcaaatctggatcacttccgttagggttcggcatgtcctgctgtcatcttgggcctctgcgttggtctcgagggtgagtcactggcggccccacctccaagccatcacttgccccagctaggtaaagagccctgtggagacacctggattcagagaacatgtctccactgagcacttgggccttgatggcggctcttgttccaaggcaagggggatgtctagccagtaccgcttggagcccggcccagggcagagcctgctgggagcagggaagtgggtacgtgaggctctgcttgggcgtccacagcaaaccctgcagggattagtcaccttgaacagagatcaggctccagagccggacagcccatgtgagaatcctggctgtggcagtttgggtagtttcttggcctctctgagctgtggcttccctagctctaaaatgggacttacaagagaagcttctgtagaggactgtcatgagagtggaatgtggtcaaaggcaccagttacttagcactgcccggacaccagcctcagtcaggaacaccgtttgcatgttctcttaaccatgggaggcagcctcaactggagcttgcctagggggtggctcatctgcaggccagagatgtttgtcccagagctggctcataccctgagaacaaaaccagtttctgcagggcagggtgagacccagccactcttgcctgtgttgtccttggcaacgtggttgcgggagaggggcttggtttagcagaggtgagcagagagtgggtgggaggggacaagggggcttgtgctgaagagtgagccctgagagggcagatgggcaggaggggctcctctaacctgtgggcttgttcccccacaagctgacgcaccatgtcggtcagtgtccatgagacccgcaagtcgcggagcagcacggggtccatgaacgtcaccctcttccacaaggcctcccacccggactgtgtgctggcccacctcaacacgcttcgcaagcactgcatgttcaccgacgtcacactctgggcgggcgaccgtgccttcccctgtcaccgtgccgtgctggccgcctctagccgctattttgaggccatgttcagccatggccttcgggagagccgggatgacactgtcaacttccaggacaacctgcacccggaggtgctggagctgctgctggactttgcctactcctcacgcatcgccatcaacgaggagaacgctgagtcactgctggaggcaggcgacatgctgcagttccacgatgtgcgggatgctgccgccgagttcctggagaagaaccttttcccctccaactgcctgggcatgatgctgctctcggacgcccaccagtgccgccggctgtatgagttctcctggcgcatgtgcctggtgcactttgagacggtgaggcagagcgaggacttcaacagcctgtccaaggacacac

SEQ ID NO: 14615 - DNA, 2300 bp, Homo sapien
cctgcataaaataataagcaacagttataaacttgccaagaatcaattttgcatgtggagcttcattcaaccaacaattctataaacactctagtgctagaaaatcggcaggataaaactacaaatgtgatctctgtcatttccttaatgaagtaattactttgatgctaatgtgttggagctggttccttccggtgggttggtggtctcgctgacttcaggaatgaagctgcggaccttcacggtgagtgttacagctcttagaggtggcgtgaacccaaagagtgagcagcagaaaaatttaccgtggagagcgaaagaacaaagcccccacagcgccaaaggggacccaagtgggttgctgctcctggctggggggcggccagcttttattagcttatttgtccaggcccatgtgctgctgattggtccattttacagagtgctgattggtccgttttacaaacctctagctagccacagagtgctgattggtgcatttctacagagcactaattggtacattttacaaacctctagctagatacagagcgctgattggtgcattttacaatcctcttgtaagacagaaaagttctccaagtccccactggacccagaaagtccagctggcttcacctctcactaccttttctcttcagaaggcaccttaacagtgcacttggcaagcttcttacctctggccaatattgttcataaatatcagaaccctggtgccttagatgtctgcagatctgggccaaatggaagcacaaatctgtactgagcacttactacatgccaggcctattccatatgttatcttaatctttcccatacccctgcaagaaaggttttagaatcctcttcaccagtaagaaccagacaccagagagtctgagccatctgcttcagtcctacccagctcttgaggggcagggcggggcttcaaacccagaacatcaagctgtttcccaaaaatgccttccctggtggtatcttctcatcatctcccagtcttttaaccctggcatatctgtcctgtctaagcagctttctacccaggggctctatttcccaggttccactagtcacaatcctatcccctctcccaaatctttgtacactttcttagaccttccttgcacctcccacctccacctccgtcagggtgacctctgcttcctgggaatttccccgccccaggcttggctctttcgttcttatcactttctatgctttaccttttgtatccttaagcaacctacttgaattatcgattttcattgggagggagaaaagagaggacatttattgcgcactcatttgtctgggaatttgtctcctttaatcccccaaataatccgatgaggagtttttatctgccgctttacggatgagattggacacacacagtaagctgaagtagtagtcaggagggaaaaggacgaagaatcacaaaccgttctccccctccaagatgagtgcatggtgtgggcgtccaggaaacgttcctggaagaaattattggatggatggatgaatgaatgaatgaacgaacatttaaaggctggcttacgaaaggagtttagtgagaaatgacacagagaggagagctgaaatactccaaaaaatacagatttcaagtacaggtggggtttggaggctgcagaaagtcccaaacattcaaacaagcccagagtgaaagacagggtttcattaacactcgggcaactactagtgtggctctgaagagtctaaagagatctacaacacttgtgacccgaacacaaaagaggcatatgcaatctacagtgctccctctggaaagctctagaacaccgtcgcgttttgttcccaaacttgggcggcggggttgggcaggcgcctgtctctttaagaatctggtcgaagtccttttcctcgccccgccccgcccccggtccccccccctccccgcccccggccccccaccccccggtgccggcgcggcctggggcccacccccttcttttctgcggctgcactgaagggttcggctgcccatccgtcacagaggcgatgcctctgattggctgctgctcttcgggccgggaggcggggcgggaaggccggagaaactagtttgttggcggcgcctaggctgtatcgcagcgagagcgtttttgcctgtggagagccggccgacgggagccgcggcggagcctgttgagctcgcgcgggctgccgggagtggtctctgaggcggcggcggcggcggggatcgtctccggcagtgagtatccaggccgggcggggac

SEQ ID NO: 14616 - DNA, 2300 bp, Homo sapien
tccttcctttcctttctttttaattttttattctttcaggtgctttattgggtatgatccgtatgcaacatgctaaattcttggggatgataatctgaaacacaaacagataagacatagtttttatcttcaaagagttcacagtctagtggacttggagtttgtccttattaagtgttctaatcaccaccttcaatggagtggtgaactcaagtctgaggcagccaaaagacaatgtccaaaagctccaacctatggaacaagagccagaaagcattacctggattaggtgggtaccagaattctagctggtaaaggactgcctgggctgctgtgaggacacagaagcaggccacctccagataagaataaatgccatttataagaaatacaaaaggaggtggcaacctggctgagtgcctggttctcagagactaagctccagaactttgaaggcagaaatggtctctgtcacaactattaaactttgctgttgcactgagaaaacaaccatgatcaaatgaatgggtgtggctcttttccaataaaactttattgacaaaaacaaccagtgggccatagtttattaacccctgctctaaggctaagtgggtcgcctagtcacatgtggaatgaattaggttgcagctcatgggttgaatgactctcctcccttcagatgcaccagttggagcacagccttactcactggtggggacatccttcccagtggccttccaggttgtgtttcccttagtaccaccctgggccatggctgaggttgcagtggagggggtgaaggcaagcaggaattgatggatgaagctgcaaagcacaagagtgggggccatggagttggtcatggtgtgtatactgtacctgaaaatatcattaaatgaaactcatgggaattacttttcttttaatttgaagtttggagaaaaattgtgaaacatagatggaacattgcatttttttgccccttggatcagaaatacaaacatttattttccacgtttattggatttaacctttcagtactgccaggtttttccttaactaatgaaatatacttgtaaaacatatggtattttttttttctctatttcattaaggaaacttaatctaggatatgaaaagatgaagagactgggctggttcattcctggtgtcttttctctgtaagaccctacaacccttggaaaacacacaagtattcagaggagagtcaccatcatcattaaaaggtttcgaaatggtgatctatcaagaataaacaataaagtgcctgggattattcagtccaataaataaaagactcacggtgccttggtaaatttttaaatgtacaaagggataaagatgtagtaggagaataccagctcctccccaggtctcataaggattgatataatttctctcccgcctacttctcaaatctcatctcctgcaatcttcctcttattctgtatgcaacagccaccttctttctgtaagcaaattgaagcttttccttctgctaataattcactgctaggcctatgcatagctggcttttttttttttttttgccatttaggtctcagttaaaactttacctccttatgagtcctcctgagatctcctaatccaaacagcctcccattccccagtcttagtaacatcattctcttttatcatttcaagaggagttataactgttggaaattaacttattcatttgtttactttcttctttactgtttttcttctctcgctaaaaggcaaataccatggaagcatggatgtttgtctgttccattgtgaccgaaacttcagtaccgggaagagtacctgctcacagtcggtgctgattaaatgtttgtgaaaagactgacaaacctaaatgtcaaagatagataaagagggacaataattacaatgatgctgacgatagtggcaatgagataaagaatttcttttataatgtgctttatcaattatgtagtttatctcattttatacaaatttttatttctgatgaaggctgataaatactgacataaatgctgagacaagtcctttatcttctttctttttattttaaaaatacaatccagcataacaaattcttcactggatgggccagtgctataatttggaggcaagaaaaccatgtcctaagattctgaagaagcacatacatatcatgtcttgatgcttctcagggtggatttcctgactgtaatctcttctatgactattccattttaggatgatgacttggaaacagacgtgaacaagctgagttccaaacctgg

SEQ ID NO: 14617 - DNA, 2300 bp, Homo sapien
tcccaggagctgccacatttacccaggggctctgcctcctatgctccctttggtgagaactgtctgtgcagctccatggatatcatgccaacttggctgcctgggctctccttgcaatcccatcaataagaatcagcatccaagaattccatacattggcttcagtttccttccagaaagaggattcagagccaccaagaatatttgaaattaacctgctccctgagttacaagctcaccttgagggctgccaacacaaggaaggtcatattacaccctttcatttatcagcctggaaaatggtgccgtagagtcgatttcatatgctaagggcagcctctgccctatgccaagagaaggagctcccaggaaatgcctgacataagtcatccttgttagggccacagaagaatgactcgcatggtggatctcagcatttggatttgcattaaaatgatggatttgttttgccttgctggtacagctcaccccagctccccaaactctctagtcttggaaagacatgcatagtagcctggtgcccaccaggagggcttttctgggcaaaaataattcatcagctctggagcctgctgctgtcttcccaacagatgtcctcttttgtttgtgttgcagtttggttcatgctaccaatgcttgataaaaagtgttctttagaaaagaaaaaatagagtggtaaaagggaattttgagataaaaatggattctattacaacctttcagtgcctaataataaaaagatacaattgcatataacttaaaatcatctattacacacacacaattcaacataatggagctgaagctgagtttgagttccccaccacacacacacatacacacacacacacacacacacacacacggcacagggctttaagcataacaatgagtgagggaaggttgatcctcagacacatgacacatgttcatacaggtgaggggcagctggttgatgattttaggctctactgtcacacagatgtcaagatgaaggccttttgggcagaagacgggactcatctctcattagcatgtgacataaactgtacttgaagtgtgtatatattctgggccagttccaatgcaaagtaaaatgggttcagtatcattggtagagaacacagtctatgagagaattaccaaatgagccacatttagttcttatgacaagtagttaaacagaggagagcactgactgtttacaaggctgaagcaggcaaggcgtggtggctcacaactgtaatcccagaattatgggaggccaagctgggaggatcccttgagcccaggagtttgagaccagcctgggcaacatagttagaccctgaatctacaaaaaataaagaaaaaaaatagccaggcgtgatggtgcatgcctgtagtcccagctactagggaggctgaggcaggaggatcacctgagcctggaagtggaaggttgaggctacggtgagtcgtgatcgcacaactgcactcctgcctaggtggcagagtgagaccctgtactctgtctaaaagtaaataaaaaggctgaagcaaagatgattctacatggggggatttcaatgatcttttatagtctctaggctcttatggggttaaaatgatttcttggtatcagacaagtattatgaccagctcctggcaaaataagtaacacttaagcataattatttggagctattcagttaaagtgtctgagtgtagccctggtcttgaagggcagggcaagacatggcattgagttcaattgtctctactggctgtgggacgggacaggaagcagagaagccgacaggtctgccatccaaacatccagggtatgggggttaaatgaatgaatgtcctggggtagaagactatcaaccagaccccacccacacttcattctgaagaggaagttattttgggaggtattagaggaggaaaaatctgcctgtgtttctgctctgctcagacaatcacataagtgactcatttcactctcagtaccagctctgtgggataaatggacattatgattgccattttaaaaatgaagtgcacccatacttaaagagacacgtttagtaaatgatagagctggaatctgttcccggggaaatctgacttcctaactcatgctccctccacttccccagaggaggtgaatatgaaccataacacagttacagctaacgtggtaattagcaacacttagtatctataatagtctaagaccatcgcaggtgtcatcatgtttaagcctaaaacttcagcccaacgagctaaactct

SEQ ID NO: 14618 - DNA, 2300 bp, Homo sapien
atatcataaaaatgacaaaacactgctgagaaaaatcaaagaaaatctaaatgaatggagagttatgccatgttcactgactggaaaactcaaaatagtaaatatgctaattctttgcaaattaatctataggtttaatgcaatctctgtcaaaattctagcaaaatatctttgtggatatagagaagaaaatttacatggaaggcaaaaatctactatagctaaaacaattttgaaaaaaagaataaagttggagaaattatatcatccaattttaagacgtaatgtaaagctacagtaatcaagcgagtatggtatcggcaaagggataggcatccagaccaatggaatggaatagagaatataggaatatatctatgcaaatataactaatttatttttggcaaagatgcaaaaggatttcaatagagagataatagtttcttctttgttgatttgtttttcaacaaatgaactgcaacagttgcacactgtatgcaaaaaggtcttttttaaatgcccttcaacctaaacttcatgccttaaatagatcattcatcaaaaaacaaaacataaatgtataaaactttcagaggaaacacaagggaaaccttcatgacctgaggttaggcaaagagttcttagatatgacacaaaaagcacaatctgttaaagaaaaaatagttattatcaaaatttttcaaatcctgctctgtgaaagacagtgttaagataattagaagaaaaaccacagacttgcagcaaatatttgcaaattgtgtattggacaaagagcttgtaactagaatacataaagaactctgaaaactcagtgcacattttttaatgggtaaaagacaaacacggactgcttcaaagattacttaaggatgacataaggacataaaaatattttctacatctttaaccataaggaaaatgccaattaaaattacaagatgcccctgcatacctactagaattgttaatataaaaataaaatatcaagatctggggaggatatggagcaactagaattctcataccttgctgctgtgaatgaaaaatagtatagtcagtctgaaaatcagtttatctgtttcttataaagtaaaacacacaattaccatatgactctagagaaaagaaaaagcttgtattcatacacacaaaagaatcttgtgccagatatctatagaagctctattcataagcaccccaaattggaaaccatccaaatgcccttcagtgaatgaatggttaaacaaatgctatgcattcctgcaatggaatactacttagcaataaaagggaacaaatcattcatacttggatgaccctcaaagactgaatgtaaaaattcagtctcaaaagattatagacattgtgatcacatttatatgacatcctcgaacaaacacaactacagtgacggagaacataccagtggttgcctggggctgggtttgggggagtgtgcgagtacaaggggatagcacaaagaaatttttttgaggtgatggaactatattctgactgtggaggtggttacccaaatctatacatgtgttaaaatttttggaatatacactaaaaaagcccattttcctgtatagttatttacacaccaaattttttaatctatataggaaatagtagaaaaagaaaaagctaagtcagaaagaggaaagaaaactgcatgtgcaatgtcttgggttctttcttggcagcactggaaaattaataactcttcctcagttctcagcacctggcccggcacctggttgtggcaatctagcttctgttctggcttctcacattggagacacctggatcagagacttcagaccatctggacaaaggctttctattgggctccacccagtttcacctataatttgaatatgtgtcccctctaaaactcattctgaaatttaatcctcagtgtgtcagcatcaagaaatggagcctttaagaggtaattgtgtcaatgagggttctgctctcattaatagattcatagattaatgaattagtggttcatcatgagtgtgaggttggtgactttctaggaagaggaagagagatttgagtcaggccactcagctctctcaccatgcgattgccctgcaacaccttggaactctgcagagagtccccagcaggaaggtctcacctgaggtgaaccttcgaccttggacttctcagcctccagaatggtaagacataaatgttgttctttatatattgcccagttttagatactctgtaacagagtgttaggcaacagaaaatgaaga

SEQ ID NO: 14619 - DNA, 2300 bp, Homo sapien
gtagagaaagtttgacctgatatgttaacaggcacaacaagaacttatttcaatgctttctcaccatctgccccttctctgagagtttagcctttcttaggatacttccttttccaggctagaaaagattgattgtattcatatcccaaagtaaaggctcctccaattctatcagatgtggaggcaacagaaaatgactcatgttatttttctctcacttcacagcatcaagaactcttcttgtttatgtgggggccatggtggattagcttgaggaactgtcaaattaaaatgaaaggaaagcaagttggggcaagaaaattctcactctgaatgtgaaagaaaatagcagtgttcttctctctggcaaagatttgtgtactgttgggggaagattcatgttatttctcaggtagactttactttttgagattctgtgtgtgtgtgtgtgtgtgtgtgtgtatgtgtgtgtgtgtgtgtgtattttgcctggtggggggttaaaggcagatagaatgtagttgtttatgagtttatactttctctttagcataatagatgccctgtttattttctcagaatgtgacaataaaattaggaaaggagaggaattcagaggcccatgttgcagttcatggcaaagttttacccaaatatttccttcagaaacatttagtcatagcaagccatataaattattgtctgcaactggtatcagaaaaagaaatcagtaggtggggactgtagaccccaatggtgcatctgtttacaatctttcttttccaaggttttaaggttcatgaataacatgagggaattttgggagagctaccacatcagtactttggcacgcattaactgttccacaggaaaactagggttgcttcagggctatttttgtttgaaatgacacacatacaaaaaaaaaaaaagacttttggaacatgttttgaggcctgtcacctgaaatcagcctttgctgaaagagtatttagtttgataagcgggatttcttgcttctcgcatcccagagtgtaaattctgcagcgaagcctgggtgtatgttttcagcaccagggacagcaaacaaccccctgaattgaaggggcccgctatcctgattgacctcccagactaggaagggcagttgttttgttttcctttatttcctatctaccggagcctcaacttggaagactttattcttaaggttcttacatctttcatttattaccaagcctagcttagctgtctctgtcacattcttgacctcctaacaaatgggtttggagtaacactcccagctctcctggctcagagaagtagaaagaaacacactagacttcatttgaagggcatgctttagagtaggctccccctacacaagtctttataacataccactgacttgtaaacccctaaatgaaggactgcttatacacaatcattttccttttaacatttctgcacatttctcacaatgtacaagtctatgtttgactcagtgtgcatctggaggcaatgtttcacagcagttgagcagaagctatgaagtttggggacagaaaaggtcccagtgatgctgctgttattcattttggagactcattgggggcacttctctgattctcagcatccacccttcaaccctgagtgctctttaacagctgtttttgccttaaacaatcacaataagaatgcaaatgactccttgtggcattcttcaggccagactgaagggtgtactgagaaaacaagggtagcagaagcacatgttgtcacattgctttgtgattggccagtttttatatagcacaatgacacacagatatcatcttagagtcatcattgtctactcttaactaattgtcagcatcttctccactcatgtcaggatgaatcctgtgttgggaaggcaagtcagtcactgcaggtttcatcataaatattgccttctatctgacagatgttagaaaacctccattttgaatgcctctgtaccatccaaggctctgaatttcccctatatcttatccctttctttccattccctttccatgttgcttatcataacatccataacatttagtggtgtaagaaaataaggggtttcttttaggaataaatgaggtggaaaaagtaggacagagccagatctcagaggagcaagttcagtggaacgatgatttctaacttgggagtgggtctaagatgtagccatccattccttccattccttgtcctcttgagtgaatctcattccagtgctcacacttgccctgcaaaaaaggccatggcac

SEQ ID NO: 14620 - DNA, 2300 bp, Homo sapien
cccccctattaatcaaccgttccttggcccagcaccaagagagagccaggggcttcaggaccacctcttctgtcaccaccctgtctccttctcaagtgccaaccctcccaatcacaagagcagtgggtaccaagctgtattgatcatgcatgatttagcaatcaaaaagtttattttataaaccccaaacactcatatttattactttatatgtttatatatctattatctatacattaaatatgaaatatcctcttttctaggcaaaaataatttgcaatagaagttccagtgttttcttctcacacccagtggagagctgtgctccagcaatgggctgaaagctttgcaaaagaacatcttttcctggccctgagcccagggtgcagatggggagtcacgaagctgggtgtccaggccctaatgagaggctgcaggccccagcacattcttgttaaatatgccatttggtctgggcagttgactctaaatagtgtcatgtgtcacaaatggtgtcaaattctgggtggcctgagtttgctagaggtgggaagggaaggaagaggagaataaccactgtcccaaggtcagtgagggagtgcacctcctcctggcaccatcacaaggatcactgccatccccaggagatgcccttaaaagtggcgtggccgagcctcctgggggaagttctctgggccctgagatgacatatgtccaagttggaagaaacactctgccctgcggcctcaattcatagttgaatttacaggctctgaaagtctagagtgccctgatggagctcacagggagttaggggcagagccaaggtgggattcacatgatccatccctttctctgccaccagccaactggaggccccgaggggaggctggagaccatgcctatgacttctgtgcaagccacccatgggagcacatgggatggggacccaggccacagtggaaatgccgtgatattggcaagggccataccaaaggagggcctcaggctacccacacccacccaagagccagctgagttggggccctggtccttctacagagttggacagaagcagcagctggcagggactggcaaggcaaggacaggccctccctttctcacagcagcacctcctgttcagccaggcaggagggtagtaggagccttctaggaccctaaggaaccttccaggttgcaggcttagccttcctggggccagtagatgaggactttcaaagcagtggccaggttgggctggtttttgcccaaagctgtcatggcctcaggtcccatggaggtgcagagcagatgcccttggccccagggtgtatgacagaagcttgacctgctgggcttcctggggcagggggtcttggctctggagccaccaatagcctttccttggtggaaaaccccagggcctcaggagaccaaggtctccaggtttgatcctggaagtacctttctctggggctgtaactactcctgcttccaaatctcatgtcaacagcccctcacatttctgcccacctctctcagacctagtcctaatcctggggttctgagcaccaaactgtgcctaccgagagtgagccccatgatgcctttggggcctggctcataccctgctgggtcattgtcaaggctgggtctccccttgatccttagaaagaatgagactcaggagccaacatgacggccaaagccccgaatgatccttcagccagccagaagagggccttcagggagggccatggaaatgaagggaccagagagctgccaaatgccagggaccctgtggcggctcagagtgagacccagctggcgactcagagtcccagctaagagcccgtggtctttgcaagccgaggtagccagccccaagcatacctggtccagccatgccatcctctcccacttcatcttctttctaacagctaaagaccataccactccaacccagccccaggtaggcctggcctagcaaagcggcccagacagtccaccatggccaccaccctcctgcctttgtgacgtcacagcctggttgggtgtggctgcgcatggacccttccaggctccatgaggttcctgtgtatcaacagctgcaaaggcaaagggattggcctcctgggcagaaaggggccaaaagggagggccctttggaggagcgtggctctggtgaggggtggaggtgagacccacacttatgctctgatgccttgcaactgatttcctccagatacaaacagggcagctgaatggggagatggcctcccccatcagaggcagttccc

SEQ ID NO: 14621 - DNA, 2300 bp, Homo sapien
ttggcctagggccagtagcaagtggtttgagagtccaaggaggtcttcacactctgtccccgcctgctggtgggagggcaaaatgccagtctggagacaaggccataatggcgacgggggtaaaaatctccctggggccaagggaaggtggaacgtgacgggaagtcgggaaaactgccttgtataggcatgttcttttcttccatttttttcgtccaagtttttactccaagcgacagtgccacccgaaggcgaccggcctgtttgtggttgcgcctggggcaggcggtgacaccggcataccccttcccccatcttgcctgcaagttgcatgacctgcatcggaatccacaggggggcgggggagactcctttcagatactggatgcagttgaattgaattcaatgtattttgcttcctcgcctgccctcctccaagctcgggaaggagaaccctgctttcttctgcgtgtgaatgctgtagtgtgtctgcctgctcggactcccctaaccctttcttctcctttcccacagcgaatgctcgtttttttttttttcagcaaacagctcacacttggcatctttatgttttattaagaaaaaaatccctaccagcgcaaaagcggggccccccccacacacacttctttcccggatgagatctgagctctcgtcgaaagctgcacctgctttgcgtccctaccaggaaggggtgcttgtgtgggagggaaggaggaggttctgcgcccccgaatccggagaaagcagcccgcccgccccctcacccggcagccagctcagctcacccgagagctgagcccgagaagccggcctctgacggtgctggcgtggcgcttgccaaaatatgccccttgcatctcaatttcccccggccatttctcttgcacgcacagctcgcccggggccacctcggctctccagcgcagccctttcgacccctgtttcttccttccccgatccatgcctgctcaaggccgaatgcaaaacccacctccaagaaagcgcagcgggcacggggggcacctagcgtgccatgtcccgcagtcccctcccagccaagaccagagccccagactctagattacggaaatgagtgtcattcagaccaaggactgcgcgtctgcggtcccggtccccggctctgggtgcttctctggggtgtctgtgcgctccggcaccccccgtcgccgtccgtgagcctgcgccccccacccacccaggcttgggagcgccccccacccaaggcttgggagcactccccaatcacctccgccacgttcatttcacttcctaccgcggtccggattgcagcaaaaccgggtagcgcgagggccaaaaagtggaaaggagagcgcctttccgtgtcgtgcagccagctcgccaactctccctccccagccccgaccctcgcaatctcaaatgcaactttttcccttcggtctcggtttcccccgggctgcggctagcgggcgccgcgctgcgaggcgtggagcgggcgggctgccgcgaggctgcgggtggcggtgccggctacagccgcgagccggcgagtgggtgggtgggtgggtggggaggagggagaggacaggcggggagagagacgggtgtggggaggggagggagggggagattccgctctcctgccgctcccagcccgggcggggggcggggggaggaggccgcgacgagggaggggaggagggagggaggaagggagggagggagccgaggaagacgctccgataacccgtgcgtttcgtaaggctcggagcacttgtacatttctgcagccgcgcggcgagccattcgcggcggctgctgcagctcctactgcatcttccttctcttcctttcctcgggctccgggtgtgtgtatgtgtgagagtgagtgtgtgtgttttgcaggtgcgtggtgtgtccgttttaattctgcccagtaggtgggacttggtgactttagcaccattttttccttttccttttttttttttgcctccccaccgtctgttgcaaccctgcaaagtctcggagtcggagagcgcgcctcgcttccagagcccccggacccggcgagtcagcgatcgccgagccggccaccatgcccggcagaccgcgccactaggcgctcctcgcggctcccacccggcggcggcggcggcggcggcggcgtccgcgatggtttcagacgctgaaggattttgcatctgatcgctcggcgtttcaaaggcagaggccccccctcccccttcccccctccctcgccgtctttgtttccttcc

SEQ ID NO: 14622 - DNA, 2300 bp, Homo sapien
agataacattcacaaagtttaactgagagaaaaggctattccaatacccttacctctcacccgaaaataagacagactttttaagtcgtattatggtagatgtgagcaacaaagaaaagaatatgaaattatttgttacttaaaacacaaagcaggggccaagcaactgtcttttatttgggaatccaaataccccttttcccttccttctggctggcctaaaaggatcacaacctgttatgcgagctccaagtttgaactgtagaaatttctgctcccacatatcttccaaatcttgcgccagcaatatatcctgttcatcttcttcatcatgaaggtcagctttcttctttgccagtcgctggttttcatccagagcacgaagctcgtggtctgaatacaggcttctctctatctcaatctgggaaaattcaaagggcaaaaaactaccttaatctggcaaaattaaaaggaaaaaaaaaacaggaagaataaaacagagacatggcacacttggcaagctcagaagtttatcacccaacataaccagatacacagtcaaaacaccatgcagaaaggaaatggagggaaaaaaaggtcctctgaactttgggcttgagttacatttgccaaaaatgttacaatgtcactgggggtcaagagtgctacaaaaacagagagctgggttgggcaatgcctgctgactcaccacaatccagtcatgtcagtctttgatcagaatctcactcaccaaggactttcctgttcagggactttcaagaggttgttccttcttcctagaatgtttttcctcacattctttcttctgggagagtcctactcatctttctgatttcaatttaaatatgactgtctcagagagacatttctcataaagagaaaaacctgtattcagaaagtctgaggcattccttgacactcaccataaaatcaaaatgtgatgtatttgttaaacactcttatagtgccttgtgttttccttaacaacacttatcagggtctgcatttagttgtatgattatttggttactgactgatcccctcactcaactagactgaagtactctgagaaccagagctacttctgccttattcattacagcatctctatcacttaacatactctctgatgcatagtatgggcacaatgaacatctgtaggttgagtaacaaatatttgtcaagcgagcgagtaaatgaataaatcaagcaaaaagcacagaagagaagtttatagttctcaacagaccaagacaaaaacatctcggattctgaggaaacatatcacccttcaaacactttctgtagcgacctcacaccttcacagccactacactgtttttgcccatgcttcctcacttgcccctcacacagatagccccatgagataaaacagagtaggcttatcataggcatctgacagatgtgcccaccgcctcttgtatttccttcttaacattcatcacatcacaaagactttctccctccagacttgtaagctcctagtgacacggaccgattcttgttcaccacaggatccctattgtgttgcatgaacaagaagtagagtatctccaaagagttgtctaaggtgacaataaacacggccaatgaaaagaaaccactttttgttgaacatctatgtaccaaaccaagtcagtaaggtaggtaccattctgcggataagtaccgtatacttaagttcagagaggtgaaattactcgctcaaagtcacgcagaataaacgtcactctgaaccctgcatctcagtcccacctgctgcagtagagacgccatctcttcctgcaatggggtcaacggcttggagactacaggtggccgctgcaggcacaacgcgcccaacaagcgccatggggatccgttgcttgagggtgcggctgcaagagccaggctgcgagagcttagactgccggcccagagcctctcgaaccgccgccaaccccccgccacccctaacagcgtccgccttacgggcgccgccatctttcgttctcccacaatgcaccgcggctcccagggatccctcagccgcgggagcggcaaactaggggaaagctcagtcccggaactgctagaacgaaccattcgcatatggagggggtgacccaccatctcagaacattaaaaaagggaaagaatcccctggtgaactacagtgaaagtcttattgagcatttaaatggaaataaaaatattcagtggacctaatgaagagtagatgactttcccttctgtcccctccccgacaggcactcatg

SEQ ID NO: 14623 - DNA, 2300 bp, Homo sapien
agggacacgagtaggagcatagtcctggaggtggcggtgggctcgagggggcagtcatttgttacccggctgtctggggccaagtccaggaccgcaggaaccgcgaccccgcgtttctcacagcctgcatgacttgaattgaccccagtcagtttccgtctgcagcgacagtcacagctgcgccggcgccggtaccatgagtgcctgtcggggaggggacagaagggaaagtcatctactcttcattaggtccactgaatatttttatttccatttaaatgctcaataagactttcactgtagttcaccaggggattctttcccttttttaatgttctgagatggtgggtcaccccctccatatgcgaatggttcgttctagcagttccgggactgagctttcccctagtttgccgctcccgcggctgagggatccctgggagccgcggtgcattgtgggagaacgaaagatggcggcgcccgtaaggcggacgctgttaggggtggcggggggttggcggcggttcgagaggctctgggccggcagtctaagctctcgcagcctggctcttgcagccgcaccctcaagcaacggatccccatggcgcttgttgggcgcgttgtgcctgcagcggccacctgtagtctccaagccgttgaccccattgcaggaagagatggcgtctctactgcagcaggtgggactgagatgcagggttcagagtgacgtttattctgcgtgactttgagcgagtaatttcacctctctgaacttaagtatacggtacttatccgcagaatggtacctaccttactgacttggtttggtacatagatgttcaacaaaaagtggtttcttttcattggccgtgtttattgtcaccttagacaactctttggagatactctacttcttgttcatgcaacacaatagggatcctgtggtgaacaagaatcggtccgtgtcactaggagcttacaagtctggagggagaaagtctttgtgatgtgatgaatgttaagaaggaaatacaagaggcggtgggcacatctgtcagatgcctatgataagcctactctgttttatctcatggggctatctgtgtgaggggcaagtgaggaagcatgggcaaaaacagtgtagtggctgtgaaggtgtgaggtcgctacagaaagtgtttgaagggtgatatgtttcctcagaatccgagatgtttttgtcttggtctgttgagaactataaacttctcttctgtgctttttgcttgatttattcatttactcgctcgcttgacaaatatttgttactcaacctacagatgttcattgtgcccatactatgcatcagagagtatgttaagtgatagagatgctgtaatgaataaggcagaagtagctctggttctcagagtacttcagtctagttgagtgaggggatcagtcagtaaccaaataatcatacaactaaatgcagaccctgataagtgttgttaaggaaaacacaaggcactataagagtgtttaacaaatacatcacattttgattttatggtgagtgtcaaggaatgcctcagactttctgaatacaggtttttctctttatgagaaatgtctctctgagacagtcatatttaaattgaaatcagaaagatgagtaggactctcccagaagaaagaatgtgaggaaaaacattctaggaagaaggaacaacctcttgaaagtccctgaacaggaaagtccttggtgagtgagattctgatcaaagactgacatgactggattgtggtgagtcagcaggcattgcccaacccagctctctgtttttgtagcactcttgacccccagtgacattgtaacatttttggcaaatgtaactcaagcccaaagttcagaggacctttttttccctccatttcctttctgcatggtgttttgactgtgtatctggttatgttgggtgataaacttctgagcttgccaagtgtgccatgtctctgttttattcttcctgttttttttttccttttaattttgccagattaaggtagttttttgccctttgaattttcccagattgagatagagagaagcctgtattcagaccacgagcttcgtgctctggatgaaaaccagcgactggcaaagaagaaagctgaccttcatgatgaagaagatgaacaggatatattgctggcgcaagatttggaagatatgtgggagcagaaatttctacagttcaaacttggagctcgcataacaggttgtgatccttttaggccagccagaaggaagggaaaag

SEQ ID NO: 14624 - DNA, 2300 bp, Homo sapien
acccccacttcccctttccaaccgttatactcctacattttacttgttttctatttactgtcttctacccactggaatttaagttctatgagggcagggctttttgtctgtttggtcagggatatatccccaacactctgaacagtgcctggcattgttgaagaaatgactacaacagaatcttggtttagatgctttcagcagctcctcactgccttcagtggggacagcgtaaaagctccagtgtgacagacaagacccctggcattctgatgccttcttgtcttgttggcctcatctgccatcacatacacacctgaacacaccatgttttttcataccacatgcctttacacagatggttacctttgtctccaatgacccacttcaacttgtccagatgaactcccattcacttctgagctccatgttcttttctccatggtcttgcctgatttcctcaggaatgagacacttattctttttttttttttttttctttgagacagagtctcaatctgtcacccaggctggagtacagtggcgtgatcttggctcactgcaacctccgctccctgggttcatgcgattcttctacttcagcctcctgagtggctgggattacaggtgccagacatcacgcctggctagtttttgtgcttttagtggagacggggtttcgccatgttggccaggctggtctcgatctcctgacctcaagtaattcgcccaccttggccgcctaaagtgctgggattaaaggcatgagctactgcacccggccaggagttagacacttatgatttcatacttccaaccaatgcttacctccattatattattgagcagattatggttaaaatgtttgcatgtttgtcttccctcaaagactgtgaactacttgtggggaggaatgatcttttgtatctgtattcacggcacctagcatggtgtctcactcatagtagattcttggtaaatgtttgttaaatggatgtgaagttaagtggatgtgtatacagcatacagaggtggtggcactggtgggaagcaagatgccagttcctagggctgagcacaaaacccaccctggaccatccgtaagacgtgcaggaacatctgttccatcgctagcgccctctacctccccattttgttttggaggcagggaaggttattggtctgaaaagatctccatctcagaagaaaagaacgctgatacatgttatggatatctcacattcactcattgatttaacgaatgttcactgaacatttactctgtaccacggctcatctgattctcacaacctctctcagcattatccgcatttttagatgagaaggctgaggctcagatttatttgcataaggtcccacggatagcaagtgacatagctgaaaattcactggttctgactctggagggtgtcgggcaagagtcaggggttgcgggtctccagagggctggtccaagtggggctcacctgaacttggtgtggctgggagccgcgttctgttcaactttctgcttggccgcagcgtcttggagctgtcgagcgcctgtgcagatggtcccggccggcgttctggccacgaccctgctgggaagaaaagctcggtgagggccacggcctaacggtcactggggcccgggtggctcaagggacacgagtaggagcatagtcctggaggtggcggtgggctcgagggggcagtcatttgttacccggctgtctggggccaagtccaggaccgcaggaaccgcgaccccgcgtttctcacagcctgcatgacttgaattgaccccagtcagtttccgtctgcagcgacagtcacagctgcgccggcgccggtaccatgagtgcctgtcggggaggggacagaagggaaagtcatctactcttcattaggtccactgaatatttttatttccatttaaatgctcaataagactttcactgtagttcaccaggggattctttcccttttttaatgttctgagatggtgggtcaccccctccatatgcgaatggttcgttctagcagttccgggactgagctttcccctagtttgccgctcccgcggctgagggatccctgggagccgcggtgcattgtgggagaacgaaagatggcggcgcccgtaaggcggacgctgttaggggtggcggggggttggcggcggttcgagaggctctgggccggcagtctaagctctcgcagcctggctcttgcagccgcaccctcaagcaacggatccccatggcgcttgttgggcgcgttgtgcctgcagcggc

SEQ ID NO: 14625 - DNA, 2300 bp, Homo sapien
tgactttctttgggaaaataagaaatgtgatatgaaatcctgagtcccaccaaaaacagttcatctaatttcagtgtgatcaaaatggagtagctaaattcagtctccttcagcattcagtgcaggatttgagcacctgctatgagtcaagtggaaactatgtcaggatgccaaggatgaggagagaaatagacagattattataatacagtacaataacagctctcattgtgtctctctagggacagtggagacagatgaaggaagggcagaaaaagaaaaatatactgtggaagagcactggagttggatcaatgggaatgtgttgtatgaccaagagttgaagatgtttcaaggagaggcccagcatatacaaaggcatggaagtatgaaaatggtaaataagcaaatacagctgcagcatacactggggtgagggagatgggaaatgtgactgaacaggtagactgaggggatattgggaagagaggtcttgtgcaggttgctagggttttatgtagtagaagacataatacgaatttcacaaggtaactttcagcagtctagaagatggcttggagggaatagagagtagagggagaggccaggtgagtccgtggtggtcatccaaaggagaacaggagggtgtgaatgctgccactgggcccctggatggatgaaatacttagtagatcatgaaaaatgtagggttgcaaagcatgatgattctaattatgtattaacaatacaaatgctcagccaggcgtggtggctcatgcctgtaatcccagcactttgggaggctgaggcgggcggatcacgagatcaggagatcaagaccttcctggctaacacggtgaaaccctgtctctactataaataaaaaaattagcgggacgtggtggcgggcgccagtagtcccagctactttggaggctgaggcaggagaatggcgtgaacccgggaggtggggcttgagtgagtgagccgagattgcgccactgcactccagccagcctgggggacagagccagactctgtctcaaaaaaaaaaaaacaaaaaaaaaaacaaaacaacaacaaccaaacaaacaatacagttgcttctcaacttacgagggagttacggccagataaacccattgtaagttgaagatatctgatgacgggtttacctgggcataatcccatcttaaggactttactcaatatgtattgcttttgcagtcttgtaagtcagtaaatcctgagttgagccattattaagtcagatactgggtataattgtgttcttgtagtgtactacccattacccaggagaagttgtgttacatgttcgtggggctgaactaacctttcttcatagaaacactttatctgcagctttttctttgaaccaggtggtttgattgaacctgaggacctggcagagtggaaagagcatggagtgtgaagtcactcaggtcccaatgggaatctgggcccttctgctcattcatgtgtgatcctaggccaatcttctatcttttctgaaacttaatttgcactttcctccaccttagtcatacattccattgatcctatcttagatctttttatcacctcaaactgcccacctctgaagtttcaatttcataatccatacaccccactctgaccactaccttttagcctttcacctcactctctttactacctccactacagaggatcttagaccccactgaagcctccaatccctgactcaggttaggataaggataaactgctatagctaaaagaccccacatgcagtgattaaacaagagaggagtttttttctctctcaggtcacagtgcaaggcagatgttcagcatcagtgagtggttctgccacacacagcctgaaggacccaagtgtcttccatcttgtttctttgccattcactgtggtattgtcttggattgagatagggagaggatgagtgtggaggagactctccattaggatcacacatcactccccttcatgttccgttggagaggtcctcaccatatggccacttaacaagcaagggagcttgggaaatgtagtgtgcctggccagctgtgtcctgtgtactcttgcattcagaagaaaagagaatgagttttggtggaccactagcctttgctgggataccagcatcttcatagctgtcacctaccctcagatcctctcgtctttcgttattcagcctaggttgcatgatctaacacgataatcactcccttaacttccttgctgttctgcctccttcatgcaaatttggaaaactctc

SEQ ID NO: 14626 - DNA, 2300 bp, Homo sapien
tctttttttaaaaaaagcagtcgttctaatgggtgtgaggtgatatcccattgtagttttgatttacatttctctgatgattagtgatgttgagcatctatcttttcatatgctttgtggccatttgtataggagaaatgtctgttccagtactttgaccattttaaaattgggtatatgattttttgttattgagttataggagttctttatatgttctagatattaaccctttatccaatatatgatttgcaaatattttcttccattctgtagaaagccctttcactcggttgattgtgtcctttgatcacagaagttttaagtttgatgtattcccatttgtctatttttgtcttggtcgcctatgccttttgtgtcttatccaagaaatcactgccagatctgatgtcatgaagctttcctcctgtattttcttctagtagttttatagttatgggtcttatatttagattcttttcctattttgggttaatttttgtatagggtgtaagatagggtctgacttcattcttttgcatgtggctattcagttttcccaacaccatttgttgaagtgactgtcctttttctattgagtagtagtaggaccttatcaaagattgtttaaccatatatgccagagtttatctgtgggccatttcattggtctgtgtctgtctttatccagtaccacaattttttgattactgtggtttgtaatatattttgaaatcaagaggcttgaatcctctttgttctttttcaaaattattttgtgtatttggaggcccttgagataccatatgaattttaggatgaattttttatctttgtgaaaagtgctattaggattttgatagggtttgtattgaatctgtagattattttgggtaatatggatatcttaacagcccaataaatattttttgctggaatgaatgcacattgaatatgatttttttgtttgtttgtttgagatagagtctcactctgttgcccaggctggagtgcagtgttgtgaccacggcttattgcagcttcgatgatccaagcttaaacaatccttccacttcagcctctcaagtagctggaactacagtcatgtgccaccatgcctagctaatttttatatttttttgtagagacagggttttgccatgttttccaggctgggcttgaactagtgagctcaggtgatccacttgcttcggcctcccaaagtgttgggattacaggtgtgagccactgcgcccagccgaatgtgtcttatactgttcaaatttgtagttgtaggtttttttctgttgaactttcccaacagctgagcatacttggaaggtattcctagtgaactagatccttcccttagacctgtttctagacttagaaatgttaggaccacttactcagtataatctgggaagtagtaatgccagtcactgtcatcttgggagctcctaggttcaggatataagaagagaaatctgtttcacttgtatatatttatattttggtaaattctgtttcactttcttgacttctgctttacttttctgtttagagatgtgataatggatcatcatgtttctaccatcaagcctcgaagaatccaaaaccaaaatgtcattcaccgcttggaacgccggcggatcagttcaggcaaggcaggtacccactggcaccaagtccgagtgttccatcagaatgtcttccccaacttcacagttgtcaacgttgaaaagcctccttgtttcttgcgtaaattctcacctgatggacgctactttattgctttttcttcagaccagacatctcttgaaatctatgagtaccagggctgccaggcagcagaggacctactgcagggatacgaaggagaaatcctgtccaatggcaatgaccagcggtcagtgaatatccggggccggctctttgaacgcttttttgtcctgctgcacattaccaatgttgcggccaatggtgagcacctgaaccgggagtgtagtctcttcactgatgactgccgctgtgtcatcgtgggctcagctgcctacctcccagatgagcctcaccctccattttttgaggtatatcggaacagtgaatcagtgacccccaacccacggtcccctctagaagactattccctccatatcattgaccttcacaccggccgcttatgtgatacacgcacgttcaagtgtgacaaggtggtcttgtcacacaaccaagggctgtacttgtacaaaaacatcctggccatcttgtctgtgcaacaacagaccatccatgtcttc

SEQ ID NO: 14627 - DNA, 2300 bp, Homo sapien
tacctcttagttcaggtagacactttcactggataggtagaggcatttcctacagggtccgagaaggccaccgcagtcatttcttcccttctgtcagacataattcctcagtttagccttcccacctcaatacagtctgataacagacgagcctttattagtcaaatcagccaagcagtttttcaggctcttagtattcagtgaaacctttatatcccttacagtcctccgtcttcaagaaaagtagaatggactaaaggtcttttaaaaacacacctctccaagctcagccaccaacttaaaaaggactggacaatacttttaccactttcccttctcagaattcaggcctgtcctcagaatgctacagggtacagcccatttaagctcctgtatagatgctcctttttattaggccccagtcttattccagacaccagaccaacttagactgtgccccaaaaaaacttgtcatccctgctatcttctgtctagtcatactcctattcaccgttctcaactactcatacatgccctgctcttgtttacactgccctgctcttgtttacattgtttttctaagccatcacagctgatatctccaggtgctatccacaaactgccactcttaactcttgaagtaaataaataatctttgctggcaggactatgctgaatctccttaggcactctctaatcagatatcctgagtcatcccaattcttagaccttttatacctgtttttctccttttgttattccatttggtttctcaattcatccaaaaccatatccaggccatcaccaatcattctatatgacaaatgtttcttctaacatccccacaatatcaccccttaccacaagacctcccttcagcttaatctctcccactctaggttcccacgccacccctaatcccgcttgaggcagccctgagaaacatcgctcattctctctccataccaccccccaaaaatttttgccgccccaacacttcaacactatttttatttttcttattaatataagaaggcaggaatgtcaggcctttgagcccaagccaagccatcgcatcccttgtgacttgcacatataagcccagatggcctgaaataagtgaagaatcacaaaagaagtgagtatgccctgccccaccttaactgatgacattccaccacaaaagaagtgtaaatgaccggtccttgccttaagtgatgacattaccttgtaaaagtccttttcctagctcattctggctcaaaaagcacccccactgagcaccttgcgacccccactcctgcccgtgagagaacaagccccctttgactgtaattttcctttacctacccaaatcctataaaacagccccacccttatctcccttcgctgactctcttttcggactcagcccacctgcacccaggtgaaataaacagctttattgctcacacaaagcctgtttggtggtctcttcacacggacgcccatgaaagtgactgcacccatcccagcagcagtgtatgaggcttttgatttctccacctcctcaccagtatgtgatatcttccttttaaagatattatagccatcctaaggggtatgaagtagtatctcattgttttgatttgcatttctctgataattaatgatgttgaaggtctttttgttagggaagcaggagcctacgagagccagagtgacatcattttaaaatcaactccatcttaaaactagcaaggcaaattccctgttagtcagagatgatcaatacaatctcagtcttcaaggtgctcgccatctagaagataacagagtaggaagtttctcagcatctaatcaataggtgaaaaattaattctattcatattttttcaaatgtgcccagcaggtgcagagacactgccattgggactcacagagattgccaggttaggtgccattttaatttttccttcggagccatggagcctctacggcttcgatccttcctccgggcacaagggtgcgctgtacctgtctcttagtgttggctgaacagtgccgtgctctcccctacttccctttttgctgggccgcagttccggtggctggcggaaacgggaacgtgcagccgcgggtgcaggagtcctggggcatggcgggggcggggcagggggaggcgcgcacagaacaggctggggcatccctcgccctggctctttgagcccggaccagacaggtgaggacttaccatttttggcccagcctccaagcccgtcagaccctccccggcaggctcctccctgcatgacgctgat

SEQ ID NO: 14628 - DNA, 2300 bp, Homo sapien
tcacctagcccagacaaggcaggggctccccaggagatattttaaatagtcaaggtgctcactgattatcagtggccaaagccccgccacccaccgtaaccaaggcaacaggaggcaggtgctgcgactggttgcctggtaagcatgctagtgccaagtcctttcccttccttctccacctccgttagcccttttgtgatagcgcctctccctccgctatctttccccttcttggccaaacaataatctttgctcctcatacaaaggtcactttgggctcctttgggtaaaaaaacgcgtaccttgatgttctttttgaacagatttcatccacgcttgagttttgagacctagataaaatgtgcttcttacctcggcttcaatatcttctccctccaccccactctttccctttcactcactcctattaaggcatacagagagcgcggggaggaaggaaggaagggaaaaaggaagggggagagagcgagagggagcacgggggagcgcaggatttaaatgtggcgatttttcacggaacaccagagcctggggctcacagtagatcctctgtcccgcttgcccctttgctcaccgcctgcaatcgtgcctctgctccccgcaccactgcctaaatttggcgccaagtttttccactggtcgtggccagagcgagagagaatgctctcctagaatcccacacctaaatccctggagaaatgaggaagatgagtcccgctttcttccgcgaacctgtgtcacctcctgacctcctccgcgtggggtctgaggggccgcgagcgcaagtggcgtgggctgggaggccgagccgtgcgcaggcaccgaccatgggcaccctagggccggggcgctgtccagcctctggtgctgaagctgcaggctcggattcgctgggggaggggctccagggacctttagcagcctgattctgagccgactccaagcgggtagcgactcgaaggagaggcgcttggtctgccgagtggaaaggctacactgggaagtaacggcattaggcgctctctttcagcagatagggctctcccagggcgcaatccccggcgcctctgattcccctccctggagttatttgctgcaattgcggtgggtaggaagaaaggccctttgcactggggcgattacccagtggtctcctggtacttttcacattttttcctgcggctctgggctctctgggtgctggccagcctggcgctcagatctggtggcaggcaaagcaaagaggagaggcttggaacgccgaacccagctgctcttctgcatgcaacaagtcagctgcatctagaatcaggggcgagaagcgcgggaggaggggcgacggcgggcttggggcggctgggttgcgagagccggctcccgcgaggctgtggggccgtctttctcctactgggcgcgggaccgagcgaaacaaactgcaagctgggtttccgcgtcgccccgggcaggtactggaaccagacgcccccacacctctagcctgcccagcatcccgtaggagcgctcacctgctgggctccggagtcgccttccttcctcttcattttggcaaggcacatttggcgggtgccaagcctggccgctcgcttctccggccctccagagcagcctcaggcttagcttcccgaatatcagctccagttggctgcttctccagtcccgagcccttgacctggaggaggggacgggaccggggacctcggctgggatttttacctggcatgggtcgccgcggctagggaggaagaccacttgctctccgtttctttctggaagaaagcccctcaccacccagctgccggtactttgcttccccccaggagccgcagtgcaagtagcagcgcagtgcgggggagggggtggggtttgaggaagctgtttgtgaagtgccccttgaatacttgcctctctgaggccatcagtcctgtccgggtccgtagtcctggcatggtccgccgggtgcaaacacagtcgccgcggctgccgggccagaggagaacagctgctttaaagctgagaccaacccacgggtggcctgtcagggccacggatgttcatgacgtcatcctgaaggcgagcggagaaagcgagtggagaggggggagccgcgcttcacatcaaatgtcccctgtggccatggcaacagctttgggggagggggtgccggtccgcgggccagcagcgggcagcctgcgactcctgccagggtccagcgctccgctggggtagagtccgtcattagtgctgaatccagttgtgcc

SEQ ID NO: 14629 - DNA, 2300 bp, Homo sapien
gagacagggtctgtctggctctgtcacccaggctggagtgcagtggctcaatcatagctcactgtaacctctaactcctggactcaagggatcctcccacttcagcctccccagtagttgggactgtaggcacacacctccacatttatttatttttgtgaagacaggatcttgctatgttgcccatgctggtctcaaactcctggcctcaagcagtcctccagccttggtctcaagaaaatgtttttaatgacctaacaacatgattagatcctccttggatcttggtgaaagcaaagaatgagaaaccacctgacttgtagaaggatttcttgccccgtcctcaacaataattaatacattatttagaattgccctattgtttctcctggagacttttatttcccaaggtaatgcagcagagcaagatttagaacaggtgcagtgtgaattgcctttgaaaagtgggagacagctggttacacatgaggagagggaagctgaaccccaaagaccccaggcatattctgaggcccagcaccatggaagcagaggatctggatattgactctcttaaaactctccttggttgggtgtggtggctcacgcctgtaatcccagcactttgagaggccaaggtgggtggatcacgaggtcgggagttcgagaccagcctgaccaacatggtgaaaccccatctctactaaaaatacaaaaattagctgggcatggtggcacgtgcctgtaatcccagctgttcctgaggctgaggcaggaaaattacttgaacccgggaggcacatgttgcagtgagccgagattgtgccactgcattccagcctgggtgacagagtgagactccatctcaaaaacaaaaacaaacaaaacaaaaaaaactctccttgccccagatttacctcccacagtccccatgcctgaagaccgctgtcctataaccccttcccctctgctctctgatcaacgctgcctcctaagtagcatttgaatctgtcatttcaaatgctacttaggtggggagctctttatcctccacaccactctggacatcatgatcttccaaatttccacaaacactcccccactcctttctccagtcctcatccattcctctctatgctgcagccagaacaagttttttcaaatgcagattcactggtaaactatctatggcttaaatccctctgcctccccaaagccttcaggggcctgggtaaaaggattgatctctcttgtgacctcatcccttgtcctgcttccctcaaatttgtactcccatcagaaagagctcctagcttatttctcatcacaggtacgtttccaaatcacttctgcttgcaaaatgtgaactaagagaagtcagactgcttaggtaaggatctttggattctaggtgtttctccttaatttaagtgtcaatttccttaactgtaaaactgaaataatagtaaggtcattgtacaaattaactgagtattttgcctggcacatcattcgtgctcacataatacgtgtgaactgtttattattgttcttgttattactcatgttacactgaattttctttctttctttctttctttttttttgagacggagttttgctcttggtgcccaggctggatggagtgcaatggcgcgatctcggctcactgcaacctccgccttctgggctcaagcgattctcctgcctcagcctcccgagtagctgggattacaggctcccgtcaacgcccggctaatttttgtatttttggagagatggggtttcatgttggtcaggctggtctcaaactcctgacttcaggtgatcacctgcctcggcctcccaaagtgctgggattacagtcgtgagccaccgcgccccggcctcatgttgcactgaattttctgttaaccttgctgtttccctgctgttagataaacaactcaggatgcttatgtgtttattgtgtgcatcccactgccaagcccacgtaggaacttaatacttaggagtcaagtgttgcaaaagaataaatgaaaaagcagcgctgacggaggaaacctgactttcaaagtctctctttagtgcctactgtgtatattatttccttgaatcccagaacacccgaggaggtaagggccgatgttcccaatctgcagatgtgggtgtactcagtaagtcattcggcctttggtggtaccaggcttacaggagcccacatcccgacccaggtagaggagtggattggagccggggaacactgatgggaccgggcagggacgacaggaggtcagtct

SEQ ID NO: 14630 - DNA, 2300 bp, Homo sapien
agcctccagagaattgtcctccagcctgttttgcctccctagcacctctgcttcagcccttaacacactttatgcttggtttctgtctccaccatgaaactaaacttcttggagtccaggatccacctgtgcagccgcccagcatctggcacagtggagacccgagagagcctcagtatggcattggcctgtgcaacccagtgggacagagtttcttccagaagggcttctgggtggtggcggaacagtagctgagtctgaaagagcaggagggctgtgagtgggaagggaggctgtggcttgggaaagggcagtgagtccaggcggaggctgctctggcctgagaagagctggctgccaaccacgggctagagtctaacctctctgggagaaggagcagtggttattgagcccctactgttcagaatacaggaagaccccagcatacattgtgtcgtttcctcttcacacagtagagggggtggtaggatcattttacatgcctgaaaactgaaacttagcagtttaggtcatttacaaagagctgagttaggccgaatatggtggcccacgcctgtaatcccagcactttcggaggccaaggcaggtggatcacctgaggtcaggagtttgagaccagcctgtccaacatggcaaaacgccacctctattaaaaatacaaaaattagccaggcgtggtggtgcatgcctgtaatccagctacacaggaggctgaggcaggagaatcgcttgaagccgggaggcggaggttgcagtgagccgagatcacggcactgcactctagcctgggtaacgagaacgaaactccgcctcaaaaaatgccaagttaaaccctgctctgcctgacttcaaagccctagtttgtttgatctgttaaaaatgtactgactgacttggcataacaaatgagacaggctttccaagttatggcctcagctgttgggaagatgctgggttttgcaaactcacatgaacatcagacatttcctgtagcagcaatgaacgacagcacctcttatcctagcattcagtgacgagggcttaaagtccgctgggtgggagcccatcacagaaatctgcaagcacttcagatcaggacttttaaatgtttctagatgctgtggcgattaatgaattacaacgtcaggtaaagaaattacacttaaaggctggacacggtggctcatacttataatcccagtactttgggaggccgaagtgggcggatcacttgagcccagtttaagaccagcagggcaacatgatgaaaccccatctctactaaaaatacaaaaaaagtagccaggtgtggttgtgtgtacctgtagtcccagctacccaggaggctgaggtgggaggatcacttgagccctgcagtgagctgtgatcacgccactgcacttcagcctgggtgacagagcaagaacttatctcaaaataaataaattaattaaataaataaattacagttggttatcatattacaaaaaaatacaactattcagttactgcgggcttcctatgaaattctttctccaggttgtgctgaggatctgtgccttcatatttcaaaaaagtatttcttaaaaaaggctatacagtttctataacctttattttcctataaccatacctctgtcaaagtctgatgcttcttagctaaaaatcacagcagaaaaaaagtccactgctaacaatattggactcagccatggtttgaggttgagggtgtggattctgggttcctaccagcctttggcttttactaatggggcaagtttcttcacctctgtgcctcagtttcttacctgtaaaatgaagatgataatactttgttcaggtcattgagcagactgagtgattccatgtagtatttacaacagtgattcacctgtgtttacagtatgaatgcttttattagtgaaatgggtcctcaactcaatctgggagccacgagctacggtgcagggctctcgggcatccccaccgtggtgcactgcagggagggagggagggtgggtgggctgcctggcacactctcacccagcccctctgcctgtgtgttctctcttcaggctgctgccccattggaagattactccccaggcttcccttgccccaagcagtgagctgactggaatggtaccccgggaggcccctgagtctgctcagtgcctgtgcccttccctcaccatcccaaatgccaaggatgtgcttcggaagaggcacaagagaaggagccgacagcaccagcggttcatggcccggaaggccttgct

SEQ ID NO: 14631 - DNA, 2300 bp, Homo sapien
gcatgtgcccccatgcctggcaactattttttttatttttttttttagagacggggtctcattatgttgcccgggctggtcttgaattcctggcctcaagtgatcctcctgctttggcctcccagcatgctgggattacaggagtgagccactgcacctggctagaattttctttttaaggctgaatgatcttttgtatgtatataccatgctttgtttatccattcatctgtcagtcaacaatacttaggttacttccccccttggctgttgtgaataatgcagctatgaacatgctgaaagtgctcccaagtgtacaaatacctctccaagaccctcctttcaatttatttgaatatatacccagcaggggaattgctggattatatggtaatttttttttttttttttttttttttttttttgagacagagtctcactcttgtcatctaggctggagtgcaatggcgcgatcttggctcactgcaacatctgcctactgggttcaagctattcccctgtctcagccttccaagtagatggaattacaggcgcatgccaccacgcctggctaatttttatatttttagtagagacggggtttcaccatgttggccaggctggtctggaactcctgacctcaggtgatccacccgcctcggccttccgaagtgctgggattacaggcgtgagccaccgcgcctggcctatagttttttttgaggaactgctgtgctgttttctttagtagctgtaccattttacattcccaccaacagtgaacaagggtttcagtttctccacgtccttgccaacatttttttctgtttttccatagcagccatcctaatgggtatgagatgatgtggtttggatttgcatttccctaatcattagtaatattgagcatcttcttacatgctttttggtatacagttcctttttaactaattttcttaacatgtgttttgtaatatgtatcagcatagttttacatgtattaaaccacatgaaattgctaatattctagttttttgcttttcgtttttgtttttgagacagggtttcacttgtcacccaagctggagtacagtggtacagtcttggctcactgcaacctcaacctcccaggctcaagtgatcctccagcctaagcctcccaagtataatagctgggactacaggtgcatgtcaccatacctggctgattttttacatttttagtagagacgaggtcttctatgttgcccaggctggtcttgaacccttgggctcatgggatctgcccaccttggcctcccaaagtgctgggattacaggcgtgagccaccgtgcccggccacactgtttcttatggttcaacctttagtatatacagttgacccttgaacaacatagggattgggtgttgactccccacacagtcaaaaatgtgcatgtaacttgattccccaaaaattcaactaatagcctacttttgattggaagccttactgataacaggtagccaaataacacatattttatatgtcatatgtattatatactgtattcttataatcaagtaagtgagagaaaaaatgataaggaagataaaatatatttactgtatttatcggtattgtaaggtttttactgtatttacatatgagatgaaacatctgtctgaaatggcagcaaccacagctgtggacttcaatctgtggtacatatcaagcaattcagctttttcttgtaatgtcacgacttgttttctgcttcttgggagcacttccagcatcagtagtggcacttcatatgggtcccatggtgggattcaaggtttacagtattgcactaagcatgatgaaaaataccacaaaaactgcaagaaatcactttttccatcttactgggataccagatgtcctggatatgaactgctgaagcggggatgggtagtgtcacacacgttttaagcagatacttgcagcgcttgagctcactacagtaacaacaggaagtggctacattaacagcacactgtgtactatagttaattttatgcagttacggtttcagactgcatcccgacattggtttacatttctcttgactgagaatggtgccacgtgtggtctgtaagtaggtaagttttgttaagttttaccttttaataatagatgtgcatattttatggtagtaagtgataaaatagactagtatttacatgtattttatacattcatgacataagtagcttcttaatttctttgatatttctaggctgtgcaattcatctgagttttttcaaattgttg

SEQ ID NO: 14632 - DNA, 2300 bp, Homo sapien
attttttaattttagagatgagatctccctgtgttgctcaggctggtctcgaattcctggcctcaagcaaatccgcctcagcctggagtaactgggattatagacactagccatcgccctggcaggaagtgcggttttaaatagagaggtcagggacagcttcatggaaagacgtcatggaatgggagcaatgtgaccccccaggccacattggaagacctttcaagagtaaggggacagcaaatgcctgggccttgagacaggagcatgaccagaatgttggaggaagacagaaagagccagtgtggttggaagtgtgggaggtgggaatggtaagggcatgggagaggggcttacctttgtagcacttcctgtctcttccacctgaagcagagacctgatcttactggtccctctggccatcagacctagtccttgggagatgcagggggtttcagaacaacctgctgatggtttggcagaagtcaccatgtgcataaaccaaagccctggatgtgggtttaaacctaaaagaaaggccttaaattggatagtgatgcaagatgaggttgggaaggctggtggactgatggaagagggtctggaaactgcctggagttgaggtttgattttttttttttttttttttggacatcaggaaatcacaaaatttcttgagcagagaagtgcctcggtgatgaacagtacaagagattagattttgggaaatgtaacatggtaggactcaaaggacccttttgagcagggcatgaagatggaggtgggagacccgggagcgactcctgcggccgcacaggccaggcaggtgaggactagggtaggacttccacaggaaaggggaaacggtaagaattagaggcagctcaggtgagacagagcaggcacagaaccatggggaaaatattggaggagtgggatgtgttctgactgagacccgaggaggtgagcagaggtggaggtatgaggggttgcagcaaacatgttcctgtctgaggagcaccacggggcactggggggtcctatggggattgtagaatcaaacctatgattggatctttagggggttactttttaagtgcatgtttccataaagtaacaggaatgttacttcatttcctcctaaatcagggtaacctttatgcatttgaaaagcataaagtccccacacagtctgaattaaagcaaaagttgcttattcaggatgggaatcaaaaactctcacacctcaaatttgcatccagtgaacagtaagcaggagcagggctttctcatgaagacgtatttcagtctttggttttatttttgaggtttgttaaagttgggcatccaaatcccacttggtgaaaatactacagacctggggaagttacttttcaaaccacagatcttcatgacactgggaggcagtcagattggagggatcagtgtggattctgcacagatctggggtaggaggcaagcgtgggtaacgctcagcttattgttggatctcaccacagtgaaagacaagcacttccctcattgaaagttgattttctttttgccccagttgtaactcatttgacattcactaaataccaagccctccctatctggcaggcactgttctaagagctcaaagtcctagcctgggagagtgtggacccaaggaagtgtggccgggctggtggggcctccccgaaggcctgcttctccttcaccctcacagagtcagccccactggaggcagagctcattgaggcatctggaacccacggaggcctgtaagggctccctcgctgctccttgccttccctgggttggaagtgggggctagccactcccaccacaagtttctcctgcccattccaataaaagcctgtatgtcccaagagccagcttccctaccccataagagaccactgagtatcagactggtagcaggctccagaagttagttgtgggacattccctgagctccagtcctggggatgtttattctctgggcggagggtgagaaaggaaacaaagatgttgcaatccactccacgaacgtcaaatgcgtcatctgaggagggggagggccggggcaaaggaggggcaccctgacatggagcctgccagctccgtcagccctgactcggcccggagctgagctccccacctgccggtagcccaggagatggagcagcccagcccacgtgcccggccttccgcccctgacttcacttgataacaaactagaaactgaaacagggtcgggatgccgatgccggcttggagttagagatgagtcaccg

SEQ ID NO: 14633 - DNA, 2300 bp, Homo sapien
caatacaaagataaatcgcctaattaatatttgcccttgacttgttcttcattaaccccacctgccctaggatgaatgttgacatgaacccattttacaaatgagagcaatttgttctcccacaaggcatcaggtaaacacaggcatgagaatccatgacctcgttggaatttcagggactgtttttttcccagagggtcatttctccctgttccaggcattgaggccagtaactattaagatttcatctctttttttttttttgagacggagtcttgctctgtcgcccagcctggagtgcagtggcgccgtctcagctcactgcaagctccgcctcccgggttcacgccattctcctgcctcagcctcctgagtagctgggactacaggcgcccgccgccacgcccggctaatttttttgtatttttagtagagatggggtttcaccgtgttagccaggatggtctccatctcctgacctcgtgatccgcccgcctcggcctcccaaagtgctgggattacaggcgtgagccactgcgcccggcctcatctcatttctttatctgtgagagaagccactatcaccccctaaggggcttcggtcaccagcattttgtctgtgtcctaaatgcttcaagacttacagacctgactcaatacgctcaggtagaaaaagggtgaaatcaagaatggccaaccactggaacactttagccattgctctgagaggtgggtggatagagtgggcactatgctccctccgacggggcttcactgccctggacaggggagagacaggcggctcacagagcatgtgctgggccagggccagtcccgcccccaggcagagatggccagtaaaataaccacataattccagtggagtcgccctggggaaaccgaggcacttcagttccttttcatcaaggaactgattaaagtgtggtctattatctctgtagtggggagtcccgaaagattccacttcttcctcttcttgcccaatgagagggtcaggaagcttccaccaccatcctgactgtggccaccacatcctggtgtgaagcaccaccagcttcctccacaagaactctgaaggtcaccagccagcttgagtcctccgaaggtgctgtggctcaaccagcagcctgtgtagcagagagcacaagacctgggactcgaactcagtcccaccttcaagagggatctccaccactttctgagcctcagttttcacatctttggttaggggcaggtgggaagttgccatatttaccttgttgggctctttggaaaaattaaatgaaatgttaatgtatgttacacaacgggctcataggagggattcaaaagctgctagttctttttctccttttcctgaaaacggtattaaagagtactgtagagacactggagaattcctgcttcatatgagatgtccttggtctctcccggggaatttgaagacccagagactcgcagctccccgtgagcctccccgctgacgccttacctccccctctccaccatcccctgccatcccggtgtacgccacccccaaaaaaactttcagccagctcctcggtgagggtcgttccaaatcgtggccgacagtagcgggctgcaccctccttagatcgcgtcgtggccagcctcagctgcagaaccccgccgggcgcccgggagccctgtcccgccgcggcggcctcagagtccgggcacttggggattctctgagggtgcagccctcctgggcccctccgactgcggagctgccgaccgcaatgcagatgcgggccctccagcccttctcgcgccgccttcctcccgccagccccggagctgccgggtccgcgccgccccggggagcgctcctctcccgccctgagcgcaggccggcttccccatcggcgcgccggtccggagccagggtccagcgcgctccagacgcctctgccttcccctccccctgtcggccgcccctcggtccctgggggtggggtttccctttgcgctcgccccctcccgcccccacccctcacgggccctcccctcccccgcccgtccctatgtatgtgtcacagcgcgccatgcccgcccgcccgcccacctacctccccgccgctccagagggggctcgcagagctgaggacgcgcgcagcgctgctcaaggtctctctctctcagcaccctcgccggccggcgtctgacgcgggtgccagggtctccgggcacctttcagtgtccattccctcagccagccaggactccgcaacccagcagttgccgctgcggccaca

SEQ ID NO: 14634 - DNA, 2300 bp, Homo sapien
cagaggcttggctagcttgggaaggggtgtaggaaaaaccaccctctttgtcaaggtgaatttttccaaactttgggagccggctgtgttctgcaggcagggggtgcatctgagcagcaggaggtggggccgcctctgagcagcaggaggtggggccgcctctgagcagcaggaggtggggccacagggctgccaaagggagggcgtggctttgctggaaccacatcagggaaatgtgtctggaagtggttcctttctgagacctgcggttgctgggctcctgggcctagcagggtctgaataaaaggcccaggccgtggtcttcgtaggaactgaggatgggggactcccttcccctgggtgtcccttggcctactgcctcccgtttcagagctctcttctgcggagcggtgtggattgggtttagagccaagcctttctgcgtgcttccaagcctcaggtctccctcccgggggagtttcctgccctgaacccctgttccagcataccctggggataagcagacagtgggagaagcatctctgctctgggatgggttggccacagccttctaaaagtccccctcctgggaccctggagtggagtcccctcactcctgaccccctccttccttccttggcttctctccctcagcagtgtcttccatttgcccagcttttaccatcacccctacacattgacttttttctgccccactgcaaggcagagggtgagcgttcagattccacctgctggctacccctacccctggctggcatgttcaactcgacttaactgtagcaaaatgtgctctccctactgtccatcctctcccctgtcgggaacctgcagagggacctaccttggctcccctttgcccatcaagcctggcgttccttttaggtgtagtttacctgttgatcacagttctttgtgctccaatgtgcccctggctgtgtgtaacacacacacatgcacacacacacacacactcatgggccaacttgagctgtgtttaggaagaggctctgagctctgtgaccctgtgacccttcgacccttcccccagccaaagctgaaggacctccttagtcttttctgctgaggaaacatcgggctgtccaggccagggcccccattggtctggacaggaaagaaaacaccctgtccaaacagaggcatcctgagcggctgcctggatggctgtgctgattagcaggattccgaagggaggcccacccctgttggaggaccactcagaagcctgattgcccctgcaggctgcagaggtatcccaccctgtgtctcccctcccagccagggccactcattcaagccccatgtgctggggatagcacctgctatgtgcctgacagtgagttgggaatctggccagtgtttcatgatggccaaactcaggggcatgaggacatcagcaaccccttgctttttttttttttttttttttgagacggagttttgctcttgttgcccaggctggagcacaatggcatgatctcagctcactgcaacctccgcctcctgggttcaagcaattctcctgcctcagcctcccaagtagctgggattacaggcatgctccaccacgcccagctaattttgtatttttagtagggacagggtttcaccatgttgcccaggctggtcttgaactcctgacctcaggtgatccaccggcctccacctcccaaagtgctggggttacaagcatgagccactcactgcacctggcctcacccccttgctttctatttggaaaagaaagtaatacagaagtctcaccccttccacaatcaaaggtggggagcagccttagcccctagcagaatgctggacaggggcttcccctgcttactcccactgtttttggtataccaggctttctaaggggatcccccctccccaaactctcctattccacccctactctcctttcccaagacgtgagggcctcaactcttgcacaccctctttgcggtggttcccagcgagtctggagaccgctcaagcctgcagcagctcctcccttcgagcccagcccttgggagggaaaggtgcgcgtgttcctttaaggggctggtctggcgggagcgcgggggtttttctgctgccgcttcctttctgcccttttaatttccccgaaatcagactgctgccttggaccgggacagctcgcggcccccgagagctctagccgtcgaggagctgcctggggacggtacgtggcttaggggtcgctgggcttctggggctgtgtgcgggccgggttcctcccttac

SEQ ID NO: 14635 - DNA, 2300 bp, Homo sapien
tgtggtgacgcagggtgccagccgcttggccagtcatgagtacctgaaggccttcaaggtggcctacagccttaatggacacgaattcgatttcatccatgatgttaataaaaaacacaaggtaggtcttgttggggcccgaaagaagggctgtggtccataccccctaaggttctagcattgactgaggacccccagcgagtccagagaaccctaggtgattggctatgatgtgggtcttcgggtgcatcttggcttctagaaattgggaaacccagactgtgtccatgttctgtggtttataagcaatagtcccactttagagatgagactagtgagattcaaaatggcacagtgacctgttgagggtgatagtggtggtggagctgggtttcattctgagccttcatgggtacatgtacagttgtgtaggttgtacactgctcaaggatgtcattgctaagcaggcaccattcacagtacaggcattgtacatttgtggaactctgtcagaaaattgtcataataaactatttgagaaaggagtgccttttcctaatttgcaaagaggtaccctgtaggttacaggtggccctgtgtcagctataggggtttatgcccaggctccatgatgattaaggaaagtgagaggagaatctttgtggagggccgtggggtggccaaaggagaggctgctgtgtgagcctctgctggctcttccaagtcctcttcaccctcccagccccacctctgcctcccaggtctgaagaggaagatgaggtaaccccagggagggggactgctcagatggacccccttctccagtcttgtcccttccctgctaggagtttgtgggtaactggaacaaaaacgcggtgcatgtcaacctgtttgagacccctgtggaggctcagtacgtgagattgtaccccacgagctgccacacggcctgcactctgcgctttgagctactgggctgtgagctgaacggtgagtgctgggggtgcgggtaggggggcactgttggccaatcctaggaggtggccctccctgctgcctcttttctcagccaaactgagctaggtagggcagcaacaaggcacggggaccaggcttcactcgggcaacgcactctagggggtcacctggccatagcagccccacccaggtgtttgctgtctgccaacccatgacccagggcattctgattgatagagaaaaagacatcagttttcaaagtattttcccttcttctggttggctcctctcctgtagcttctagaacatgtagcgttaggtgtgtttggcagatgtcagctttacgagggcagagaatctgtctgttttgtttgcttcggtattcccagggcctagaatggtgtctggtttataggtactcaataaatatttgatgaatgagcgaatgaatgaatgaggggcgtggggccccgatgaatgatttattaagggtacacatctggtaggtattaagacttggtctagatctctgggctcccgaccacacccatccagagctttccctgccaaactcttaagagtctgcactccagagaaacacaggggcttcttggaccacagggcttggagctggtgcttcctgctgccttttccaaagagattcccagatgaagagctggggagaccataaagggacagatttctgcagagccaggggacagcctgggcgaggtcagagtgccgggtttgggctgacagacattaattgtctcagcccagctcaacccagctttcctgaggtctgggtatttctctctctttgcagccacaatgccacctgctggccatcagtggaactgtagggctcgctaagcagagctgcagagtggaggttcttatcttacccgctggccttttgatcttacctgccctcctgtgccccgcctttcccctctgtgacacctcttcctgttgtctcatttcagacaccacccaaatacccctcagagctgagttcagtgcctggctgggttcagtgtttttagtatgaacttgagtaggtatgcttcctccaccaggggcccttttgagccgtattgtttcagtggggagtataagactttgccttctgctagaaggaaatgtaggctactgggaaaggacagagccaggtctgtgtgcctctccctggagtccctgacacttgctgttttggcttgaagcctttggccattaaagttgcctgtatccaggcatgactggcccctgctcagggccaagagagggtgagtcttgcaaaccaaggaagcccaggtaccctg

SEQ ID NO: 14636 - DNA, 2300 bp, Homo sapien
gcattacaggcttgagtcaccactcccagcctgaagcattattattattattattattattattattattattattattagagacagagtctcactgtgtcacccaggctggagtgcagtggcatgatctcggctcactgggacctctgccgcctgggttcaagcgattctcctgcctcagcctcccgagtagctgggattacaggcacctgccactgcgcccggctaatttttgtatttttagtagagacggggtttcaccatcttggccaggctggtcttgaactccgacctcaggtgttccacgtgcctcggcctcccaaagtgctgggattacaggtgtgagccaccgcacccagccaaaacactattattaaaatcacttatttgtaaacaggtaatatttgcacatgataagtacaaatcatttagtaaaaagtcaacggtgacaggcttgctttgttttattccctttcggcaaacaggtgcccatttcctcgcattttgtctatggtgcctttcttgcaacaaaggcagagatgaatagctgctacagagactcagggcctacatatcagagaacattttctattaggccctttacagaaaccttcgctgattttttttttttagtattttaccatttcagacaatgttgctatgctatctttgtatatctgtcattttgcacatgggagtttctgtagaatgaatctctctatgtggaaatgctaggtcttaaggtgtcagcatttgtcgttttgataggtgttaccaaatagccctctagggaagttgaactaatttatactgtcttcagcgaagcatgcttggacctgttccccacagcctccactaaccttgttaacatcttgatacttgccgatccgagaagggaaacacgatgctcattgtagttttaatttgcatctatctgattatgaataaagagttagcatcttttcaagtctaaaaatcttaaaaacaaaactcctgaacttttcccgcccaacagactcaagactcgtgacccggccgttggcacgacgcgggacgccggtgtggcagtggcggaagaggcagatatcgcggaccacccccgcgccccccaattcctttcaaccaattccctcccagccgcggagccccgcccccagtccgcctctggccagcttgggcggagcgcacggccagtgggaggtgctgagccgcctgatttattccggtcccagaggagaaggcgccagaaccccgcggggtctgagcagcccagcgtgcccattccagcgcccgcgtccccgcagcatgccgcgcccccgcctgctggccgcgctgtgcggcgcgctgctctgcgcccccagcctcctcgtcgccctgggtgagtggatcgcgccgccctctgcccctcgcccctcctccccgcgccgctcggaagtttgcccggcgcccgccctccacctccactgttgacaaacttagacaaagccccggggaccgggctgggcagaggggcggcttcttccgctgcgccctggcgggacagggggatgcggccctgctgtctctgcgctggggcttttgggctgggactcgggacatcgggtgacagccctgccgcccccagggatgcggcttacagataatgacaaaggaatccgctgtgtcgggcctctcttttccctggtgaaaaatgaggccagggaactgcgtttgactttcgaaccccttccacctgggagattctaggactctagtatggataagtcttgtctggataactttgtcctggccatctccctgccaactccagttggctggacagttcattggatttttgcgctcccaattgtccgtgcctggtcacataagggaagggccggggagtcggtgcaatggacgcaggccgtaagtggggcccgggaggggacccagaggcttcgaggagcttggaagagggctgcctgctgatgggagtctcctgactccctccctcccgcggccttggccggctgctgtatcttccccggtcctcctccgcctcccaggaggcctccggaggccagctgggccccttgcaggctggacttgcggatgccccgtgccattcaccgtggagcgctgggagggagtcagggccaggactctttaggtggcccctccatcattttctcatagaaatgggattgactgaagcaaggtaggtaacagctgagccccagccctatgtcctgtgatctgcctgaccctcggggctagagcttccagagtgctccaagctcccaggaacttgggagctcctg

SEQ ID NO: 14637 - DNA, 2300 bp, Homo sapien
gcaggcgtgagccactgtacccatcggtttttcatagatttttaaaaatcaggttgaggaagctccctttcacttctagtttgttgagtgttttatcacgaagacgtgttggatattatcaaatgctttttctgtgattattgagttgatcctatatgtcttttccccatatatatatatatgttttttttttttttaagacggagtcttgctctgttgtccaggctggagtgcagtagcgcgatctcggctcactgcgagctccgcctcccgggctcacgccattctcctgcctcagcctcctgagcagctgggactacaggcacccaccatcacgctcggctaattttttttttgtatttttagtagagacgaggtttcactgtgttagccaggatggtctcgatctcctgacctcgtgatccgcctgcctcggcctcctaaaatgttgggattacaggcatgagccaccacgcccagtacccgcttctgaatattttaagaagggcatcttgccagtggactctagtcccaacttaggtctcaacacagctaggaggggagatgtgtgactgttctattttgtttgttggctagtctgacttaaatacttattagtattagtattgttattattttttgagacagtctcgctctgttgcccaggctggagtgcagtggtgcaatcgtggctcactgcagcctcgacctcttgggatcaagcgatcttcccacctcagcctcctgagtagctgggactacaggcatgcgcctggaatatttttgtatttctttttttgtagaaacagggttttgccatgttgcccaggaaggtctcgaactcttgagcttaagtgatatgcctacctcggcctccccaagagctggcattacaggcttgagtcaccactcccagcctgaagcattattattattattattattattattattattattattattagagacagagtctcactgtgtcacccaggctggagtgcagtggcatgatctcggctcactgggacctctgccgcctgggttcaagcgattctcctgcctcagcctcccgagtagctgggattacaggcacctgccactgcgcccggctaatttttgtatttttagtagagacggggtttcaccatcttggccaggctggtcttgaactccgacctcaggtgttccacgtgcctcggcctcccaaagtgctgggattacaggtgtgagccaccgcacccagccaaaacactattattaaaatcacttatttgtaaacaggtaatatttgcacatgataagtacaaatcatttagtaaaaagtcaacggtgacaggcttgctttgttttattccctttcggcaaacaggtgcccatttcctcgcattttgtctatggtgcctttcttgcaacaaaggcagagatgaatagctgctacagagactcagggcctacatatcagagaacattttctattaggccctttacagaaaccttcgctgattttttttttttagtattttaccatttcagacaatgttgctatgctatctttgtatatctgtcattttgcacatgggagtttctgtagaatgaatctctctatgtggaaatgctaggtcttaaggtgtcagcatttgtcgttttgataggtgttaccaaatagccctctagggaagttgaactaatttatactgtcttcagcgaagcatgcttggacctgttccccacagcctccactaaccttgttaacatcttgatacttgccgatccgagaagggaaacacgatgctcattgtagttttaatttgcatctatctgattatgaataaagagttagcatcttttcaagtctaaaaatcttaaaaacaaaactcctgaacttttcccgcccaacagactcaagactcgtgacccggccgttggcacgacgcgggacgccggtgtggcagtggcggaagaggcagatatcgcggaccacccccgcgccccccaattcctttcaaccaattccctcccagccgcggagccccgcccccagtccgcctctggccagcttgggcggagcgcacggccagtgggaggtgctgagccgcctgatttattccggtcccagaggagaaggcgccagaaccccgcggggtctgagcagcccagcgtgcccattccagcgcccgcgtccccgcagcatgccgcgcccccgcctgctggccgcgctgtgcggcgcgctgctctgcgcccccagcctcctcgtcgccctgggtgagtggatcgcgccgccctctgcccctcgcccc

SEQ ID NO: 14638 - DNA, 2300 bp, Homo sapien
ctgggattacaggcttgagccactgtgcccagcctattttttaaattattattaatttttaattgacaaaatttgtatatatttatgatgtacaacatgctttacttatttatgtttatcatgttattatgtttatttgtcaaacaaggtctcactctgtggcccaggctggagtgcagtggtgcgatcacagctcactgcagcctcaacttcctgggctcaaacaaccctcctgcctcagcctccccactagctgggactacaggcatgcaccaccacatcaggctaaattttaaattttttgtagagacggggtctcactatgttgcccaggttggtctcagactcctgggctccgcctcagcttcccaaaatgttggattacaggcgtgagccactgtaccggtccatgttttgatacatgtatacattgtgggatagctacaccaagctagttaacatatgcattaccttatatacttatctagtgataatctaaagctcttttttggaagtccaaactgttttaactcagagtcaggacgatggggttcatcactaagagactttgctactgaagcctgggtttttcttttccaagatgaaagagaatacagaggaatatataaacactgagatgaaacctttttttttcaaggtaacatgacaactgaatgaaaaatagagcaatggcaaaggattctttcttctccttcactctgatgtaccatggctgtgagttctttcaaagacagacacaaagggtctggggctacattcaggcctgagaagctatttctgtccacactctgtgatgtctacaccttcagaatggggaatgggtttcaggggtctctgacagatagagctcatgcaatgatttctggtccggtgctgatcagccttcaaaggatgttatttggttacgctccataaaacttgagccagcccactgttccttgtcacaacctgaaatatgttgggaaaaatttacatggtaacaaatgccacttcccttctctgactaaatcgctcctctcatttcatcccctgctccctctctccgagccctatggggccttggtagggtggccttgtctgccctacaggggttgcatttcaagtcgctcaagtgttctattcttggtacacgacatgccattgcaaaagcagtttcaggctcatagaattttagaaatgggcctagtttcccagccggatgaggtgagtgggtgatgggggaagaatcagccttgattgaatgcctgttgagtgccagccactgttggcatttatcagagtttatttaatcttctcatcaactactattgttaccctcagttgccaagtgaagggagcatgcgggaaggttaagtgacttgcccaagcccacacaaccggtaggagccccaattccaggccctagttccaaggctacattcttccaggcggcctccaactgggttggttaagggttgaaaggacagtgggacaataactgaggcccgtattgcccagagcgtccccatcccccgtccggagctggaagaggccatagaccgctgcctccacatcttttcctctccttcgggttcggtgactcacgacccttcttcctctctcccgggatatgacctcaaatttcacccctgcgaaatttgagtacacgtgagtcagtcagtcggcctggacccataagagccccagctgagctaccagcagctgagctaccagccgacctcattcctctgagcccagtcgacagctgaccttacccagccctctaaagcagtttgcggtcacaattacccgtctcttcaccccgcccccatcgacatcaaacacgacccaccttctagccctcctcccctttccccgcccactccgggctggccttatccagtagcgtctgggtccctggactaaagccgtcaaatgtaaccaattgctgaggagctctcccctaagaatcccgcctccactctgaggaacagcttcgctgatcaatggatcccctcctagacgcaatgagcgcgcggggcaagtggagaagcggctgaactgcccaatgaacaagcggtttccgtggttaggggcgtggcagaagcggtcgtcaggggcgtggcggcagttacttgggcggggccggtagcggcgggagctgcactggccaggggttccggctgtatatccatgagcgccgctggcagccggggagctgcaggaaccagactgggggcgagctgagcacctgtagtcaatcacacgcaggtaaagccacggccgagcgagctccgcgg

SEQ ID NO: 14639 - DNA, 2300 bp, Homo sapien
acagccaggctaccctagccagctcacctctgcacctcctgtcctggagcaaactagagaacagtaactcactcagctgcgtttcccctgcagagaaacgagagaacgtcatgtttgtgctgcctctgcatgggggccacttgggcttctttgagggctctgtgctgttccccgagcccctgacatggatggataagctggtggtggagtacgccaacgccatttgccaatgggagcgtaacaagttgcagtgctctgacacggagcaggtggaggccgacctggagtgaggcctccggactctggcacgctccagcagccctcctctggaagctgcgtcccctcaccccctgtttcaggtctcccatctccctcagtgacctggatctgacctcacaccatcagcagggggcacccaccatgcacacctgtctcggagtaggcagctcttcctgggagctccaggctatttttgtgcttagttactggttttctccattgcattgttaggcatggtgacaagtgacagagttcttgccctctgtccagtttcagcatctggttgcttttaagccaagtacatctagtttccctattaaaaatgtgtctgaatagcgattttgctttgccaccaaaaggcttttccctgagaacagtgaaggatgtatgtcattttgtggtggttgtatgtgtccttacatagaccttaaaaagagctcacccttccaggccaatgctgaagacacagctccgcttgggagcctgagaacccaggcttcccaggccagagtgtggcttcttaaacggcaaaggaaattcctttgagtcacaagccaagttttcgccctgtctcctgagaccatttccctacgctttgctgctgctgagagttacgtgaggcacttgttaaaaattcagcctcccaggtccctcccctcggagaggctgattcactgggtctgggaaggagcctggggattttaatttttcacaagtgccccagatgattctcatcaccaagcaaattttggaaatgctgttcaacagcgcccttaaattggaaacatctttgcagctcgttttattgaaattcataatcaggggtgtcctctagctcccacggtctccagagcagcaaggccggctatggagctgccgtcgtgtgaccacagtgtgatgtctcagaagggctctgggtgggctgagcatctgggctgtgccctggctctgcttttcaccctggacaaagtcgctgtggacttcaatttcttcacctctaaaatgggggacttggaccaggtagattgctgagctcactaccaggttcaaagttcaatgacaaactcagtttactgaggtttgagagaacatccctccaggggagcctgggagctgctctcccagtctaagcatgtagatatcatcgtttgccttttgtgtgtgtgtgtcccttatttgataaaaagatgttttgagttgttttttttttaagcactcacttgtaattttagtttttaaacccaagtccctctaactttgcctttgataccaaacaattcaaaagttggatctgagtttggagaaagatatttccaacctaagtgggtattattttgaaaccagatttttaatttaatagcctatatttgtagtctgttggataggtgtttccaaagtgtgtcttctcaagtgaaaacgcaactctaggtttcaagtactccttttctccgatcctgtggtacttgaatatccaaaaaccctgcactttgaacaatcagctgttgctatctggaactaaacagaactatgagtaaaattgcctggatactttaaaaagatatttttcctccttcatctcctttgactccaggacagactggaatataagtagtgggtctgcatggatgtttcagggatcaaaggagccacctgggcgcctgagtgccaaccctcagggccacaggtgggtgtggtttgggcacgggtccaagtgactgtgacgggacccgtgggcatgggtccaggtctgtaacctgaagaagttgttttctgacaatcaccaaatcatccgaatgacatcaaaagcagcccttatctcagagactgagatttctgtggtctcaacttcgctttggtataatttctggcactcaccagcctctatcattatgactttccccccagtgtattatttctctaataggtttccttttcacgttcttttagcacagactggcactttaccctctcagtttggaagttagcccctctcctctgttacttttcccttcacccaacta

SEQ ID NO: 14640 - DNA, 2300 bp, Homo sapien
gctctaatatatttttaacccaatatataacaaacatgatgatgataatttcagaacattaagccttataaaaagtgttaatgggatattttacattattttgtttgtactaagtctttagatactttatagcacatctcacttgggactctaaattcttatgagaaatacttcacaaaatttacagttaaaaaaataggatcacacatataaattgttctaaacctacttaaaagttttcaaaacactgaatccagtattagtttttaaatttaaatttaagttaattaaaatcaaataaaattaaaaatgtaaggctgggcacaatggctcacgcttgtaatcccagcactttgggaggccaaggcggggtgatcacttgagctcaggagttcgagactagcctggccaacatgtgaaaccctgtctctactaaaaatactaaaattagccgggcatggtggtgcgtgcctgtaatcccagctacttgggaggctgaggcatgagaatcacttgcacctgggaggcggaggttgcaataagctgagatcgcaccactgcactcccgcctgggtgacagagcgagactctgtcccctgccagactcccacaaaaatttagttcttgggtcgtattaccctatttataaaaattttttttatagtgagacccaatctctagcattaccccatttcgaatgctgaaaagctacatggggctagcggctactatataagacagcataggactagaccaccaggaagaagaatgacataaatgaaggatccccagctccacagaggacttgggacagaaacagcccaagacccagacagcagccagagtaggagcccagggaaagggcttttggaaacaaagagctcaaggtgactcaaatgcaccccaagatctaagcaccaggcattgcagcctgctctggaggaaggggtcggcaggagatggggtggtgggaagaaatcccaaacctgccaaagtaggaatgggtggaaaagcaagaactatgtccagggaaaataaaaaagcacttctggggttggattctggagagcgacctgtgcaggggagcttgaccttctcctgggcacctctaggaggcaaaaccaggaccaagggtggtcattataggaagctgcttggggctcaaaccaacaatgaggttttaaacaaggagagctccccagtaatggaaacagggagcttcccgcccttggaatcctagacagaaaatgttctacaggaattacctcctcctcatccagtggaatagcaaaacagaggctgggaagttacctgttgagaggctgcagaggggtttcttcctgtacaaaggattgaataataagttccctccagttaggcacctattgatactgtatttggagtaactgacctttccagaggacttattgtcaggcagctaaacccctgaactaagcactttactgccatttcatccgcactaaagtcatgagcctggtcctctagttttctacacttcttagaggaggaaactgagccgatgagttttgaagtcatgtttcccggccagaagatgctcgagcgaggctttacaggcgggcagtctggttccagggcatgccactgcaccacactgcccagaaggaggctcagcctgtcttgtcctctccctgcttggccttaaccagccacatttctcaactgaccccactcactgcagaggtgaaaactaccatgccaggtcctgctggctgggggaggggtgggcaataggcctggatttgccagagctgccactgtagatgtagtcatatttacgatttcccttcacctcttattaccctggtggtggtggtgggggggggggggtgctctctcagcaaccccaccccgggatcttgaggagaaagagggcagagaaaagagggaatgggactggcccagatcccagccccacagccgggcttccacatggccgagcaggaactccagagcaggagcacacaaaggagggctttgatgcgcctccagccaggcccaggcctctcccctctcccctttctctctgggtcttcctttgccccactgagggcctcctgtgagcccgatttaacggaaactgtgggcggtgagaagttccttatgacacactaatcccaacctgctgaccggaccacgcctccagcggagggaacctctagagctccaggacattcaggtaccaggtagccccaaggaggagctgccgacctggcaggtaagtcaatacctggggcttgcctgggccagggagcccagga

SEQ ID NO: 14641 - DNA, 2300 bp, Homo sapien
gtggctacagggcagctttgtgggggactcatggtgtggatcttcaggctgggtgtccacatgcaggcataggaagcctgagacctcacactgtaggactgagttgggaatggtaaggggcttccatttgtactttttctctggactcctgtaaatattagtagctataatgttgttaagataaacaagtactattgacaaggtctgaagaacatttagttccattactgtaaacctgtttttaactggatgtattttctagaatcagtgtatcactagcttctcagtgtatagtgtctagtcagtgaaccagacggataagatttgctccttagttaaggaagcctgcaccagggtgaaaaaccgttgttgttaatctgaatgaatctgttcttctcttcttttgcatatgtaacacttattaatgcaaatggaaaacacagatgatgcattcgtgcaacaagaggagacaagaaccctgaggcatcaatgccagtgggtagacacacaggcaattcagtaagtacgtctgggatgcgccagtggaggctcggagaggctaatgagcttgttctagctacccagacccacagattcatggctgaatcccagaagcagcctgggagattttgtggggagatgaggcaaagtcatctacttccttggcaaggtaaaggattcctttcaggaatcatcttctacctcaagctgccgtgttttagttaaacatcacagctcagtattgggacagaaatgtagaaggaaaaaaatgctgaagggtcacaagcaaggagcaggtctagacagctgagaggaaccattctcctccaatagctctgtttcttcaataactggccatgtagacccgttctacccccgagggctgggagtcgagtcaggttccagactgaaatgctccctgatcttagcattccttcacttgccatcccacaggcacctcaaatttggtgcgtccaactctgaagggctcatcatcaccccatcatccttttcctgtgctccctgtgttagtcaactgcaggattaactccccgccccccaaccccagtcgctcaagcctgaacattcctcaacaacgcccacaccccctcaaatccggatatttgggcttcctaaatctctacctcctaatctctttcacatgcggtccactcctttctgtccccattgccaaggttgggccaccaccacctatctttgggacaacttacagtcttctaaggggggtcctgccttcggtccgccccacctggctcatctcttttcaacagtttctgcggtcctcacctgcccgagacagcagtctacaatgcgaacacagtcatgtccttccccttcagcggttccccactgcccccaatatgaaaaggagttagaaacccctgccttcccactcccaccgagcaccttcgccttctgaactggccaggggctctgttgcttgctcgttgctctcagaccctttgcgcaaggtgctccctcaacccaaaatagaatctcggcccaccctctgtcggtcttcgccccactgtcagttgttcatttaacaaatattcgctgcttttgccaggctatgcaataaacgctggggttacgcaaggggagcgcaaaacaaaacaaaacagagaacaaacaaaaaccacaactcccaaaagtccattaagacccctagccacagggggcttacatctgaggggttaccgtcccttggcacaaggtggagtatgaaatccgcctctgccttccaggcttttccagtgccaagacctgcggggccaccaattgtgagtcccctcccgcactgactactccctcaacaggacaggagggaagctgaacctgtcgggacaccgcgctgggcacgctcaggtcccaccgcgcgtgctcatcggcggtccctagcgcgagttcggacaggcagcgcccccctccgactgtgagctgggacgctcccgcacgcttcccggcaccccttcagtcttcatggtacaccccgcccgcaggtacccggacggcggaagtgagccgcgggggcggatcttgttgttacgggtaacggaagtgtggcggcgttgggttgagcgggctttttggaagtttgtggcggaggtgaggccgaggtgactgcagagcggctcgcgaggtgctcgggctgtgggactgggcccctgggagggagcggttctgtgggggaaaggaggctcctgtcctgacttggcgttctggtattttctctggcgtggaaagtaggcgcgctccgctgtctcccgccgcctgcc

SEQ ID NO: 14642 - DNA, 2300 bp, Homo sapien
acatatatctctttgaagagctggcatatctgaaaacatcagggaaccgatacaggattctaacttttgaagcccttcacaattataactacgtaccagacagagcagaatgattccataaatcccttatgggaccagttctggatctcggtcaattcatttatttcagcaaaagactttatttcttagaaagatttatcaaacattggatttctgcttgagatttcctttatcctgtgaacttttaggctcaccattttccaggaccattattggttgaattagccaatgagtttattagtgctgtcagagaaggcagcctagtgaatggaaaatctttggagttactacctatcattctcactgccctggctacgaaaaaggaaaatctggcttatggaaaaggtaattttcttccgactttagtggctttttctctatgcacataatcaaattcattgctcagtatattttgcatttctaggtgtactgagtggggaagaatgtaagaaacagttgattaacaccctgtgttctggcaggtgagtcttgttaatatgtataactttcttaggaatacaagtggcggaaaaaaaaccactttatttcaggaatttatgtctggaggttttaagtccttcttttttgttgtttttaatataacactataaaactatttagtctgcaatgaattagtgagaaagaaatgatttactatattctgtcctctaagactgttcatatagttttatttgcttgactgtatcttcttacagcaatttagtgtgttaagatacacataattaaatgttaatttagtgtgtttaatgctccaatctaagcattattggagtctcaaggtcgtgaaggctgggaaagtcaccctgctgctgcatcttttctttttttcttttttcttttttttttgagggagtagaatatacaagtgatgtatcctttaaccagtaattgtatttctgggaatctacattaaagaatgactgcaacatacaagaaaatcctcacatatgaacatgttcaacacagaaatttgtgaccagtataagcatacagtaatagagacatgtaaactatgtaagttaaggtagagccactccatgacatttatacctattaaaagtgaaatgtatacatcaaagatgaaaaattctaaccatataattaacaaagagattactatgttatataatactgtgattgcgtgtaggtttgttaaaaagaacaagaagggaatacccaagattatctaaaccagagataattgcttttatggttccttacataagatcccttacataaatcattttaagcatgtatttgtcaattaatttgtttttaattacacaagagtttattcaatacatactgtaatataccttgcattttttatttaatacaactgtccatgtcagcatatacaactctacatcattctttttaatggtttgcagtaatctattatttggctaatctacaattgtcagattatttggttatttccagtttttgtgctattacaaagagtgttgcaatgaatgtcttttttaattttaaatagagatgggaatcttgctttattggccaggctggtctcttgaactcctggcctcaagggatcctcctcctttggcctcccaaagtgttgggataataagcatgagccactgcacctggcctgaacatctttatatatctagatgaccttttataagcatgtacatggcatatatttcaaatagtaaattgggtagatctgtgattatgtgcatttttaaagttgataactactgccagcttgtcatacattccctaaaacggtatgtgaatagagtttgttttccacaatctcaccaacattgggtatcatcagaattttgattttgcgagtcgggtaggttaacaactgctatttcattgttttaaatggtatttatttgatcttgtttctcggtattgcaaaatcaaacttgaattggccctgtttttttgtcctcattaattttacaaagttatatctaaataagttgtaaagaaataaactttgtcattttcttctaccaggtgggatcagcaatatgtaatccaactcacctccatgttcaagtaagcatcatcttttcccttttctttgtgtatcctgctttgtgaacttacttgctagaaattaaactatagcaaacgtaaacatcactctctcctgattgtaagaatattagtagttatgttttctgttacagattcacagattccctcctcactcctgcctcctttttggcttt

SEQ ID NO: 14643 - DNA, 2300 bp, Homo sapien
tctgtcttttttattatatccattctaatgggtatgaaacagtacctcattgaggtttaactttgcattttcttaatgactgatgataattgagcatcttttcatgtgctcattaactgttctaataccttctttggtgaaatgtctattcaaatcttttgcccgttttttgagtgtgttgtttgtcttcttaattaaaattctttgtatattctactgacaagctcttttttattttttcaataactttgttatgaatggtgacaagttctttatcaggtatataattagcaaatattttttctcagtctgtgacttgtctttttattttcttaatggtatcttttgaagtacaaaagttttaaattttggtgaggtccagtttatcaattttttcttgtagaaattatgcttttggtattgtatgtaagcaatctttacttaatccaaggtcttgaaatttttctatatgttttcctctaaaaatattacaatttttgctcttacatttggatttctgatccattcaaggacctatttttattttttattactattaaaaaatgttttttatgtctctcgagtcataaggacttttttgggggatgcagtggcgcaatctgagctcactgcaaccttcgcctcccagattcaagtgattctcctgcctcaacctcccgagtagctgggattacaggtgtgtgccaccactcccagctaatttttgtactttacaagacagggtttcaccatgttggccagactgatcttgaactcctgacctcaagtgacccacctgcctcagtctcccaaagtgctggcattacaggcataagccaccacacccggccaagggacttactgttaaataggctgttatacttttaagatgtatgtaatgggaccaggtgtggtggttcacacctgtaatcccagcactttgagagaccaaggtgggaggatcacttgaggccaggagtttgagactctcctgggcaacatagtgagacttcatctctccaaaaaaattaaaaattaaaaattaaaaaattagccaggcatggtatagtcccagctacttgggaggctaagccaggaggatccgttgagcctgggaaatcaaggctgcagtgagctatgattgcatcactgcactctagcctgggcaacagagagacccaatctttttttttttaaaaaaaaaaaaaaaagaaaaaagaaaatgtaagtaaatgacttccttttggttgctctcttctaggtaggacagcaaggagattccaataataacttaagtcccttcagcattgctcttcttctgtctgtaacaagaatacaaagatttcaggaccaggtatttttttaaaatgccattttgtttctttctgtagttggtaaaaaaaaaaaaaaaaaaaaaaaatcacagtaatctgtttttgttgtatccgttcctaaacaattttatccccttcctgccagcagcaaagctgcaataagacatgtatgtcccctctgttctctggggattgatggaaaacttttacaggtttttggtttattcctccgtttcctgttgtgtggtaagctaggtagtgaggtgggaataagagtggaaggataccacacagccccagttggaggaagggacaatttagctggatattcaccagcagttttactatgttgtagctttccaagagtaggttagttgcaaggatgaaatttacaatttttttcttatatgtgttccaggttgtgggtaatatttatattgacttttagccttttttcccccttttttcttaaggaaggcttgtcttcagctccttaaagttcccactgaatgtcataatttttgtaacatcttcatctagttaaaatagttgtcatagggatatatgtgaatggcagctcataggaacagttataaggttaagatttatagcatgagctatataatatttgctttattttcttatttctttcattctgttaggtgcttgatcttttatttatttattttttcatttatttttattaactatactcaaggtgcttgatcttttaaagacttcggttgtaaagagctttaaggatcttcaactcctccaaggctcaaaatttcttcagaatctagttcctcatagatcttatgtttcaaccatgatcttggaagtagtgaagaataggtaagttggtgaaccatatctcaaaaggtttataaggtgtttaatgttagaaaatgcaatgtgatatcatacttgcagcctgtgaggggaaactgatgacttaacagctgt

SEQ ID NO: 14644 - DNA, 2300 bp, Homo sapien
tcttgtgtcttttaggataaatcagcagatttttctcagagcaccagtattggcataaaaaataatatctgtgcttttcttgtgatgggagtttgtgaggttttaatagaatacaatttctccataagtagtttcaggtaaggttttgctataactccatttgtaatttgatgaattctccattttatttacatatttttactgtagcagtattctaggcagtaaacagaccacagacgatgacactgtctcttaaatgagcacctagtctaagactaaactgtgttctttccactagagagcgctgaagtatatgcttaccaggcctataaaatgaaagccttccagcagggtttcacttactcagaatttcccagaccctgaattcaagaactcctaattttaacatggaaattttgattggtggtagtattggactttaatactctgcagggactggtataaataagggaggggaggccaggtgcggtggctcacgcctgtaatcccagaactttgggaggccaagctgggtgtatcacttgaggtcaggagttcaagaccagcctggccaacatggtgaaaccccatctctactaataatgtaaaacttagccaggtgttagtgcctgggacctgtagtcctagctactcgggaggctgaggcaggggaatcacttgagcctgggaggcggaggttgcagtgagccaaggtcacaccaggggaaacaaaacccagatagattgctgtgacctgggagtattatattaatgaagttctattcatttataatgttacgtctaaaatatgacatttaaagaagcattgtgattattatcatatgtaaaagtaaaccacaatattctgatgtttgtccttagcggtctcttttttgttttttacagtaagaataggtttgaggacattctgagcttatttatgtgttacaaaaaactctctgacattcttaatgaaaaagcgggtaaagccaaaactaaaatggccaacaagacaagtgatagtcttttgtccatgaaatttgtgtccagtcttctcactgctcttttcaggtaaggttctgctagagtgcttaaagacagccactccctgaggatcgtatacctacctaggctcacttgtttcacctcgtttggattgtttacagtaagaaataagtcaggaggttttatttttcttgaaataaaagctggacaatcctaggtaggtactttaagtaggtaccttgaattattaaaggacaaatgagaaacagtgggccaataaatgaaaagatagggatgaattccagcagggtgttttaagaaaatctatgtaagtagcttgtacaagataacagatataaaaaggtagggggtgccaggcatggtgcctcactcctgtaatcccagtactttggtagactgaggtgggtggatcacctgaggtcaaaagttcaagatcagccatgaccgatatggtgcgacctcatctctactaaaaatacaaaattagccgggcatggtggtgcgcacctgtagtcccggctacttgggaggccgaggcaggagactcacttgaacccaggaggcagaggttgcagtgagccgagatcatgccattgcactccagcctgggcaacaagaacaaaattctgcctaaataaataaaaaggtagggggggtgactgaattaaaaatacaaagggacaaaaaaaaacctaaaagactaagactgacatttaaattttatcaaagtaaaggatttggggagggagagaaaatgaggaaccactaagaataacgattataaaagggcagccatagcagtgactatagcttgggctgcctagagagtctgccagtcggaacttactggcaagctctgttgggtgctgctgttctgaacaatttctagaaagcttaattccatataccaatagcagtaagggaatcttcctttttctttctctctctctgtctctctctagggatagtatccaaagccaccaagaaagcctttctgttctcaggtccagcaatgagtttatgcgctatgcagtgaatgtagctctgcagaaggtacagcagctaaaggaaacagggcatgtgagtggccctgatggccaaaacccagaaaagatctttcagaacctctgtgacataactcggtaagccactcccaccccttagaaacttattccacttggctgtggtgtctccaagagaacaaactgggaacagaggatgaaggtaatttgaggttggacatattttaggagtgaaagaatataaaacattag

SEQ ID NO: 14645 - DNA, 2300 bp, Homo sapien
ttctgggctcagtgttgggaggagtgcaggtactcacgttggttccccacccaggggtctgccacctgcctccagcccctgcttcctttgctctgtccaggatggtaatagctgtaatgtgggaagcccctttgccaaggacttcctgcccaagatggaggatggcaccctgcaggctggcccaggaggtgccagtgggccccgtgctctggaaatcaacaaaatgatttctttctggaggaacgcccataaacgtatcaggtgggccaccatgggaggagtcctgggatgcctttcccctctcttcccacccagggacccctgactaaccctggattcccacagagggccagcctgactatggtctagaggcctggctacttttggtcctggtgccatggaccttgggcaggtctcccctctagcttcagtttccctgttaatgtaaaaagaatggtgctgtaggaccatgagagcccttcgtagctccaacagaacttcttggtgtaactgctggagccgtgggctatggctgaggaccatggagagctggtggcctgtaagccctgttgggggctgggagctgggtcttctagtctggaatggcaaatgtattcatcttgaaggccatttccaaggtggttgtggccatcagcacactggcgagcagagtgggtgttgggatggtgaagtctgcctgtgtgtaggaagaggcattggtggaaggagcgcctcatggatgccccccggagaggagcggaagctcgctcggaggcctggccggttcccagatggtttatgctcttgattggtgtatcatagggccccagttcttggctgagccagggctcaccttgagtccagttagtgaggctgggtaatggagtatagcagtcctggaggtgggcaggtgagggccatggtgggatgtgggatagattctgcttcccatggctgtgctgagcctcacgttgtctgtccccacagctcccagatggtggtgtggctgcccaggtcagctctgccccgtgctgtgatcaggtatggtctgctgagtggttgtagggataggagaactgaggtgaggtggtaggtcctaaggccaaagcaccctgctaagacccatttccttcccctgcaccccaccaggcaccccgactatgatgaggaaggcctctatggggccatcctgccccaagtggtgactgccggcaccatcactcgccgggctgtggagcccacatggctcaccgccagcaatgcccgggtatgtgacctctgtacctctggcccctgctcttcctctcccaggtctgtagaaactgggctctgagggcctttaggtatttagtgaggatcatgaaaaggaccctgtgatctgggtcaggcaggactctagtcaaatctggcttcatgatttctgtccactccttcagtaaatatgttctgggcacctgctcctggccagaccgtgacaggcgtaatagctacagctctcatggaatttagataggaccgtgtaggtgaggggtctggcatagcgctaggcatagagtagattctttacctgtcacaccaattgctgataggtggccatctctggaactgtggaatttcagcagtgctgtctggcattctctaaagccatcccctcaggaaaggctctagctctttctcagtcaactctggctccaggaatggggtaggaagagtctcatttgggtatctcactcttcccacagcctgaccgagtaggcagtgagttgaaagccatggtgcaggccccacctggctacacccttgtgggtgctgatgtggactcccaagagctgtggattgcagctgtgcttggagacgcccactttgccggcatgcatggtgagcaggagccggggttggggcagcccagcccctcagcatattgacagttctgatgaacattgggcagaatgttcctgagctgcttttctcactcctgcttgtcttccaggctgcacagcctttgggtggatgacactgcagggcaggaagagcaggggcactgatctacacagtaagacagccactactgtgggcatcagccgtgagcatgccaaaatcttcaactacggccgcatctatggtgctgggcagccctttgctgagcgcttactaatgcagtttaaccaccggctcacacagcaggaggcagctgagaaggcccagcagatgtacgctgccaccaagggcctccgctggtgagggtccctctcccatccactttaacacccaggacccgaggcctgctttactgtccttta

SEQ ID NO: 14646 - DNA, 2300 bp, Homo sapien
actctgccccccgggttcaagaggttctcctccctcaacctcccaagtagctgggattacaggcgtgcaccaccatgccgggctaagttttgtatttttttggtagagatggggtttcgccatgttggccagactggtcttcaactcctgagctcaggcaatccatccacctcagcctcccaaagtgctgggattacaggcgtgagccactgaacctggcctagagtagtgtttctgtttttaatttttttctgtgaaatatgttttattaatttttatttcaataggggtacaggcagtttttggttatatggaagaatagtgtttttaagcacataaaacatgaaggattacaaaggacaccaaaggtattcaaatattaggacaaataggtaaacttattaactaacaggatctagtggcagtctagtaacccctgttattttgaagtacagataagtgcaaacaaattttgaaaaatgtgcagcacttgtaatgcgttatgaaaatatctgtggttgctggaggggacaaagtcacaggcactgttaataccactgtggctgacagcctatgctcataattggaggaaatgccaagtatcagtaggcggttagaagaaacaagatgaaaatgttttccccattcagggactccctgatttaagctgagagcctctccttccagtattttgtaaaagtcaacagttatgtgaaaaaaaaaaaaaaaacagatgaatttctgattgattgtatttttttggcaaaacaaaaaaatcacaaacattaaaacattgtgtatattaagtacatctagaaaagtgtatgcaaaatatttcatatttaaatagaagggaccagggctcaatgctgcttggcccggggcttctctctacctctccacgtggcgggagcaggtgagggtcggcatcagcccgcagggccggcggaggattgtttccctgcaccccactccttaaaaacgcgaaagtcaacttctgtagtccgttcacggtgtcctgggatccacgctggacggtggcggccgactttcagcttgacctgaattttattcctaatcagctgtgtgatctcggttggtcccaaacgtctctgagcctccctttcatctgtgcagctgggcctccagaccccaacccccaggcggtgcttaatcacgtagaccttattctgcgtgcactttaccacagttcaccaaccaccgagcgctgagagctgttgaagcacctggagcaacacaagacggatgcggagactggaaacagctggggaaggggacaagctccagccgcgctgtgggccggaggctagcatctgcgggcaaattcaggttcaacggaaggcaacatttttacccctcagaattgctctggacgaggaggcagcaccggatgggcgagggagggagcctcgctttggctgcgagccccaactcttgccaaccatcaattgagtataaattgagatttctgtacaggatgcccctccctctccactttcctccacctgcgtcggggtgcgagagacctggtacattttagaaatgtgcctccgctgagacacgtaggcgggcaatctcgcagggacttgctgggcgtggttacttccgcggatcttggcgttcccacatctttgaagtgcggtgggaatcggcggcgactacgttcacattgtcccaatacttcgttcctgagggaggaataaactaaaagttaatcataacctcccttcgaccgcggcaggactcgaacctgcaatcttctgatccgaagtcagacgccttatccattaggccacgcggcccgtcggttgttaccgtctcttgagcaacttataaaaacgtcacctccgcccaccagctagctcgggaccaatccacctgctccttgagaaggggaggttggcctttggttcgcgcgttccgcagggagagcccacccagaagtcccccttctccccccgcgggcggaccgctccattggcggccctcctattggtcgcgctgggagtctcccgcttgcctctcgggtagccgcgggacctagctgggtgcagacgggaagttgcggctgccagcgaagcggaccggccgggtggaggccacacgctaccccgaggctgcgtaggccgcgcgaagggggacgccgtgccgtgggcctggggtcgggggagcagcagaccgggaagcaccgtgaggaccgaggtttccggcggggtcggcggcggggaggccgggtcgctgagcgacggcgcggcccctccctctccagtcagggagcg

SEQ ID NO: 14647 - DNA, 2300 bp, Homo sapien
gtaaccccacagcaggaggaacaggctcgctacggggttagggaaccttcaggcgccgagaaaaagatacgcaacggcaagccatacttttctggacactggctctgggggcgctgctcctctgaacctcgactttccccaggcacgcacctcagagctgagccccctggggactcccaagctctgcgtctccctgagtcctgaggcaggagaggaggaggcttcaggggcggatgagcctcctccccctagccgtaccctgtcaccctgggagcctggaacgtgcatctgaggccagagcgactcttgcctcttttccagtgagctgggggaaagtcaccctcctgaggagaccagccttcgagggcgtcatgagcgcgtgtttggggcaggaaccggccggccctccctgctgtgctaccccctgaaactggatggcccccctttcattcccccagctcaggagaggcttgaccctactggaagctcgagggcgcaggcctggaggaaagagaggaacagaaatccgggctgtgggggagcagctggaaagctggagaagctggaggaaggatgttgctggctgttcttcccccacccccattcctgagtttggggctgcagcccccacaaaatctgccctgcaggtccaagtagtacccagcagccaagcagtagaatttgggcagcaccccggaagaggcttgcaggataggacacagcccacaagaatcatccgaggctgcaccgtgaccagcccctcaagacagagcgagacccaaataacccccgcgggcggacccgcagcgttctgtgactccaccgcggagtccaaaaggcagctgagggtgggagcggaggggaagggaggggggccacaggcgctcgggcgagggaggcgcgtcaatgggccgcaggggccggatcggtggcctaatggattcaggcctgcacggcagaggcgcacccggcggcctgcccgcgctctcaatagcggacaatggagtcccggggtgacctgaacaaagaatttggaagtagttaaactgcagaacacgttctcggcctgggtgcctcctttcaaaaggagcgctgggagaagaaaagaaagcactggggggtgaagggagtgagaaaatgcccaggggaaaagttggtaggtcgccctagttgccgccagctaccagacgccaggaattcaataggaaatgggggagggggtggcccaagtctaccagaccgcaaggagaatcagataaagttctccaggagatggctggggttccggagcagaactgagctttcgcccagggcagagagcacctccccccacaacacacacacgcacacatacacacacacggtcaaggccaggagaagcttccctagggctttggagctagaacaggaaccagtgagtggagggggtgtctgggcccctgtgtctagccctacatggcgctgcttccctccttggctcctctaacaggaggatagggctccctctttgagccctttcgcagagcttttgtttttccttccccatccagttcagaaagactgggttctctctctccaccccttcttcactccccaccccgcacaaccagcaatctaggttcttctatgagaatatatagtttgtattttaaagtcaggcctctaggtgtaaaatatagggccaattattattttatttcattttttcaaaattttctaatgtttccacaatgaacacagccacaacgtaggaaaagaagacatttaaaaggcagtcagttatactggtatcaaactaacttagaagagaaggaacttgaaagactgtggaaaccaaaagtgtaaataaaatgacggaataaatggttaggagacgagccgaaaagaagaaaggagcggtggctgccacgttcctgggaggcagtgcctctggaaccttagagaacgctccctggccaggaggcttcctcctgtgagaggtgcttggcttgcaaggggttaacagtattgctcatgaacttggcctgtctgtctggctcgtgatgaatggtgagacccgctgacaagttcagcctagggacctcccctactgtggaagtgggagaaacacacacgggcgggcggaggggacccggggcgagtcatcaagggcgcgtggttcggcgtgccaggcgcgctgctctgcctgctctcttggcttctgtctcccttcgaccgatcgccccctatcctgaagctttccaatgtcatcttggagccccaaagtttcctggggcctccgcgttgtgcgtcccagaacc

SEQ ID NO: 14648 - DNA, 2300 bp, Homo sapien
cgggcccaaattcagagcttccttcctgaaccgtggctggcctctctgttcctctgctggttcagctgtccagcccttgttcaccttctggaaaaaggaatgtgtctgcgaagtgggatttcgagggaaacatgtacatagcagatttggttggtcacaagctggctgggatgagagcaggatgtcacctgcttcggatttagagatgggatgaaattagaacaaaccacagacaagcaatggggaaagaggcatttgacaaaatccagaacttgacaaaatccacatgtgtcatttttaggggagtgtatggaaggaagagatttttagtaaaatcatgaaatcttttccaaaccatccacttttggccccttctttccaacccatcctgcaagggttttacctggctcagagtggcccagtgccccagaccccactaaaatgaatctgcacgggtacctccacctaaccccacagtgctcactgtagacagcagcagtgagagtctctgtgactcccgtgtattgactgctggaatctgggaatccacttgcccagtcccacataaaatctctccctagctgttgagcttaagatttttctgggggtatctaggagcaaagatattgcatttttcatactgaatcctttgcatcttggggatggctgacaggcggaggtgaatcatagggctcaaggctggagggtagccacagcagcaaggaagaagggggtgatggctggcatgagcacgaagtggtacccataggccactcacatctggaaggctgcaatggtaccaccaattcagctgccagctcagtttaggggtgattccgggagacccaaggtggcagtccctttccactgttgcggctacttggagtgagtagccaggtgtgtgctgagagctgaagaaggagagtggaggcatggctttgtgctttaatttttggtgaaatatgaatttaaccaggagccaagagagagcctaggacttctccaaggtgcttggcacaatcggttttacactcctagtgtgtctaggaaccgagagagagaagggacctagcagcttggtactcagggcccaggccagggcctcgcccaagtggagcatagctgaggaacctctgagtgccaggtgttatgggtgggacaccgacctgcgctcaccgggacacttaattcttcctccaatccctggtctctgccgcgtgggctagatctactgcaagtgctgggcatggggaaaggaagagagaagttaaaggtgaaatggcttctgctctcggcctctccgtgagcgctctcggccctcctgtggagatcgccacgtcctatcacacgcgtccctaaaccttgtcactcgagcattcttgtctcccaaactctgatggtccgcagtgggtactgggctccctgggccctgggaggaagacggaggagtttgggtgaaagatcagacggtgcgcagccctgaggcttctgagggcagagggtgcgcttccttgccctcggggcggggaagccgtgaacgccgaggccattgtaaggctgggtggtgcggagcgcgggaagggggctgggatttgaatgggagcctgtgattggccgatccctggactgacgtcacttccccgcggggcgattagcctgcgagaggagggccggcggtccagtgcgctgggggcggccggggcgctcgaggctctctaagcgctccgcgcgggtgccctacgtgagccccgggacgccgtcgaggcaggccggcagcgccggtgccaggacgcacggaacggggagcaggggagaaatgcgccgggagggcgagggaggaagggaactgggcgggggctgcgggcctaggtggcgggagtcagcgtgtgcgtgtgtctgtccatcccctctggctctccgcgtgcgccccaggatccgggcacggcgtccgctcaggctcccgcgctcggcaggcagcagcacgtggagcccacggcgcggcagcggcactggctaagggaggcccgtttctctctttggttatctagctgtatgagtgccacagagccgtcataaagctagataaccgaaagtagaaatgattctcacaacttctgcgtgcgagcgcccgccccaccgaccgccccggcccggcccgcaagagccagaggagccgagaggagcccagcgccggcccagcggactccagctcgacggagcggccgcgccccgaccaggtacctgacctcggctctctctctggggacacttgcagtgccagctttcccccagtcctcctc

SEQ ID NO: 14649 - DNA, 2300 bp, Homo sapien
ctgtgacttcagacccttgtcctctccattaccccagtcctgatgtctcccaagtctgatggtacccacccatgtcaactacagctgccatctttgccatctcaggcagcctacaggtgggggctgtgtccttgaccctcttctgaaaaagaaaaacctatttttttccttcacttttgctttttatttctttcacctcaggcccaatggatatatatatatatatatatatatatacatatatatatatacatatatacatatatatatatatatatatatatatattttaatggaggttgtctcttacagaggtttcattgaaaaagaagaaacaatgtcccattaacgtcatttaaagaaaaagcacctctcagaatggaggttgggaaagctagggtttcttgcctgaatatcagttgggatgaaatcccttgtaaggaactcaagagaggagcgtttcctcagaatgctttctttagctcctgagtctccttaggtctccactggggttgtgtgtaaaaataccaagccctccctgacaatgcatctcattctcttctgcttgaattatcctgataatgagagatcacccacttctttgacagtgtagactaggattttaaaaattgggagtgaattattggacagtgtggcacttcaccagcttccctcaaggttctggatctatgctaaagaggggtggaaatgcttctggggtgtccagaagggctgcagaaattcctcgtcactggtcatggggagagcaggactggcttgcctctgtggcctcttctgcctctggaggtgacaattcctgatttgaggcactagggtggaagactcaggactatccaggaccaggttaataaaccggcagtccagattgcagaagggcagcagctgggggctggggacatgcccatgcctgtgggacagagttcttttgcatgctttggcctttacgactctgtatccttgacaagtcacaggcatctctgggtgaaatggggacaatagtacccatacctccaagggttatgtgagaattaagtaaaatatgcaaataaagtgcctggcatacagtaggcactgagcaaacggtagctcttttttccaggctggggcaagggatgcatataaatgtctggatctgaagtttgaaattccacctgctggagacagtgaacaccccagtagataccccaaatcacacagaaggacggatgaccagctgccttcttcccccagggcatgccatacacactgggcctgaagtgggagaatcgggaccccaaaaaaacggcttgtggagcggggttgcacatgggtgtaaagttcccagcttggctgcctggggagggggagcatgtaaatgtctttagagatttgaagggaccaggatctggactgatttgcgttgcccagggggctggggctgggagccaagggggtgctgccgggaggcccaggttagcttggggtatggcatttctaacagttggcgcctgcggaaaatggcctggggttccagctctggaaggttccgaatctcagtattcacgagcggcgctgtccggagcagccagggttgtcccttggtggtctcgggcaggttctccgcgatgcgcttgctgggtcgcaggtgagaacctcacggttctccatttccggagatccagctctgagcaggcagagggtcgctcccgtcgcctgcccctgcggtagccaagcgggtggctggaagcgtggctagctggcaggtaaggagctccaggtgagacggaacacgacccccaacccccttagccggtgccccacccgatttctctcctgcgtcctgggagggcatggttgaggcgccaccggtgcccagcaacctccccaggctgtggttgtgacctgaggacgcgtgtgtccccgccctcaggccaccgctacgcgaccctgagtgcaccttcaagaaggccgggcacgtttctgggcgggcgtggggggtgcctgatatctccgctctattttacagttactcccctgctggtgcctccctccttggcgcgcttcccacctgcgatcggcgccctcttcgcagtcacgaactcgccagcagctagcagcactgactagtaggagggcccgccggaggagaggtgagcgaccagagccagggagtgggtggaggagctggctgcccgcacccgcactccgctccagatgtctcagagagtggactgcgggttgggaggttgggaaattccaggatcaggttggtagtgcgcctgtgtttttacctgggtcac

SEQ ID NO: 14650 - DNA, 2300 bp, Homo sapien
ctgggcccctgggagccttggtgcggtgctagaggggtgagcagcataccacccggtctggattcatctcctaattgtgtgccccatatccttgctgtgcctcagtctgtaaaattagggggttggcccaagcctaccagcctgcccacagtgccaagggattgtggctgctcgggatgatgctggccttttactttctgcaatgttatatccccctgatgtagcacgtatgatcttctggaggagggaagggggcccacatcctctgtcccatctcatcttgtccttaagcagagaatatcaagccttcctcctatctgcccagttctgcaccatagctcctgctgtctccttaggttaggagaggtggcacatgcctctgaaggcatgttacatccttgatgagtgctgggggaaaagggagtaaagaaacaagtctcaagtttatagccaccccttccctttgaatctgtagcttttacccagtattgagtccactgttctctcttctactgtgggtcacagactccaagaccatggtggtgtgaggcagaggcagtgtggcccagtgggtatccaggtggaggggttggtctgacctaattcagaacccacaggacaccccttcccctcttcctctgagccagttttcccatctgcaaaattgggaatagtaatacttaccttgtgacactcaagatgcatcccccatcttgctggtctgtcacgagtaaaggccaggtaaggtggccagcaagggaccagggtcagtcagctctctgttagtcactctacaataagctgtggtgtttacagaccagccataagctctgcagtgcagggagaacccctgacctctaggagcagagaaactagtattgctagcctaaggcagcacaaaaaatccaaggggcagattgttttgatgttttgtctctgtccttgggagttaagagaagaggaattagattgaggcggagaagcctcactgtgcccaaacaggtcttctaggctgttgagagggcaagacagggcatccctaccaatggggagaactctctgaccaggaccttagaggtggagatgaagcgggaggaggagtcctgctggactgggcctgagatttgggtataggtcaggtcagatggtggaggataagaatgacagaggtagggagcaggctaagagaattggtatggtcaccatgtgcaagatgggtgggcactggaggctgtcaggccttgtgctgcccaggccaacctgagctgagcagccacacccatcctgtgccactcacctcttatggttcctggcctggacgtcagcagccccagggctgtgctgtggagccatttcccactttgcaagggaactgcgcggctctgaaattggaagtcttcccatgccacactgtattttttcttaccacactcatttattcattcaatgtctattgaccacacattatgtgtcagcctctgggcaaggccctggggatacagagagggaaaccacattccctggcccagcactttcgcttgtggtgtggaaaggcatacatccatctagagctggaaggccgggctagcgggggtggcgtgctagactagcaggcactccgggtctgacacttatcatcagtttgtggcttattggctttcctgcccctctccatgtcccaagagcctgggagaacagggtcagaggccatgtcatgctttgcccgtgatgaccttaagctgtcgtttagcctcagctagaactgtaattctctagattgcattgtttctgtatagaattgtgacatttcagtttccctttcttcatttaaaaagacacctttttttttttttttttttttttatgagacaaggtcttgctctgtcagccaggctggagtacagtggcctgatcatagctcactataacctcgaacttctggctcaagcaattcccctgcctcagcctccagagtagctgggactacaggcatgtgccaccacagccagacttttatatttattttataaaaataaaaaaatatgttttattttgtagagacagggtctttgttgcccaggctggcctcaaactcctggcatcaagcgatcctcccacctgggcctcccaaagtgttgagattacagcatgagccaccacacccagactaaaaggcagtttgattttacaaatcaaaatagcagtaatctatggagatttacttgtgagattggtaggaaacatcttaaatgtaatcaaacaataacttacatcttgatgaattcacgtgtaggtttctc

SEQ ID NO: 14651 - DNA, 2300 bp, Homo sapien
tgcttagcctcagatgttatacatggcattagtggcttttacaaatctgggatttcaactggcaagattttttaaagccagcattggcaagagtgcatgggaaaagtcactgacccctggctcacagggtgcatgctttgtctcgtaaaatctttctaggggaacatctagagatatgtattgaaacagctctgcctccaggaattcacagaaagttgtgcaaagacttacatatctggatgttcatgacagcatgatttgtaatactaaacaaataaaaaatgacctcatcgctcgtcacctaacactagggattgtctagataaagcacagtatatcctgctataaaagttatgttgtggcaggctgggtgtggtggctcatgcctgtaatcccagcattttgagaggctgaggtgggaggatcacttgagcccataagttcaagaccaccctgggcaagatagggagaccccatctctacaaaaaaaaaaaacttagccgggcgcggtggcgcacgcctatagtcccagctactcaggaggctgaggccagagaatggtgtgaacccgggaggcggagcttgcagtgagccgagatcaccccactgcactccagcctgggcaacagagcgagacctgtctcaaaaaaaaaaaaaaaaaaaaaaaaaaaattaggtgggcctggtggcacatgcctgtggtttcagctaattgggaggctgaagtgggaggatcacttgagcccaggaggtcaaggcagcagtgaaccatgatcaagccactgccctccagcctgggcatcagagcaagaccctatctcaaaaaaataaataaataaaaaagaaaaagaaaaagaaaaaaagttgtagaagtataatatgggaaggtgtttacaaaatatgaaaggagttaaaaacgctataaattagtatgatcgtttgaaacactccccctgctcccctccagcccctcttcaatgagctaggaaaagactagagtacatacaccaaaatattagtattgcctctgggtggtgggattatgagtgatttttactttcttctttgtgtttttctgtattttccaaatctctacaattatctctgtatttttaaagaaaaattagaaaatcaaatttattttgacaatatacagactaagcagacaatatacagactgttatactgctgaacagagaaacatggggatcattggcctcccagtgagatcagaaggaattcccagacctaaatattatggttaactcatgtcaagatcacagatcttaaccagaagacagttcctgactatggaccaatgaacttgtgaaaaactcttaaattgttcttacaatcctttatacgtgttttttttcttaaaacccttgtattttggaataattttagatttacagaaaagtggcaaagacagtccccatatagcccttactcagtttatcctactgttaacattttacataaccatgacatttgtcccaactaagaaaacaacatgggaacgtcactattaactaattttcaggctttatttggattttaccagttttccaattaacatcctttttctgttccagggtcaagtctggggtagcacatcacagatgtctccccaggccgctctgttgtgtgacagtgtcccaaacattccttgtttctcatgtgccctgtatgaatttcataatcagaaaaagaaaggacagatgatgatgcagatgatgatggcagatgatgatgatgttgatgatgatgacttaggtctgggaattccttctgatctcactgggaggccaatgatccccgtgtttctctgttcagcagaacaaaaggagaaaggccccagtatcaacgggacacacagaatttggggcaccctgatcctcctgcccactgccttagcctctgctcctgccgctgtcccccagcccgacgcggggaatcttttggggccctcggcttgggttgggcccctgccagttgggcgagcgcgcgggcggtgcccgagtcagctgctccgtgccccacgtggccgccccgcccccctgcccgggtctcaaaagccccgccggcctccgagcgtccgaaccgcccgctgccagcccggccaggcacccctgcagcatggcctggaacaccaacctccgctggcggctgccgctcacctgcctgctcctgcaggtgattatggtgattctcttcggggtgttcgtgcgctacgacttcgaggccgacgcccactggtggtcagagaggacgcacaagaacttgagcgacatggagaa

SEQ ID NO: 14652 - DNA, 2300 bp, Homo sapien
ttcagcaccaatgacatttggggcctgatcaatctctgttttggggactgtcctgtgcgttagcagcacccctggcctctacccactggatgtgagtggtcaggagtatgaccatcccctcgttgtgacaacaaaaaaggtattcacatattaccagatgtctcctgggagataaaactgccccagttgagaaccactggggtatggcatctacactctgccttaagctggaggtaatctcttggcacagccttgctcctggctggaggactgtatctctgcccctgagggtgggcaggtggacagggcctggtaagctctgcattatctctgtaggacctcccgcagggcagggcctcaggtgctggctgcagctcctccaccaccactgtctcacttccatttctgccttggctgctgtgatggttaattttacaggtcaacttgactgggcatggggtgcccagacatttggtcaaacactattctttctgggtgcgtctatgagggtgtttgtggatgagatcatcatttgagtaaagcagattgccctcaaatatgggtgggcctcatctaatcagttgagggtctgaatggaatgaagaggttgaccctcactccgaaggagaagggaactccttctgtcaactgccttccagcttgtggtaccagtgcttttcctgctttcagacttgaactaaaacattggctcttccttggtctctagcctgctgacattcagactagaactccaccatcagctctcctgggtctccagcttgctgactgcagatcttgggacttggcagcctccataatcatgtgagccaattccttataaaaactctctctctgcttctctctctctctctacacacacacacacacacacacacacacacacagttgaccctttaacaacataggtttgagctgcatggattcacttatacacaaatttttctcaataaaaagtgcactggccaggtgcagtggctcacgcctgtaatcccaacactttgggaagccaaggcaggtggatcacgaggtcaggagattgaaaccaacctggccaacatggtgaaaccctgtttctactaaaaatacaaaaataattcgggtgcggtggtgggtgcctgtaatcccagctactcaggaggctgaggtaggagaattgcttgaacccaggaggtggaggttgcagtgagccaagatcacgccattgcactccagcctggttgatagaacgagactctgtctcaaaaaaacaaaacaaaacaacaacaacaaaaatgcactgagtgtgcctgcttctcctgccttcccttccacctcccccacatctttctcctctgccatttctgagacagcaagaccaacccctcctcttcctccttctccgtctactcaatatgaagatgagaatgaagacctttatgatgatccacttccacctaatgaacactaaatatatttcctctttcttatgattttcttaacattttcttttctcttgcttactttattgtaagaatacaatatatcatacatattacacatgaaatatgtgttaattgactgttcatgttattgaaggcttctgatctgcagtagcctattagtagttaagtttttggggatcaaaagttatatgtaaatttttgattgcctgggaagttggtgcccctaatccctgtgttgttcaagggtcaaatgtttatgtatatagataaatgttatatataatatatatgatatgatatatgtcaatggtatatataatatatatgatatgatatatatcaatgttatatattatatataatatgatatataaatattatatagaatatgatatataaatattatatagaatatgatatataaatattacatatataatatataaatgttatgtataatatataatattatatataatatataaatgttatatataatatataatattatatataatataatatataaatgttaatataatatataatattatatataatataatatataaatgttatatataatatataatattatatataatataatatataaatgttatatataatatataatattatatataatataatatataaatgttatatataatatataatattatatataatataatatataaatgttatatataatatataatattatatataatataatatataaatgttatatataatatatattatatataatataatatataaatgttatatataatatatattatatataatataatatataaatgttat

SEQ ID NO: 14653 - DNA, 2300 bp, Homo sapien
ctgaagagtttggtaaatacaggacgccagaccccacctgcagagtctcccacccagcaggtctgaatggggcctatattcatttcctgtggctgctgtaacaaatcaccacaaactcggtggcttaaccaacagaaatctattctcttacaattctggaggtatgaaattaaaaatgagtctcactgggctaccatcaaggtgttggctgtgttccttctagaggctcagggagaatctgtttccttgcttgccccctcttctagaggccacctgcacttaaaagctttttcccactttggtgtcttgattcttttttttttttttttgagacagagtcttactctgtcacctaggctggagtgtagtggtgcaatctcagctcactataacctctgcctcccaggttcaagcaattcccgtgcctcagcctcccgaatagctggggccacaggtgcctgccaccacgccttagctaatttttgtgtttttagtagagatggggtttcgccatattgaccaggctggtctcgaactcctgacctcaagtgatctgcccaccttggcctcccaaagtgctaggattacaggcctgagccactgcacctggccttggtgtcgattctttatgctcttgagatccttggaatgtatatgttcttccatacctcccttctgtttccttcactgaaattcaaagtgattgatataacagtactccctgtagcttcttttcattttaaccaagcctaaatcaaagtgtttttttaaaaaattataactcctattttcttataaggatacacaaaacgaagcaagattatataagtcaaaggaagtaaaaatgaatacggtacaacaaggctaacgacataaaattgaaccagtaatgaagctactgtaaaaagacagaccatggagttgtgcacttttgctgcaagtgggtacatatttggtgtaaagtttcctggcagccaagaccaaaagggaaaactagttagttacatagttcataactgtccatgtggtagaaaattaatctactgcttaggaatatgcagctgaaagaccagaaagaccctgtggaaagtgggaagccacaccctcaagaacatctttccaatagattcaaagacgagttttatgaaatgtttcttctggcaaaacacaggagagtaaagctgattctgtagggaatgttgtgcgtccacccagggattcattcttctcttgttctggcttaaacctgggttaattttagagtgtctggatcatctggttgaccttaaaggagagttagattcccagaagaaagaaggtcggccagttaggaagcattctgttgcttgataattgcaagcaacaggaagtccagccctattggctgaaacaaatatatttctggactcgtgtgatttggaagctcagtggtagttttagcatcagacaagactttactcagagcttaaatgctctcaccctccaagtatgggagtatcctggacctccccaaaatgcaactaaaatgttaaagcccagcatagcagtgggcctgtgtaagtccttccttcctatagtgacttgtcagattaggtctgattagtcagattttggaaactattcctatatttcttctttatattgactggagaagagaaggtgttttccccaccattctcagtgaaagtcccgagtttcaatctgattggattagattaggtcacacactcatcccttaactgatcactgtagactggaaagcactaattaacctaggctggattacataccctaactttgacctcactagacccaggatgagcaacttgtctgggaacagggagcagaaacagtggagcagaaactcttgggttttagaatcagacagatccaggttagttcatttattcatcaattcaaaacactgggtgtaacataccaaataaaacatatctagtcccacccctaacatagatattaaaccagtgtatcagttatctattgccatgtaacaaaccactccaaaacttagtgacctaaacaatgaccattttatgtgctcaccgttgtgcaggtcagcagtttgggctgggctcaggtgggtgattcttttggactaattcatgtggctgcaattggagctggatgatctaaatggtctcactcctaggtctggctgttgatgttggctgttggctgagccaggggccgccagcaggctagcatgggctcttcactcagcagcagggttccccaagaggacaagcccaacacacatgtgcttttcaagcctgtgatta

SEQ ID NO: 14654 - DNA, 2300 bp, Homo sapien
ttgtcaaagatcagtggaggccaggtgcagtgactcatgcctgtaatcctagcactttgggaggctgaggcgggcagatcacccgaggtcagtagttcgagatcagcctggccagcatggtgaaaccctgtctctactaaaaatacaaaaattagccaggcgtggtggcaggcgcctgtagtcccagctacttggggttactgagtcatgagaatcgcttgatcccgggagacagaggttgcagtgagccgagattgcgcccctgcactccagcctgggtgacggagcaagactctgtctcaaaaaaaaaaaaaaaaatccgtttactatatttatgtaggtctatttccaggctctcctgttacattgatctctctattcttttgctaatatcacacaaactgtcttgattactgtagctttatagtaagtcctgaaggttggtactatcagtcctcaaactttgtttttctcattcaatattgagttagttattctgggtctttcgcctcttcatataaactttagaatcagtttgtcaatatgcagaaaataacttatttgatagggatcacatagaatctatagatcaaattgggaatctgaaatcttgacagtattgagtctttcttgctgtgaacatggaatatctctccacttatttagttctttgattttgttcacagaattttgtagttttccgcatatagatcttatacaaattttgttagatttaatacctgggtatttcatatttagggggggtgctaatttaaatggtaatgtgtttttaattttaaattttgcttgtacattactggcatatgggaaagcaatggacttttatgtattaatcttgtatcctgcaaatttgctataatcacttgttagttccaggagttttttgtttgtttgtttgtttgttttttttagtagagatggggtttcaccgtgttagccaggatggtctcgatctcctgacctcgtgatctgcccacctcagcctcccaaagtgctgggattacaggcgtgagccaccacacccggcccagttccaggagttttgttgtttgttctttcagattttctaatcatgtcatatcaccaaagacagttttatttcttcctacctttaaattgtttgtttgtttgttttgagacggagtttcactcttattgcccagactggagtgcaatggtgcggtcttggctcactgcaacctccgcctcccaggttcaagtgattctcctgtctcagcctcctgagtagctgggattagaggcgcccgccactacgcccgggtaatttttggtatttttagtagagaagaggtttcaccatgttggccaggctggtcttgaactcctgacctcaggtgatccacccacctcggcctcccaaactgttaggattacagacgtgagccaccacgcctggcctcctacctttaaatttttaacacttaaacttggtatacagagccttaaaattaatcacttggctgggcatggtggctcatgccagtaatcctagcactttgggaggccagggcggatagatggcttgagttcaggagttcaagaccagcctgggcaacatggtgaaaccctgtctttaccaaaaatacagaaaataagctaggtgtggtggcacatgcttgtggtcccagctactccagaggctgaggtgggaagatcacttgagcctgcctgggaggtggaggttgtggtgagccgagattgtgccactgcactccagcctgattgtcagagtaagaccttgtctcaaataaaatgaaataaaattaatcacttatctctgtagtttctcagtctctggactattgacattttagaccagataattcttcgttgtagggctgtcctatgtattgtaggatgtttaacagcatccctggctcctacatactagatggccagcagccacccccgcccccaccaccatcagtcatgacaatccagacaaggccaaatgttccctgcaaggaaatattttccccagtggacaacaactggcctaagtaatacaaggacttgagcaagatatgattaatccattttattttatttttttctcagattttaaaactgaggaagagctgctatcatatatacgtgaaaattaccaaaagactgtggccacaggagaaatcatgttgtatgcatgtgctcgaaacatgatctcaaccgttaaaatgttcctaaaatcaaaaggcaccaaggaattagaagtaagagggtccagatattgttgtttgtcatggatgtagtggttggtt

SEQ ID NO: 14655 - DNA, 2300 bp, Homo sapien
cttcaagcagcaggtttgactgaagccacggtgggggcggtggaggaggagatagagaggatctcatctgttctcttggctttgtctactgtttatattatatactgcacagatacctttctggagtgtgtgacactcatcttttccgtttgattgcccactccatccagtcaccaacattagaaacctgggagtcatccttttccctctccccaggcatagccaatcagtcgagtcctgcccattttatttacaaactgactctttttttttttttttttttttggagacagagtcttactattttgcacaggctggagtgcagtggcacgatctcagctcactgcaacctctgcctcccagttcaagcgattctcctgcctcagcctcctaagtagctaggattacaggcacccaccacaacgcccaactaatttttgtgcttttagtagagatggggtttcaccatgttggccaggctggtctcgaactcctgacctcaagtgatccacctgcctcagccttccaaagtgctgggattacaggcatgagccactgcgcccggcctacaaactgactcttgtacccaccccctcttctcccctactgcaattcctaccctagttcaggtctacctggaacacttcaacaggcttttccctctcaaagggaaatcctccacccagaggtcagagtgatctttctgaaacattcctctcagtttgcttaaaatgttcactttgcttaaagctctatagactccccgtccgctaaagcaaggctttaagttttcctaagtggaactcttgggttcaaaaataatcacctttgtttggaaactcagtaaattgcttggaggttgggaaagacatagagctctggagaagggtctgaaaaccatagatctacacaaccaagatcagtctcctcccccaggcaggcagggtcttccgtggtctgttccctctggcctcacccctccccgctccacctccccagcaacatcaggctgggtgccatcctgcacagccactgcttttcacttccaggcctttgctagtattgttttctatgcctacaggccgccaccaccccacccacttttcctgtgtttgccttcccctgccgacacccaagcttgaagacctgatccaggctgggttaggcagcccttctttgtgttctgtgatgcccctcgcatgtccctgtcactgcaccaatcacattgtattttcacctgcgtatgccccactgaacaggaaatgccagctagactgagagtcccctgacgggatgaaggaaggctgtaggaaagataagcattgatttccttacctgttggagcttttcactacgtatttttgcaagaaggcagggaaattttttattggggagtgtcttttctgagacattatctttgctgctgcaccttatatatctgtgtattccatgcccccaacacacagtgcctggcacatagcaggtgatcagtaagcacatgttgaatgagggtgagcagcagatgaggtggctcctggaggctgctttaggcaaagatcagaaatagctgccttatctgaaaagaaggaagagctagagagtagctgcagtggtagaatgattccattagaggcaaaaagcatggtttagcaatatgtagattattaaaattatttgttctaggacaaactaaacttggatagtgtttggtcctagaaaaagtagacaagtaaaatctgagtcatgttttggagagggaaacgggtcactatttgagatttccatctttagatcattcctttggctgactataaatctcccatttggtcttagagattactaaaacacttcagagatcatgagttataatattcaaggactgaaataagcatttctcttttcagactcccaagaagagtcaccagaaatctctgagcttttctaaaactacaccaagaaggatctctcatacaccacaaactccgttgtatactccagaaaggctgcagaagtcccctgcaaaaatgacccctacaaagcaggcagcttttaaggagtccttaaaagactcctcctcacccggccatgactcaccattggattcaaaaatcactcctcaaaaacgacatacccaggcaggagaaggtacctctcttgaaacgaagacaccaagaactcctaagaggcaaggtactcagccgcctgggtttttgccaaactgtacttggccacattcagtgaattccagtccagaaagcccctcctgtccagcccctccaacttcatcgactgcccagccc

SEQ ID NO: 14656 - DNA, 2300 bp, Homo sapien
aagaaggaagagctagagagtagctgcagtggtagaatgattccattagaggcaaaaagcatggtttagcaatatgtagattattaaaattatttgttctaggacaaactaaacttggatagtgtttggtcctagaaaaagtagacaagtaaaatctgagtcatgttttggagagggaaacgggtcactatttgagatttccatctttagatcattcctttggctgactataaatctcccatttggtcttagagattactaaaacacttcagagatcatgagttataatattcaaggactgaaataagcatttctcttttcagactcccaagaagagtcaccagaaatctctgagcttttctaaaactacaccaagaaggatctctcatacaccacaaactccgttgtatactccagaaaggctgcagaagtcccctgcaaaaatgacccctacaaagcaggcagcttttaaggagtccttaaaagactcctcctcacccggccatgactcaccattggattcaaaaatcactcctcaaaaacgacatacccaggcaggagaaggtacctctcttgaaacgaagacaccaagaactcctaagaggcaaggtactcagccgcctgggtttttgccaaactgtacttggccacattcagtgaattccagtccagaaagcccctcctgtccagcccctccaacttcatcgactgcccagcccaggagagagtgtctcactcccatcagagaccctctcagaacacctccgagagcagcagccttcatgggcacgcctcagaatcaaacacaccaacagccccatgtcctcagagctgctcgggcagaggaaccagcccagaaactaaaggataaagctatcaaaactccaaaaagaccagggaattcaactgtgacttcttccccacctgttacgccaaagaaactgtttacctctcctttatgtgatgtctccaagaagagtccatttaggaaatctaaaatagagtgtccttccccaggagaactggatcagaaagagccccagatgtcacccagcgtagctgcatctctctcctgccctgttccctcaactccccctgaactctcacagagagctacattggacaccgtccctcctccacccccttctaaagttgggaaacggtgtagaaagacctctgatcccagaaggagcatcgtggagtgtcagcctgatgcctccgctactcctggggttggcacagctgacagcccagctgcccccacagactctagagatgaccagaagggactgagcctctctcctcagtctcctcctgaaagacggggctacccaggccctggtctcaggagtgattggcatgcatcctctcctctgctcattacaagtgacacagagcatgtcactctcctcagtgaagccgaacaccatggcattggtgacttgaaaagtaacgtcttatcagtggaagagggtgaggggctaaggacagcagatgctgagaagtcttctctgtctcaccctgggattcccccatctcctccttcctgtgggcctggctctcctctgatgccttcccgtgacgtgcactgtaccacagatgggagacagtgccaggcttcggcacaactagacaacctgccagcatcagcttggcattccacagactctgccagcccacagacctatgaggttgagctggagatgcaagcttctggccttcccaaacttcgaattaagaagatagaccccagctcttcattagaggctgagcccctcagcaaggaggagagctctctgggagaagagagcttcctccctgctctcagcatgcccagggccagcaggtccttaagcaaacctgaacccacctatgtgtcacccccctgcccccgcctctcccacagcacacctggcaagagcagggggcaaacctacatctgccaggcctgtacccccacccacggcccttctagtaccccctctccatttcaaacagatggggttccttggacaccatcccccaagcacagtgggaagacaactccagacataattaaagactggcccaggaggaagagggcggtgggctgtggcgccggctcctcttccgggaggggcgaggtcggtgcagaccttcctgggagcctgtcactgcttgagtcagagggcaaggaccacggccttgaactcagcatccacaggacgcccatcttggaggattttgagctcgagggagtgtgccagctcccagaccagtcgcctcccaggaacagcatgcctaaggccgaggaagcctct

SEQ ID NO: 14657 - DNA, 2300 bp, Homo sapien
agtcattctccatccagctttgttccgttgctggtgaggaactgcgttcctttaaaggaggagaggcgctccgctttttagagtttccattttttctgctctgttttttccccatctttgtggttttatctacttttggtctttgatgatggtgatgtacagatgggtttttggtgtggatgtcctttctgtttgttagttttccttctaacatacaggaccctcagctgcaggtctgttggagtacccggccgtgtgaggtgtcagtctgcccctgctggggggtgcctcccagttaggctgctcggaggtcaggggtcaggaacccacttgaggaggcagtctgcctgttctcaggtctccagctgcgtgctgggagaacccctgctctcttcaaagctgtcagacagggacatttaagtctgcagaggttactgctgtctttttgtttgtctgtgccctgcccccagaggtggagcctacagaggcaggcaggcctccttgagctgtggtgggctccacccagatcgagcttcccagctgctttgtttacctaagcaagcctgggcaatggtgggcacccctcccccagcctcgctgccaccttgcagtttgatctccgactgctgtgctagcaatcagccagactctgtgggcgtaggaccctctgagccatgtgcgggatataatctcctggtgtgccttttttaagcccatcggaaaagcgcagtattctggtgggagtgacccgattttccaggtgccatctgtcaccccttcgtttgactaggaaagggaactccctgaccccttgcacttcccgagtgaggcaatgcctcgccctgcttcggctcgcgcacggtgcgcgcacccactgacctgcgcccactgtctggcactccctagtgagatgaacccagtacctcagatggaaatgcagaaatcacccgtcttctgcgtcactcacgctgggagctgtagactggagctgttcctattcggccatcttggctcctgtgtcctgttattattttttgagtcagagtcttgctgtgttgcccaagctggagtgcagtggcacgatcccggctcactgcaacctctgcctcccgggttcaagtgattctcctgcctcagcctcctgagtagctgggattagaggcacccaccaccaaacccagctaatttttgtatttttagtagagacaggatttcactatgttggccaggttggtctcaaactcctgacctcaagtaatccgcccgcctcagcctctcaaagtgctgggattacagacgtgagccaccgcacccggcctctgttattattattggtctatcacccacctacccatttgccctctatctgcctgcccttgttgagtgcccagcactatggcaggctcgcggtagccccgtgcatggcccagtgaagactgtgtgggtcccaggtgctgaaggagaagaagcaggctacggagcggctggtgtcactgtcggcccagagtgagaagcgactgcaggagctcgagcggaacgtgcagctcatgcggcagcagcagggacagctgcagaggcggcttcgcgaggagacggagcagaagcggcgcctggaggcagaaatgagcaagcggcagcaccgcgtcaaggtcaggctcacggcagggtggggaccttctgtccaggccaataggctgagctggcggcccagccaggggagcccaggcagggtttgcaacccacagccacgtgaccttagaaagcaggtcacttagcctgagtctgttttttcatctgaaaatgtggaatgttataggaaactcaaggccagggtgagacttcagtgagatgaggtatatgaggtgactggcatcttgtggggcttatttctaagtgtttgcgtctatttgccggtctccagggagatttgtgtgggatgggtctgggggacacttcgcagggccctcttgggagtgggcaggcactcctgggggctttgggatcggtggcaggctctggtaagatgctggcaccataaacagccctgcccactgagctcctcacccaggagctggagctgaagcatgagcaacagcagaagatcctgaagattaagacggaagagatcgcggcattccagaggaagaggcgcagtggcagcaacggctctgtggtcagcctggaacagcagcaggtggggccaggctgtgtccgcacccagggctcccctgggggctggctggtgggtgcacctttctccccagtgaacctcgagtggcggctgacacagccagaggtgg

SEQ ID NO: 14658 - DNA, 2300 bp, Homo sapien
ccagcttgggcaacgagagcaaaactcagtctcaaaaaaaaaaagttgatttggccagatctcctattggatcttcggatggacacttaggatgtttgcattttttgaagtcatgaggaagagtgctgctctgaagttcctctgattatttccttgggataaatttaggaggccctttagataactgagcatggattaggagtaatcaaggcaaggttatttgataatctgttgaggatgcagtgaaggggatgcttacagcatgaaaggggttgattgaatcaggagaggttgcttccaactcttaaattttataattctgcctgaccacgctggagcatggccaagctcaggccacctgtcccatcctggcctcggccactgccttctccatcctagagcaccatcctccagctctggcaggggcctatgagcttccgggcctgggggccatgggccgtgtccagctgaagtggcaggaggccctgcggtgtctccccagcctccctccttgaggatgagcagggcattgtcccgagggccatggccgaggccttcaagctcatcgatgagaacgacctgcttgactgtctggtacatgtgtcctacctggaagtgtacaaggaggagttccgagacctgctcgaggtgggcactgccagccgtgacatccagctccgggaagatgagcgcgggaatgttggtgaggaactctggggtcctccactgacggagaggggcttaggggggcttcacctgtttggagtggagtgcttacctgtctgggaatggcaactcctcatggaaaacccaagccctgggaggttttgctttagcttcttgcctccactgagttcagtacatgcttctatacccagagtgagaggcactgaggtgggccagtgggaagccggagcccctcaagccggaactaggaagggcagtaccccgtgggcatggggagggagcagtgggtcaggaagggcaggtttggggctagttctgctctgcctgccctcctggctggtcagtctggcggcccctgccctggggctcacggccttctgtgcccgcagtgctgtgcggggtgaaggaggtcgacgtggagggcctggatgaggtgctgagcctcctggagatgggcaacgcggcgcggcacacgggagccacgcacctcaaccacctgtctagccgctcacacacggtcttcaccgtgaccctggagcagcgggggcgcgcccccagccgcctaccccgccccgccccgggccagctgctcgtctccaagttccacttcgtggacctggcgggctcagagagggtgctcaagacgggcagcaccggcgagcggctcaaggagagcatccagatcaacagcagcctcctggcgctgggcaacgtcatcagcgccctgggggaccctcagcgccggggcagccacataccctaccgcgactccaagatcacccggtgagctgccccctggctcctatgtggcctgggggccggggaggcggggagtgtccagcacaccagtgggggtggaagcccaggtcccctgaggtctccagcccacgggaaccgcgccaggagccggtcccaggtctggcccgctggccctgggcctggagcgtcggggcccctgagagcctccccctcgcgccctcaggatcctcaaagactcgctgggcgggaacgccaagacggtgatgatcgcctgcgtcagcccttcctcctccgacttcgacgagaccctcaacaccctcaactacgccagccgcgcccagaacatccgcaaccgcgccacggtcaactggcggcccgaggccgagcggccacccgaagagacggcgagcggcgcgcggggtccgccacggcaccgctccgagacccgcatcatccaccgcggccggcgcgccccaggcccagccaccgcctccgcggcggccgccatgcgcctgggcgccgagtgcgcgcgctaccgggcctgcaccgacgccgcctacagcctcttgcgcgagctgcaggccgagcccgggctgcccggcgccgccgcccgcaaggtgcgcgactggctgtgcgccgtcgagggcgagcgcagcgccctgagctccgcctccgggcccgatagcggcatcgagagcgcctccgtcgaggaccaggcggcgcagggggccggcgggcgaaaggtggccgagggacaggttgtggttgtggttgtgggcagtggggagtggtggagaggaaggaagagggtcttcagacagcagctgcgcccctgcctcctgcccattagcagg

SEQ ID NO: 14659 - DNA, 2300 bp, Homo sapien
tacacaccagattgttgcatatgagtgctactgatacacagaaaaacactgcacatccaccagaaagagcaagaaaaaagataaatctttctaaaatcatgaacattgatagttccaccatcatgaaattctttaaaaatttattgtaacatgaaagtttttattttctctacaatttaattactataattgtaattagaattgtacctctgtctctctctctttttttttttttttttttgagacagggtctcactctctcacacaggttggagtgcagtggcaccatctcggctcactgcaacctccacctcccaggctcaagccagtgtatcttcctacttcaacctcccaagtagctgggactataggcccatgccactacgcctgcctatgttttgcattttttgtggaaacagctttgccctattgcccaggttggtctcaaactcctgggctgaagggatctgcctgcctcagcctcctagagtgatgggtttacaggcatgagccaccttggctggcccagaattgtacctcttaaagcatgatgtttcattaatcatcatcaccttttattacattttacacatatgaaaatccaagttcagttttcagcttcttcacattttcagggtctaaaatgattctctttgggcatcacggcggcaggctgctctgtgttgttcttgttcaggaccccaattgatttagaatatttgggaacaacagtgtcattctacagcatgtcaaagaacactggggtttcatgtgctctttccaattgctcgaggttttagtttctccttaattgaattgtctattggaggaaatggcacagctcctggcatctgacagatagatgcttggtacctgaatcatggtcctttgtgatacacgaatcagttggccagcctctcctctatgaagcttcgaggatgtggttgtggagattgtggatgactttcctatatccacgctgtctcacactggtattgcaagccaatcatggtagttccatccccttgacagtgattagtttgggggtggacaggcctaagctgtgtggtacatggaatgggaaggaaatcagcttggagtgctcttgatccaaagggcatgcttcaccacacactgctgtcttcttcctctggacgttttgtgtctgaagttgatggcaaaaaaaaaaaaagagttaaaaaggccacctccttggtaatgttgccactgactcaacctgcccaggagccctcatccctctgggtttcactgttccccgagataacacatgaccttatggttcaagccacttcaaattgtggtttctgttactggaggctgagggtttcctaatatagatctatctgacgagcctggcaatttctatggcctttaattatgttgcctgtctatgacaggtaatcttctatatacataataaaatttcactagaaactacactggagtttactttttctaatggcgttttaagtgacaaatatgttttcagattttaaaattcacccattcatggtgcttccagtgcaaacaatggatcagaggtctcagaggtgaagacaccaaccatctctttgaggctgccgtggacacccccagatcacctctcctgcccctcctggtgccaagtttcccttgacaatgagtgtaagatggaactcaattttaggaatgctaaaatgtgagaaaaagagagtcttataactgagaaaacttttttaaacgtggggagattaaagtttctgccggctgtgtgagtggcgtgcaggaggcgtggtttgggactgggagtggaaaacagagaccggggatgaaggtgactcggggctgaggacaggatggtctggagtccagtttggagacaaattctagaaaataaggcgatgccatcatgaggatgctgcacactctccaggcccagcccttgagcacgggccccgcccgccctgtctgcgggccgactccgcgacgccgaccggctcgcgcctccgcccccgagcgccccggcgggcggagttgcgggtgaggggggggctggtttggggggcgggggtcccgatgacggcatcggagcgcgccgcactggggatggaaacctgactgcctggcccgggacggcgcttgcagccaggcaggtgagtgtgggccggagagcgggttaggggcgaggaccgggtgggtggagggaggcgcgcgctccctcctcgcgcaggcctgggcctagtggccctgggagccggcactcctgggagacctgacccggcatgaggagcccggcaccc

SEQ ID NO: 14660 - DNA, 2300 bp, Homo sapien
atcagcctacacagttggtacagcgagctctgggctagaagatccaggctgaggaggaggatggagaaagattgagatgtagagcctctgggttgagagggacctctgaaatgaactcatctagactgctgccatggagatggtgctctacagtagccctgtcaatcgctggctggcttctgcctaggtaagtctgccttgaattcatggtggtatgttatgttacagtggtatccatcttggtacttttgtcctctgcaatggtgagtggtggggagtttgggaaatactacctcttctaagaggtttgtgtaaaccttaatggtgtcctggtaccaccctgtgaatccttctttgtaactaatgttttccaccccagagcctccacattcatgagggatgccaaaaatcgaagaagttcttcgtagatgtacagcccagcacattcacaactgagcattgttgcctgacaattcatttattcaacaatgaatgtttgagtgccatgcatggttttgggtatccacttgtgagcaagatgacctaggtccctgctctcacttggtggaggggtagggaaagcaggtaggtacggagaaggaaagaagatagaactctatgccctgcaagctactgctagaaaactaacacttctgtcttccctcgggactctcctaggccctttcaccacttctcacctctcacccacattctgcactcccagctaaagcagccaaaggactatttgatttggcagagctttcaggcacaaagccctatgttccctctggcccaaagccactactctgaaggctgaaaactgccctttggctcaggttgctgtccagtcacagcctcacagataatttgtgctgaaccttgaggtgagggcagaggccacttctttaaatactttgtcttctctactgccttacatttgaaaagcacaggttggatcaataagtattaaacgtatagcgtattactcctttgaagcctccctgcttgactcctccctttcctgccttctcattccctactttattgcatcacagatacgtaatttattaccaaggatctttcataattccccacccctgcctctttcttctcttgcccacactgtgtgacttaacagagtcaacaatacatataattccaccagcaacaaagaaaataagttttgttttcctattgtctgttttcatgaagaggcccttcttagttaatctgaaagctatggcttataccatagtcctccatcatatctaaagccaggaactagaacttgggcttgtgcttgagtcctgggtaaagaagggttgagtggtgctaattcttggctgtctgggtgctcttgattagtgatagaatcctagtcaacactgtcgcttatccagacccaggagaataaaaatctacttggctctcctactcttcattctggtagcatcttaggccaggtaaagttcaataaatttttttgaattctaagaagtgggaattcctccctcaactcaaaggctatattgtcaaaaactcaactcccggctctgtcgcttcttcactgagggcaatttatctccataatcaaagatgaatacattcagatgaactcttctgtgtgggtttaaattttactgttcagcattcagtcttgctagtaaataagaaaagatgagagaaatggattgaaaactcccacaagaccctctatggaaaaggagccaaaagattgcagaggtatatagaactttagagcttttgagtttaatgatgtctatccctataccttctttctggaaagcagatttttgtgaattgagggcaggaacattacagaactgatgcttcatggctctggaatactaagtcctctgagcctggatctccttcagctctgccacctacctccttgtttgctaaatgtccttagagaagttaggatatgcctggggaaccctgggtcatataaccatgacaactggctgaccctgttgtctctccctctctgccctcctctagctgggaggtggaagcagcattgcccaagcctcccaggagtgacaggaattgtttctgcctgaggagacactctgcagcctgggctctgtgagactgaggtggcggtcagccggagtgagtgttggggtcctggggcacctgccttacatggcttgtttatgaacattaaagggaagaagttgaaggtaagggcctcttggggattttgctggggatgaaaaactctgcagggaaactactgagggagagattctggtatagataccagaatctag

SEQ ID NO: 14661 - DNA, 2300 bp, Homo sapien
atgatgattattatttttaatgtttttattttttttttagaaggagtctcgctctgttgcccaggctggagtgcagtggcgtgatcttggctcactgcaagctttgcctcctgggctcatgccattctcctgcctcagcctcctgagtagctgggactgcaggcgcccaccacaacgcccagctaatttttgtatttttagtagagacagggtttcaccatgttagccaggatggtctcgatctcctgactttgtgatccgcccacctcagcctcccaaagtgctgggattacaggtgtaagccactgcacccggcctaaatgattatttttttaaccaacttccttgataaaccctgcagggtacattctaggtacactggaattacaggtttctatttaatgaaatttctatttaatgaagcttgtatataaagtaaccatttaaaaaacctatcaaactaatgagaaagccagtatagcttggtagttaagtgggcactggagtcatttgcgtggatgtgaatccctcagttctgccattgtagtacctattaacctctttctgcttcagtttctccatctgaagtgggtaaaatatttagagtatctacctcatagggttgtgatgagggttatataagttcatagttgcaaaacactgggaacaatagctgtcataaagatggcttccaaaagcctcattattggggccattctaattgatctgtttgtatcagcacttgcacacccagaagagaatgcagagctgttaaataaaactgcaactgtaaatattttttcattaagcaagaatcaaccaaatctctaaaacatcatgaactagtactgtattcgtattaaagatacaatctctcagttcttttcgtttcttatggaaccaaaagaaaaagagacacaatctctgtttaatattttcagtagcacagcatgaaccttagaggtgcagttagttctttctgagcttctccccactgtatttccccccaatccagttggtgtggtctcatccccgctatattttgttttacaatttacaaaactattccacatgcagtatctcaatgatacagcctgggtaataatggaagagaacttctgtctctcctcaaacatttcaagaggtatttgagaccgggcgcggtggctcgcacctgtaatcccagcactttgggaagccgaggtggacagatcacctgaggtcaggagttcgagaccagcctggccaacatggcgaaacccccgtctctactaaaaatacaaaaagtagccgggcgtggtagtgcacgcctgtaatcccagctactcaggaggctgaggcaggagaatcgcttgaacccgggaggcagaggttgcagtgggccgagaccgcgccactgcctgggcgacagagcgagactccgtctcaaaagaaaaaaaaaagagagatatttgaagtcacaccaagtggtttgcttccctagccacaaatactaatccaaagtttctctttaaaggagatccctcggaagaatgttgagtggagagaaccaatctttctgtgcccggagagcaaagttaggaggggaggaggatctgtcagccggtgtcccgtcgtcggcggtctcgaggcggctagggtgccaggcactggggctttcgtgcacggggctaggacgggacgcgggtgcgttgggcccactcacgttgaatttagggtaaggaggggctcggatactaaactccctccgtaggagctggcaacgtccttcctgcttccatctactaggctatcacctcctttttcccgggtgcaggggaataggcacgggagccgagttagggcgagaaaggggcggaggccgctggcacctgactcacctgaagagtcggtcccggccctgggtctggttggtgaagcgggtgaaggcgtccatggcttctagcccaaaggccacgagtcgcacggggctcaggcgtgggtcctctggggcccgtcggatccccagggaacggtcagtcccaggttatccgctgagggggaggggctgagtctctccgccccagagggggcgggcacactttctgtagagcaacttcgcggacttccggttcaagccggaagttgtggttaccaaggcgacgcaacgccgcccggccaggtgagcaaaactgatcttacctttggatgccggggctcccctcgagtcccaggactcccctttacctgtagagtctcctagaggaaagtctgagggggtccgtctccccagactcgggcgtttccggatgcctgacgcc

SEQ ID NO: 14662 - DNA, 2300 bp, Homo sapien
ccagaactttgggagctcgaggtaggtggatcacctgaggtcaggagttccagaccagcctgaccagcatggtgaaacaccatctctactaaaaatataaaaaatcagccatgcgtggtggcgcatgcctgtaatcccagctcaggaggctgaagcaggagaatcgcttgaacccgggagacgaagggtgcagtgagctgacattgcgccattgcactccagcctgggcaataagagcaaaactctgtctcaaaaacaaaaacaaaaaacagatgatacacatctgtgtttagaagcaccctgtgctcacctctatcatctaacatatctctgtgttgtacttatcagtttactgtgttccttgttaacctattaccctacgactagagtttagcacagtggttggtatatggccaggactcaataaattctcattgcttgcagaattgccctgacctgggccacgtatttagagaaaacttctggctctcttcgaggctctttcctctacaaaaaatgagtaacccatggggccaaggagatatgctcacccaaagcctagtttccctcttctggagtctagaccatgttcagggtaccaatacccctggaatttactgcccaaatgacaccatggcctgcatgagcccttctcagctttcacctgagggcagacccagctgctaatgtgagcactcctcgatctgaaaaggtggcaaaggcatggctgcttgcagaggtacgggcagacgttggatgtggcttggagtatcaggatggtatacaaggctcctggcagggaatgcaggtgggcaccagaaaccagaaaagaaagggaagtgggaaaagactgggagccatttctccccacactgccatattccagctgtgtttccaggtattctaaggagtctagggattctgaagatgaacctggccttctacatcattatgagggtctatttgtcaatgtaggaaaacagactatattttactttacaatttgttgcttgatttataactaaaatatttaaacatacggtgtgctggactccatttgtactcttacccagggcctgcaaatgttaggagctggcctgaccaagggaataaagattacgaaaatgttcaccttattttattttattttatttttttgagacagcgtctcgctctgtcgcccaggctggaaagcagtggcacaatctcggctcactgccacctccgcctcctgggttccagcgattctcctgcctcagcctcccgagtagctgggattacaggcgcccaccaccacgcccggctactttttttgtatttttagtagagacggggtttcaccctgttggccaggctggtctccaactcctgatcgcaggtgatccgcccacctcggctcccaaagtgttgggattacaggcgtaagccacagcaccggccgaccttattttgtggttatagagggtacattttataaaattactgccacggagtgggtaaggctccttttcttcaagccgcacagaacgaatgttcagcggtgcaatttcattgcaatctatttttgcttcactttgctcataatgactcttttaggatttcctcaggtaacaatcttctttcaatgttcaataatccaagcagaacattttctcacttcatccgcctcccatgctaggttcacactgtgaaattggcttatctctgacctaaccacttccttcaccagacatagagctggtgtagctcaagggaaagaggcacggcgctgggaaatgattaggccccaccgtcccaagcaagagctcaggggagttctgaggctggagagaccattcgggatatcaccccgggttcctgagaacctgagatctgcggggaggcgtcaggcatccggaaacgcccgagtctggggagacggaccccctcagactttcctctaggagactctacaggtaaaggggagtcctgggactcgaggggagccccggcatccaaaggtaagatcagttttgctcacctggccgggcggcgttgcgtcgccttggtaaccacaacttccggcttgaaccggaagtccgcgaagttgctctacagaaagtgtgcccgccccctctggggcggagagactcagcccctccccctcagcggataacctgggactgaccgttccctggggatccgacgggccccagaggacccacgcctgagccccgtgcgactcgtggcctttgggctagaagccatggacgccttcacccgcttcaccaaccagacccagggccgggaccgactcttca

SEQ ID NO: 14663 - DNA, 2300 bp, Homo sapien
tgatctcacacctcagttcttctctttttttcagtcttttttattccttcgtttcattttgtttctattgctgtgtcttcaagttcactaatcttttcttctggccatctaatttttcctctgaaatcttcatgttaatctaatctgatgtatttttcatctcagaccttgtagctgtgtctctaaaagctcaatatggatttagaaagatatagatataacagttacagctttataactttgtggaaaaagttataactgttttgtctgctaattctaatatctttattgactctggttcagctttagttgatcgatttttctctttattatggcttatattttcttgcctttctatagcccaagtaatttctttattggatcctagacattgggaattttactccattgaatgctggatatttttacattcctctaaatattcttgagctttgttctgggatgcagtatgttacttagaaatagtttgattatctaacttctaagatttgatgggtgacaacagaggagcatttattctagggctaatttttcccacgaccgaggcaagatttttcagactactctacataatccctgtgaattatgaggctttccagtcttgctggtggaaacaggcattattcttggccctctgtgagctcagcttactctccccactaattacttcaggtggttcttcccccagtgtcagctagtgtcctcatactcacacattgaaagcatcacagatgtactccagccggtaaaaaaagatgacagtggcagcagggcttttatgagacttcatggaccctaggcactcacacagtccaagaccctactccactatatattaagcaccttaaaatttatctcatgttctacattaaatatttttttaaaaactgtaacatatgaaagcctttttataatgtacacaatattgagggtttttttttttttttttttttgaggcaaggtctcactctgtcatctagggtagaatgcagtggcacaatcttagctcactgcaacctcaaactcctgggctcaagaaattctcccaccccaccctcccaagtagctacagatgcatactgccatgcccagctaatttttaaattttttgtatagatgggatcttgctatgttgcccaagctagtctcaaactcctggcctcaagcaatcctcccaccttggcctcctgaagtgctgggattatgggcatgaaccaccccacaggccctacaattttgaattttctgaagtaaagattacttgttctcttcttgtagacatgaactttatttgtatacatatacagactttatatatttataagttgatgtatgcatatatatgtgtgtgtacacacacacacacacacacacacacagagtggagctaataaattgtaaatatttttgtaaatatttaattatcatccacaggagcaataagtatttcattcctcaaatctgtggcacagatagaagtggaagtttatgggtcttattttggtcaattctttttttaatgtctcaaacatttctggaggctcttgaaaaatctcatgggccctgagcactgtgtctgcagaacttctgggcagcagcagcgggaaaggagaaaagggaacaaatcagacagtcgggattgggagtgcttgaactgcatctgatggggggtaaaggaaagaaagggaggagagtcgtggctcactgcccacctggcttgggcacagccatctgcagagagaaagagaatgaggagaaggcataagttgtaggagagagggtgaattgtatttgggacagaaagacatctgccctcctatcaacaagggtataaaattcctctttccttcttagtacacatcatctagggttggcctggaaaatacctgcctcctctaatgtccttactaatatgaagagcatatcctaagaatgtggtaatagtcctctggtaattaaggaaaatgccagtctgtggaataagcagtccctataggctattgtgctagaaaaggatgatgtgctatcttctcattgcttcctttcttccagaattcctttgtttacttctcttatcagcttttcagtttcatagaggttcccagtgccaccttctgtgatgtcattcccaagaggaagtcagacccagaaaataaagcaccccattggtacacgaaagggaccattggaggtgccacccccaacagagaaggactggcctaaagacgatgaacaggatcatgtcctcgtggatccagatgaggagctggattccttgc

SEQ ID NO: 14664 - DNA, 2300 bp, Homo sapien
tcaaagaaaatctgccttggatccttctgagtactgaacatttgaagagttcttctttcgtgatatccagtaaattagaactgtccttcctggcaagctcaagttgtgcttcaggaaatttggcaggatctgccaggttcccacgattctttgcattggtggaatatggtaccagtgcttcagaaggaagcattctttttggaatgggttgtctccaaaaagaatggaacaggtttggatagaatttccagacttcttggatcctgtaaggctgtagtgacaccaccaccatttttttcaattgcagcaatagctagttctgaagccaactgtacttcaatattaacttttttttttttttttttttttttggacagggggtctcactctgtcatcagactggagtgcagtggcatgatctcagctcactgcaacctccacctcccgggttcaagtgattctcctacctcagcctcccaagtagctgggactacaggcacgtgccaccatgcctggctaatttttgcatttttaataagacggggtttcaccacggtggccagggtggtctcaatctcctgacctcatgatccaccccccttggcctgccaaagtgctgggattacaggtgtgagccaccgcgcccggcccaatattaactttcacctgaaaggtgtctgcggccttttcgaccagctgaacaccataatcctctttaagtggctgaatggtcacacctcttccattgacaagctgggttaagtcaataggttgagtaggatcaacacgacccaaatcagtaacatattacagtctattgatacttaaaggttgatactggtgtctgaagctaagtccttcattaaatctgtattttgggattccgatgtaaaatagagtctggccatccccaaagcccagcagagccagtttcctctctgcctttctcttttatggcctctgccgcattttctacctcttctccgaccttttggtcgtctcatgggtttcctggagccaggattccgctttaaattggtcaggctcatgcgcagcagggcccagagctgccataacctgcgaaaagagttttatttcttcctttctgacctgtatgtcttttgtttcctaattgcatagcctagatcctccatctggtacaatgttgaataggagtggtaagagagacaccctcgctttgttcctgcaatcggggggtggggggaagatttcagtctttcactactcagtatgaggctacctgtaggttctttgtaggagcctttcatcaggttgatgaaattcctctctattcttagtttgctgagaattttcatcacgaagggtgttggattttgtcaaatgcctttgctgcgtcatttccactcacatttcattgggaaaacctgttatacctgtccaatagcggcagaacatcaggtaaaggccagtggtgacagctgtggcaacaggccaagctccagaccttgccaggctagaggtggcctggggttggagcaggcttaaccccctccctctgctcagaaggtccagcatcctgaccagactcggcagcttattgaatttgccggggtgcaagcttccttgcactgtccacatgttcttaccagggaagggtctacccagggccatcctgcctcaaaggagaagtggtttactgttttctccacctttagagggaatgagggtccctgctcctggtccttactctactccactgtccaattggcgcatgccctgaggctctcattatacaaattggaagctaaggtgcaaaagaactaagaatttgcataaggtccccaacaggtgaaggcaggccccaaacctaggatctagatttcgtttttctgaccccgcttcctttaacctgcagggctggcccaacgccccgggcttcacccaacactgggcgcaggcgggaaggccgagaggctgggtcgggcgcccaagcgagggcccaggtggggcgaaacaggcgcagtcaaggggctggcaccttggccccccgccgtggattcaaagggtcaggctccgccccctccaagccccgagcccactttgatgtgctgatgcggcctggaaggggccacttcacacctcgggctcggcataaagcggccgccggccgccggcccccagacgcgccgccgctgccatggcccagcccctgtgcccgccgctctccgagtcctggatgctctctgcggcctggggcccaactcggcggccgccgccctccgacaaggactgcggccgctccctcgtctcgtccccag

SEQ ID NO: 14665 - DNA, 2300 bp, Homo sapien
tctccgggcggcagggcccacacgctctcccactggggtgaggccttcacacctctggggcctgtgttttgacaagtgccggagctagtggcctctgctcccctggcccgagcctaccctctgccaaacgtgtaaggctgggaaatgaggccttggggcagccccacaggagcagaggtgacagagcaagctgaggccagcatggggggcaggctggacagggcagcaccctctcaggctcaggcctggacctcagcctccccactctacccagcccgcttctcacgccaaacctgggtcctgggcactgcccggcccccctcccagccccaaggccctcatttcccagccagtccctctgacataggagtactaatcagaggtgctatgtaaatcgtccccttgcagaccctaatcctgtccctgccggagccagaggccccaggagaaggaagcggctctcctactgccagcctacttagcatctcctgggaagctcctaatttgggtgtcccccacagccaaggatcttcccgccacacctctgcagcaaccctctcaggggagagattgttagtagtgaagcctccgccttcagacagcccaggacactcctctggagtctggccaatgtgggcatgaggccctgccttgccatgcactacctgtgccacttgggcacctcgctctccatctctggcctcagtgtcttgtctgttgctgtgccacagggtaattcctgccttctgggctgagcatgtgcggatcaactcaggctgcatggagcgtgcgtgcacactactgtcccccgaggtctggcactgggctggagctttgcagggtcgctgctcacactcacaacacactttgatgtgggtgtagtggcccccactttgtagatgaggaaacagaggctcagagagattgtcccacctaacagggtgagcaggggctgagctggcatccatctgtctctgtcagaggccaaagcctctgttctgtcctccctatatctcccatgtctccttcggaggatgagtggctccttccatcctggagggaggtcctaagagtgaaggggttggggacccctccggtcacattaagccttgcttcacatcacagagactgagaagaaaaagaggccgggcacagtagctcacgcctgtaatccccacactttgtgaggctgaggtgggtggatcacctgaggccaggagttcgagaccagcctggtcaacatggagaaaccccatctctataaaaatacaaaaaattagccaggcacggtggtgggtgcctgtaatcccagctactcgggaggctgaggcaggagaattgcttgaacctgggaggtggaggctgcagtgagccgagatcacacccctgcactccaacctgggcaacaagagtgaaactgtctcaaaaaaaacaaacaaacaaagaaaaggaagaagaagaataaagaagaagaagaaagatggaagaaggaagaggaagaagaagaaaagaagaagaagaagagagaagagagaagaaagaagaaagaagagagaagaagaaagaagaagaagagcttgcaggccccatctggacttcatggaccagatccctggaggatgcagcctgaggataaaaaataaaatctccctgaaattatgcagcggtgccccacggtgaacaccccaccccaatcaaaaggtgggaaaggccctggggagcacccagcccctgtgggtctcagatcgtgaggcctggaggccatgcttgggctgaagcccagagaagtcagagggcccagcaaggcgggctcaccttcccccacctgtgcttcctttcctatcagcctcccgctgaggctccgcagctcccagggcagccccttccaaggacgatcactccctcccctcacaccttcagctctcggagccactgagctggcaagccatatggaatagattattctagacccacaataatctgattatctggctacagatcagctgggtgctcagccagtggaagtcgcaggcagcccaggggtgacgaggagggagggggtgggagagagagacttggcagattccaggaaaggctcaagaggaagtgccgcgtcttggtgggtctggagctggctgacaatgcagggtaagcagatagcacgtctctcctaagggacgtagcatttatgctccttcactttctccagggaagtgccaatgggtctcagccttagagtgaaaagtggggaaacttgaggtataaagagaggaggcacacttgtcacacaatgccacctg

SEQ ID NO: 14666 - DNA, 2300 bp, Homo sapien
gaagccttcctgcaagctcaggggtggcaggggtggcaggggtggcagacgagtgaggccctcagggagcagagctgagggagcaggaaggcatgtggggccctgacatgctggggcctggcacgagtccggcctgcctgccatgcttggagaagggctcagaagaggcaggcacttcttctgggggcaggtgtggggtggggacaagctgggagacagaggccagaaagactttggtaaggagtttctcctggactgactcattcattcatttactcaatccttcgtgcatgtgcgcatccactcaacatctcagtaatgaggacctactgtgtgccaggcactgtgctaagtgctggtgaggccctgctgtcatggggcctgcagtccaggactcaagttatcaccacacagatcaaagggaaaaccacgctgagttctggggctttgcagaacaggtctgtggagctaatggagctcataggagcttgacttggtcagggaggtcagggcggcttcgctgcggaagacttgtaggatggaaaggaattaaccaaggcaatagggaagagaagatccaggcagagggaacaggttgtgccaaggccctggggcttgatgaaggccagagtggctggggtactgcaacaggggggaagaggccaggaaatgggcaggctgactgtacccgggcttgtgggtgcctttagaaggtctggtctggactctacaagcaaaaggaaggttttttttagcagtggcataaaatgatccaatttgtgttgagcaggttcaagcaggcccgaatggaggcagggagtccataggggcgctgctgtgtccacataaatgatgagaatggttttgaccaagtgcatcttgcgatgggggaatgtgggtgaattggatgtggagtgaggtcaggcggtgtcgaggtctgagaaactgggctggtggatggggaaagtgacaatgaacataattttcctgtaaggtgtgtattttattttgtatggtaagtaatatcttcatttctaccaaggatagaaagaggcaattgttgagctttgggtaagaaagaagggaacgatttttttcttttttcttttgagtctcactctgtcacccaggctggagtgcagtggtgcgatctcagctcactgcaatctctgcctcccggattcaagcaattctctgcctcagcctcccaagtagctgggattacagacgcccgccaccacgcccaactaattttttttgtatttttagtagagacggggtttcgccatgttggccaggctggtcttgaactcctaacctcgtgatccacccacctcggccttccaaagtgctaggattacaggcgtgagccaccacgcccagccgggaatgatttttaatcattctactatttggtgtttaatatgttttctcactaaatctgttcaacaaacctgagaggcaaatactgttatttatttatgaggagagaggttcagaagggtaaagttacctgctcaaggtcacagctggaaagaggtgaagccttcagcaaaaaaagcaaaacaactcatttcattttattccgtgagctgataatggaggaaaaagtatttggcaagaagcggcagggaggggaacctggaggaactccctgctcttgaagaatgcaagggaggctgggaccttgtcactgaggagcccctggcatccttccagagatgcaaccaaaggggtgaccccagtgtgttcttaataggagccgggaaccccttctctgtgcacctcccacctcttgcccctgggaagtccttccctgactctaacctcagttctgatgctgttcccaccctctcagctctcaagcagatcaatgcaatgccacctggccgcttgctttgcccactgggcctacagccggaagcctgcccttcagccctcgggcctgatcccaggccgcctgcagcctgtaaccagacactgtttgcttccagcaggcaccccccgagcccagctccacacaccgttcctggatctcctctccccaggcggagcgtgcccctgcccagtccagtgaccttcgcctgttggagccctggttaatttttgcccagtctgcctgttgtggggctcctcccctttggggatataagcccggcctggggctgctccgttctctgcctggcctgaggctccctgagccgcctccccaccatcaccatggccaagggcttctatatttccaagtccctgggcatcctggggatcctcctgggcgtggcagccgtgtgcacaatcat

SEQ ID NO: 14667 - DNA, 2300 bp, Homo sapien
tcaccaggttgcccaggctggccttgaattcccgacctcaagtgatccacctgccttacaggcatgagccaccacgcccagcctcttcaggctaaatttctgaaagtgatcttcattcctaaccccaaactgccctccagaaagctgggttgcacttctgccacagcaggatctttactcctcttaaaatctccgcggagcctgggtgggagaggcagagctccggggggaagattctctcctggcctgatgtagtgttttccttggcttgtcagacatggaggagattatgccagatatgatagtggagagagtcagacatgcatgagactggagagagaaaaaaaacaaaatagcctctgaggtctcactcacagcctacttactcttactttacacacaattctatattccgatatgtttgtgacctggtttttaagagtacagagcaaattaggaaggagaagcaaggctgctacctagaggtaccctggtcctccatgaagtttccaaaagaagagcaagtgcaagtaaaataataaaacacagccagtcacaaagccatcaatttggaccatgcagtgcaaggctttaactgtcccaaggattccaatcatggataaggaagagcttaaatttgattataaatctgaaagtctggaagtcagcttgaatattgtggtagacataatcatatcctcctcctcaaaagatgccctggttctaatgcccagaatctgtgaatatgttatgctaccccacgaagggaaattacagttgcaggtggaattcaagttgccaatccattgatttaaaatagaaagattaccctggattatctgggtaggcccgatgtaatcacaaagatgctcaccagtggaagcaagaggcagaacagttggtgtcagagtgacagattgtgagagactggtgggccactgctggctttgaagatggatggggccaccagccaaggaatgtgggcagcttctagaagccagaaaagccaaagaaacaggttcccttccagcctcaagaaagctgtatccctcaacccccttgcttttagtccagcgagacccattttggacttctgattttacaaaacttgtaagatagtaaattagtgttgttttatgtttgtgttacggcagccacagggaaccaatacaaatattatctggtaccgcccattaaagctgctcagagacagggagccccaccctggcggggctccggtggctgcacaacctctgcaagcaggatcaagatgagaggcgcaggccaggtgtggtggctcactcctgtaatctcagcactttgggaggccaaggcgggcggatcacttgaggtcaggagttcgagacgagccttacatggtgaaaccctgtctctactaaaactccaaaaattaaccaggcgtggtggcgtgcacctgtagtcccagctactcgggaggctgaggcaggagaatcgcttgaacccaggaggaggaagttgcagtgagcggagaaagtgccactgcactccagcgtgagcgacagagcgagactctgtctcaaaaacaaataaaggaaaaagaaaaaaatgagaagcgcgtgttcccgactccggtgctttttcgcaaggtcgtgctactgcgccttctgaactacgagtcccaggtaccaagaaagttgaattgcgtgctgtggcgggtccgttatctgcaccacccgtctgcacgggatgcgctggcttcctgccccggatgcacaaggctccctgcgggacactcagggcgaggctctgagcccctcccccgcggcagatgccgtccagatgtggccggcgggtcccgcgggctgcggcgacagggaccccgtcgggggcagcaggagccctggtgcatcccaggccccggggggaaggccgggccgtcggaggagcggaggagccctggggggctcccgggaagccgcgggcggacgggggaggagcccgggcggagctgcgggcgggcggcccgctaggggtgaatcgggtggagtagtggtcgggtccggttacttccctttaaaaagacgggaaaggaggagtccagtgctggaggggcagggacggcggcggcgcagctcggaacccgccagggtccagggtccaggttccagcgcccggcggcccaggcaagtggggcgggagggcgggggctgcgggcgcgggtaggggtcgtggggcagttgggtgcgcgggaaccgagggagctgcagacccagcgcttggcgcgtgcggagctggacttctgcggccgcgacgcccct

SEQ ID NO: 14668 - DNA, 2300 bp, Homo sapien
gaggccaaggcgggaggatggcttgaggtaaggagttagagaccagcctgtgcaacatagtgagaccttattctactaaaaaaataaaactagccaggagtggtggttgcgtgcctgtggttccagctacctaggaggctgaggtgagaggatcacttgaccccggggcttcgaggctgcagtgagccatgatcacaccactgcactccagcctgagccacagtgtgagacccccatctcacaaaaaaaggaaagcctagtattctatacaaccttaacctattttttttttttttttttttgagacggagtcttgctgtgttgcccaggctggagtgtagtggtgcgatcttggctcactgcaagctctgcctcccgggttcatgccattctcctgccgcagcctcctgagtagctgggactacaggtgtccactaccacggctggccaattttttgtatttttagtagagatgggttttcactgtgttagctaggatggtctcgatctcctgacctcgtgatctgcccgcctcggcctcccaaagtgctgggattacaggcgtgagccaccgcacctggccaaccttaacctatttttaaaaaagatgtttatggctttgctgatagcaggctggaaagctagctgaatttgcaggcaacctcaagtagttaatgaaaaattattgtggcttgtccaaagggattgagttttccaaataaaaaagtgggcttcagttttatgtcattgtaagaggccatgtgagggatgtttggatgctcgctttgaatctgtaggaccactcaatgattttttaaaaccattggtttctggcaggcaaaacattcaaaatctaggctatcccaggaaatctagcataagggctgtcctgcagtaatgcattaaaccacgtaacaaacgaactcaagaagagggatgtggctctggatttgtgaccctcaacataacatttaccaccttgggcttcggcttcaacatcagttaaatggagggacacagacgactctttggctcttatactctatgacatgatcactggccaccttagaaaatcaagcctatttagaccacggtttgtgagaagtcagactctctgaggctcagtttccttatctataaaaaagaagatgataacattgggagaagccatcttaagcagcgaggaaagaaaaggacagtggagtcaagtgaacagtctcagatctcagccccgtgtaatctaagggaaggttactggagctgggtctactttcgtcatctgcaaaatggggataagaatgcctgttgtaaggacagttgaatgatcttgctcatgccaacttacagaaggtacgaaataaacgccgatctcctttattctgatctcacattcagcaaatgtgagagaaatgtgaatgtactgaaatgtctgccagaaaaaagaaaatccaacccctcaaaagaatgacatcaggggttttgatatctattcacctacacttccctcttccacaggaagcggcccaccttctgacccacactgcccatctctgtgcttatcatggagctttcaagagtgaggatcggaggctgtattgagcagtgggcacaaaccacagggagcgctgttcaaaaatggaaaacaaggtggccctgacaccgggtgctgctgggcaccctctcagacctgccctgcaacagcatcaggaggctgagggtccccagccagaaggcccaagaggggcccaggctggaaactttactgcgaagcagccctcatcttaaggtggctcaacaccacacctgagatctagcccatgcgacagtatggaagcaggaggccctactccaccacagaaagaacatttatgggcgcctaagccctgggagaatggcacctgagggaacagagcgtgcccacaagcagaccttggggagggagaagaggcagccctgctcctagtcgcagccagcgtgcgtcatgtccaggccccacaagggtgaccctggctcaggttctcatgctccagaagctggcccaggtggcagtgggttccctatggaggcagctcatcattcacaacacagcaacaaaccttctgctctcatgaggagaatgtattttaaacttgggaagagtcataattctgggatgtttcacatgttgtcagctttaaccttctacagacacaggccctctcctctgtgaggagggacctctggcatgtgtgggtgtgtggtgggtccctctccctattagcagaaatgtgttgggcatgagccaggtttatgatttggat

SEQ ID NO: 14669 - DNA, 2300 bp, Homo sapien
agaatatgcttcccgcattgtcctagtcccagttgtattctcacaggtgttatgtgcaggacacaatccaaatcataaacctggctcatgcccaacacatttctgctaatagggagagggacccaccacacacccacacatgccagaggtccctcctcacagaggagagggcctgtgtctgtagaaggttaaagctgacaacatgtgaaacatcccagaattatgactcttcccaagtttaaaatacattctcctcatgagagcagaaggtttgttgctgtgttgtgaatgatgagctgcctccatagggaacccactgccacctgggccagcttctggagcatgagaacctgagccagggtcacccttgtggggcctggacatgacgcacgctggctgcgactaggagcagggctgcctcttctccctccccaaggtctgcttgtgggcacgctctgttccctcaggtgccattctcccagggcttaggcgcccataaatgttctttctgtggtggagtagggcctcctgcttccatactgtcgcatgggctagatctcaggtgtggtgttgagccaccttaagatgagggctgcttcgcagtaaagtttccagcctgggcccctcttgggccttctggctggggaccctcagcctcctgatgctgttgcagggcaggtctgagagggtgcccagcagcacccggtgtcagggccaccttgttttccatttttgaacagcgctccctgtggtttgtgcccactgctcaatacagcctccgatcctcactcttgaaagctccatgataagcacagagatgggcagtgtgggtcagaaggtgggccgcttcctgtggaagagggaagtgtaggtgaatagatatcaaaacccctgatgtcattcttttgaggggttggattttcttttttctggcagacatttcagtacattcacatttctctcacatttgctgaatgtgagatcagaataaaggagatcggcgtttatttcgtaccttctgtaagttggcatgagcaagatcattcaactgtccttacaacaggcattcttatccccattttgcagatgacgaaagtagacccagctccagtaaccttcccttagattacacggggctgagatctgagactgttcacttgactccactgtccttttctttcctcgctgcttaagatggcttctcccaatgttatcatcttcttttttatagataaggaaactgagcctcagagagtctgacttctcacaaaccgtggtctaaataggcttgattttctaaggtggccagtgatcatgtcatagagtataagagccaaagagtcgtctgtgtccctccatttaactgatgttgaagccgaagcccaaggtggtaaatgttatgttgagggtcacaaatccagagccacatccctcttcttgagttcgtttgttacgtggtttaatgcattactgcaggacagcccttatgctagatttcctgggatagcctagattttgaatgttttgcctgccagaaaccaatggttttaaaaaatcattgagtggtcctacagattcaaagcgagcatccaaacatccctcacatggcctcttacaatgacataaaactgaagcccacttttttatttggaaaactcaatccctttggacaagccacaataatttttcattaactacttgaggttgcctgcaaattcagctagctttccagcctgctatcagcaaagccataaacatcttttttaaaaataggttaaggttggccaggtgcggtggctcacgcctgtaatcccagcactttgggaggccgaggcgggcagatcacgaggtcaggagatcgagaccatcctagctaacacagtgaaaacccatctctactaaaaatacaaaaaattggccagccgtggtagtggacacctgtagtcccagctactcaggaggctgcggcaggagaatggcatgaacccgggaggcagagcttgcagtgagccaagatcgcaccactacactccagcctgggcaacacagcaagactccgtctcaaaaaaaaaaaaaaaaaaaataggttaaggttgtatagaatactaggctttcctttttttgtgagatgggggtctcacactgtggctcaggctggagtgcagtggtgtgatcatggctcactgcagcctcgaagccccggggtcaagtgatcctctcacctcagcctcctaggtagctggaaccacaggcacgcaaccaccactcctggctagttttatttttttagtagaataagg

SEQ ID NO: 14670 - DNA, 2300 bp, Homo sapien
ggccaatgtggtgaaaccccatctctactaaaaatacaaaaatttgctgggcatggtggcatgtgcctgtaatcccagctactggggaggctgaagcaggagaattgtttgaacccgggagacggaggttgcagtgagccaagattgtgccactgcactccagcctgggcaacagagtgagactccatctcaaacaaacaaacaaacaaacaaacaaaaaactggactaggcgtggtggcggtttgggagactgaggctggaggattgcctgaggccagcagtttgaggttacagtgaggtatgactgtgccactgcactccaacctgggtaagaccctatctctgaaaaacaaacaagcaaaccccagaactctggctgcaaaagtagtacatatttctttgaaggaaaaaaaggaaaacttgataatcctaccacccaaagatgtttttaaatcacttatgtggtactcagttatgtgccatgcactgtccaagtgcttacaaatattatactaactccctttgtgtttataacaactgtctgaagtcagtagactcattttccagttttccagtttaggaaactgatattacaccttttctacagatggggaaacttgcccagggtgcccaggcagtccgcagaaccatgctttgaatcagggcagtgtggttccagggtcctgtacagatcaaacaccctgactctgccattccatcagatacatgattcatattttggtgtatttgcctccaatcttgagcaaagtgggttgtccctgtacatactttgtgtaatcttttagcttaacaggtgtcatgaacacttccgtatcataaatctttcccagcatgatttttattatctatttaatatttctcatattcaatgtagaacaatgcacttaaccaatttctcatttttgtaataattttcttcccattttcccctgtaataacactgctgagatatatatttttttcttcttttttttactgttctgaagatactctggcagaaatgtatgttcctcaggctaaatcttttcacacatccacaatcattttatcataaattctagagctggaaacgctgagtctaatgttttatatatatatatatatatgttatatatctgtcacccaggctggagtgcagtgtggtgtgatctcagctcactgcaacctccgcctcccgggttcaagccattctcctgcctcagtctcccaagtatctgggactacaggcgcgcgccaccacaaccggctaatttttgtaattttagtagaggcggggtttcaccttgttggccaggctggtctcgaactgctgacctcaagtgagccgcccgcctcggcctcccaaagtgctgggattacaggcgtgagccaccgcgcccggactgttatatattttaaaggcttctgatccatatcgccaaacagtcctctggatcgatttgcatctgtatccgctgctccatctgcagtatacggacatgctccacttcacccacactgggtcattaaaagaacaaacaaaaataagaacttgatcgatttgggattttaaatggaaatgcactaaaaattccttaattccaccattcaccgtctaccatagaggaacagcccatctgcacggagagacagctacgtaattcactgcagcattataatactgaaaaattaaaatgaacgaaatgttccataaccgacgaacggccgaatgaccggcgtctccactccgcggaacgttctgcgagcgctaaggggatggcgggagtgcatgatttggagcgggcggtgagaaaagcaagctcccgccgcctctccgttttggcaacccggctgacggtcgtttcggcttctggggccagccgtcggtctgggcgagggacatagatccggattcgcatcctgactggccaaccaacgctggccgaggtgaccactctcctcggcatccgcacctgccctccaaggcgtcagagaggccggacccttgggtgctagggctcgtgagcgccggggccaagtttccgagtgccgctctcagcagcgcaccaaccggaagtgatcgtgttgtggcggaaggaggagctttctgggagtagccggtgctgagagaaccgtggctggcaaagatgattcaggcgattctggttttcaacaaccatgggaagccacggctagtccgcttctaccagcgtttcgtgagtgcggcccggcttcaccacgccccttcagggcgcccactatgtcttccctcctctttggcctctcggcgcccgggggc

SEQ ID NO: 14671 - DNA, 2300 bp, Homo sapien
gggaacgtgacacagaaaagggaaagaggaggaggacatgccagccaggtggctgtgagcagctggagggttttgagcagagagggccaaaggacagttctacccagaggggctttccagtagggcttttctatgtttttccttctcagacatacaccgggcagccaggtaggccagctaggagtggggctgactcatccattaggcccatcatacttttagcggtccacaaaatgtttttattcttttaaaatttaaatttaatttcattaattttttttaatagacagggtttcgctatgttgcctaggctggactcaaactcctgggctcaagtgatcctcccacttcagcctcctgagtagctgggactacaggtgctctttcttcctaaaaatatgtttagtaatggatgattggatgcagaaaaaaaaatatatgtttaggttgaagaaaacactttagactgggagcagtggctcaggcctgtaatcctagcactttgggaggcagaggcaggtggtgacatgaagtcaggagcttgagaccagcctggccaacatggtgaaaccccatctctactaaaaatacaaaaattagtcgggtgtggtggtgagtgcctgtaatcccagctactcaggaggctgaggcaggagaatcactagaacctgggaggcagaggttacagtgagccaagattcaccactgcactccagcctgggcaacataggaagactgtctcaaaaaaaaaaaaaaaaaaatatatatatatatatataattcatatattcatctttatgccaacccagtggtaagataataattttttaaaaaatttttaatggagaaagggtcctttgaaaacaaaagtgcctaggacccaagaaagtcattgtctgtgtgtgtgtgtgtgtgtgtgtgtgtgtgtgtgtgtgtgtagcagggaagggagagggtgctttcttcttccaacattgacagctcatgctagactcctaggcacctgcctggccaccaccccctttaaatgccgccccctctcccggggtacacctggcctccctgaatgggcccacctgccccgaggcctggcacgaagaagccaaacaaaagaacaaagattcctcaacaatcccagggtcagaagaatcttctgtaccaggcttggaaaatgcacctgcggactatgacatacttgggcaaagggcattgtggggccagggaggagttcaggagctgtgcaggaagaaggagggagggcaatgctatgttgtagaaagggtgagctcattaaactttacaatccccctgatactgaccccattttacagacgaagaagcatgggctcagagaggttgaggagcttgcccaagctcacagctgggattcaaacttaggcgtctttggtccgacacccatgccccagctccctcgtcacagatccctgggatacctgactcagccattgtagggccgcgggcggggcataatggacagcttctaagctgaccacccaatcctccccagtggctgttctccattcctgcttcccagaaacccatccttcccgggctgatcctacaaaggatcttctataataggatcttggggcctcaatttcccttttgtgcgtgtgctggggcagggatcttcctctaggaatgaggaagagagagagacaagagaaaagcatggcctttctgccccactgtgctaagcccccagccagggtcctcccggaagcccaactcctgccgcgcgcggcctggcgtgcaggaatggagctcggtccctttaaatcccgccgaggaacgcctgagggccgggccgcgccattcccggatccgccggctgggaatcgcgggtccccgcgcgtcctgcagcacttcccgcgccgcgcccccagcccagtgcgccggctctgtgccggggtgcccgggcggtcgggagaatgagccgcatctaccacgacggcgcgctccggaacaaggcggtgcagagcgtccggctgccaggggcctgggaccccgccgcccaccaggggtaggcctgggctcacggcctcgggtcggcctcccctgccccggctcgaaccccgcaacaggatcgggtgggggggtgggatgcgggtgggggaaaactggggttgccaaagccgcctctccgccttcagtccgcccctccagtccgccgctcccggcgcccctgccgccgcgcccgcccagcgaccccatgacacagatcggcttaaagctccccgcctgtccgcctgccctcgagagagggtcccgacccccag

SEQ ID NO: 14672 - DNA, 2300 bp, Homo sapien
ataagcagatgactcttcctgagaggatttagagcagccctgtccaatacaactttctgcaacaaagaaatgttctgtgtcttgtagtcgctaaacacacgttgctattgagcacttaaaaatgtggctagtgaaagtgaggaattgagttttacatttaatttaggtttaatcagttagaatcgaaatttaagtagccacatgtggctagtggctaccatggatggctgtgcagttggagccacagtgagggggaacgtgacacagaaaagggaaagaggaggaggacatgccagccaggtggctgtgagcagctggagggttttgagcagagagggccaaaggacagttctacccagaggggctttccagtagggcttttctatgtttttccttctcagacatacaccgggcagccaggtaggccagctaggagtggggctgactcatccattaggcccatcatacttttagcggtccacaaaatgtttttattcttttaaaatttaaatttaatttcattaattttttttaatagacagggtttcgctatgttgcctaggctggactcaaactcctgggctcaagtgatcctcccacttcagcctcctgagtagctgggactacaggtgctctttcttcctaaaaatatgtttagtaatggatgattggatgcagaaaaaaaaatatatgtttaggttgaagaaaacactttagactgggagcagtggctcaggcctgtaatcctagcactttgggaggcagaggcaggtggtgacatgaagtcaggagcttgagaccagcctggccaacatggtgaaaccccatctctactaaaaatacaaaaattagtcgggtgtggtggtgagtgcctgtaatcccagctactcaggaggctgaggcaggagaatcactagaacctgggaggcagaggttacagtgagccaagattcaccactgcactccagcctgggcaacataggaagactgtctcaaaaaaaaaaaaaaaaaaatatatatatatatatataattcatatattcatctttatgccaacccagtggtaagataataattttttaaaaaatttttaatggagaaagggtcctttgaaaacaaaagtgcctaggacccaagaaagtcattgtctgtgtgtgtgtgtgtgtgtgtgtgtgtgtgtgtgtgtgtgtagcagggaagggagagggtgctttcttcttccaacattgacagctcatgctagactcctaggcacctgcctggccaccaccccctttaaatgccgccccctctcccggggtacacctggcctccctgaatgggcccacctgccccgaggcctggcacgaagaagccaaacaaaagaacaaagattcctcaacaatcccagggtcagaagaatcttctgtaccaggcttggaaaatgcacctgcggactatgacatacttgggcaaagggcattgtggggccagggaggagttcaggagctgtgcaggaagaaggagggagggcaatgctatgttgtagaaagggtgagctcattaaactttacaatccccctgatactgaccccattttacagacgaagaagcatgggctcagagaggttgaggagcttgcccaagctcacagctgggattcaaacttaggcgtctttggtccgacacccatgccccagctccctcgtcacagatccctgggatacctgactcagccattgtagggccgcgggcggggcataatggacagcttctaagctgaccacccaatcctccccagtggctgttctccattcctgcttcccagaaacccatccttcccgggctgatcctacaaaggatcttctataataggatcttggggcctcaatttcccttttgtgcgtgtgctggggcagggatcttcctctaggaatgaggaagagagagagacaagagaaaagcatggcctttctgccccactgtgctaagcccccagccagggtcctcccggaagcccaactcctgccgcgcgcggcctggcgtgcaggaatggagctcggtccctttaaatcccgccgaggaacgcctgagggccgggccgcgccattcccggatccgccggctgggaatcgcgggtccccgcgcgtcctgcagcacttcccgcgccgcgcccccagcccagtgcgccggctctgtgccggggtgcccgggcggtcgggagaatgagccgcatctaccacgacggcgcgctccggaacaaggcggtgcagagcgtccggctgccaggggcctgggaccccgccgcccaccaggggtag

SEQ ID NO: 14673 - DNA, 2300 bp, Homo sapien
atgcttggctctaagagctgcattctgcttttttggaggatgcagcttgggtgtactaagtgggaggctgcaagtgatgacggaaatgtggtttcctgcagacctgggcaaaggccctggggtcattgggggctcagggtgctgatgttaaaagaccatggtgtccttcttgttgaaccaaactctcaggctactgtttcctcactcctcgtcagagacaaatgtgttctgagtgactggagtcatagctcagagcaccaggagctggtttagggtggggcgaggggccgtggccttggggctctcgtttctaaaggcccagggctcagggctggggggaggggtgaggagtggcaggtcgtgtccccgggaggctgcagtcactgggggagagacaatggggctcagcatctgctcctccctgggagaagggacccttcagtgaaaagccagggagagcagggaagtgtgggaggaattgatgaggagaaggggtggagccaaggagatgcagccgggaggaaggaagggaagggaaggaagggaagagggaggggagaggatccaggctttccttcctcccggtgacctggtcctgagccgcagcttcccttgcattgttccctgagtttgctctcggggcccaccgagacctcacgtttctccccctggctgcagccccagtccgagggcccggcatccagcaggtgctcaatacttacttgggaaaatgacaaatgtgaccaactttgctttgggaactttcccccgtcttctccccactcctccggagaacccgaggacagagcaggtcttgggagcacgcccgggcgccccatgaataattgacccttcctggcggcactgcccggctctgtccgagggctccggacccgccctgcgttgcagtcgagaaacggctcggagtggcgggtgttctggaggttggaggcctggtgtccggcctgcgccggagctggagggcggcgaggctgtgccaaaccccgcggcccctcagggagccgagagggacctgacggccgcgctgccagcgaccacgcctcggcgccccccagcagtgcgccccggggccgaggcccaggccctgggctcggggaccccgccagcccgccgatcccagcagctgccctgagccccttctccacccgggccctggcgctcggagcccgcgccgctccctcgagtcaggccgtccagggctctgctaacagctgtttaaaggcttttgctgttcagtgctctgcggggatgtttgttccaggcccatctgcctactttaaaaatacataagtgaagcacacacacccagcttgccacctctggctggggaggggcgggctcggcggccctcgctcgcacttgggaaggaaccggcacccaggagccgcacccgtgccccaacacccgcaccggctctcctctccagaggacgcccctggcttcccttggggggggcggggcgcagggcccccgggccccctttgtaccggacagggccgggccccccatttccaagcgaggtctgcctcttccccgcttcagttaatctttgttccccttttctgctgagaggagaaaaaaaaaagagagagagagaaagaaagaaaagaaggaaaaaaggcgtgacttgattttcaaacgaaactcccacagcaaacaaaacccttttagagaaataagaaaggaggaagaaggaagaaaagagggaagaaaaaaacaggagaaagaaaacccttcaggctttcaattcgagtgggagagttgaaccgaaagaaagagaaagaaaggaagaaaaatcctctgcggtagaaagagaaaagaaaacttgggctgacaagagggaggtgttgggggtggaaggaagtgagaaaacaaaagagagataaaagggctgcttttctgtctctctcttcctctgcgagctggcttaggaggagctgttttgcatcccttcacgtcagccctgcctcattcccttcttccagggagggagagagcgcgagcgagagagcgagcgagaggaggggggagagagagaaagagaggagccggagggagggcggcaggagcaggcggcgggcgcgcgtggaggcgggcggcgggcgcacagcagcagcccgggcggtgggcagccaggagcccccggcccggcccggcccggcccgccgagggccccagcgcaggagccgcgcccggacccagggtgagtgtcccgcgcggccccccgccccagccccagccccagccccgcagccccgcgctgccggccggcgggggcg

SEQ ID NO: 14674 - DNA, 2300 bp, Homo sapien
tgagattggcctcagcacctagtttatttttttatattgtgtttctgccatacgttctcgttcatacagccgagccattaccaataatgacagttaacacctcaccgcacagtcccaaggtctgtgcaaattaattactttggcaacaaagccagtggggctacagtagaatgtgttagaatgtggcacatattacatttgagtaggtgggccttttaaaatcagtttttaaatagtggaatctttattttttgcatttttgaatccgatttttaaggatttttttttttttttttttttgagacagagtgtcactttgctgcccaggctggagtgcagtggcgcgatctcggctcactgcaacctccgcctcccaggttcaagtgattctcctgcctcagcctcctatagctgggattacaggtgccggccaccacgcccagctaattttgtatttttagtagagacaggatttcaccatgttggccaggctggtctcaaactcctgctgacctcaggtgatctgcccatcttggcttcccaaagtgctgggattacagatgtgagccaccatgcccggtctttttaaggaattcttgaaggacctgtagaacacaatttgagaacaattgaggaaatcccacctccctgttgtacagatgggaagactgaggccagcaagggggcagagcttaccccaggatctcccagggagatggaggagatggtcagatacacagcaggaatcactgctccctataataacaagtgtgccctgttcccaaggccaggagtagaaaagacatcagagccagacacacccaaaatcagccaagcccttgtctgtgctgtgtctgttgtctgtctgtgcaggagtgagccagcaatattaaccttcccttctccacccacagcgatgccctcctagctagccgtcacgggatggagggcttcatggactcagggacacagacggacgccgtggtggtgctgtccttggctcaggccgccgtgcttggcctggtctccgaaaatgagctctttggagctaccataagcgccgaggccttctacccggacctggggcccgagctttcaggggcagccatgggagagcccgagccaccaggccccgacgtctaccagctggcctgcaacgggagggccttggaggagccggcggaggaggaggtgctggaggtggaggcagcctgtgagaagcacacccggcggaagacgcggccacctgtgcggttggtgcccaaggtcaagttcgagaaggtggaggaggaggaacaggaggtctatgaggtttctgtgccaggtgacgacaaggacgcagggccagcagaagcccccgccgaggcggccagtggcggctgcgacgccctggtgcagagcagcgccgtcaagatgatcgacctcagcgccttcagccgcaagccccggacgctccggcatctgccccgaaccccgaggccggagctgaacgtggccccatatgaccctcacttcccggccccggcccgggatggcttccccgagcccagcatggcgctgcctgggccagaggccttgcccacagagtgtgggttcgagccaccccacctggcccccctgagtgaccccgaggcccccagcatggagtccccggagcctgtcaagccggaacagggcttcgtgtggcaggaggccagtgagttcgaggctgacacggcgggttcgaccgtggaacgccacaagaaggcccagctggatcggctggacatcaacgtgcagattgacgactcctatctggtggaggcgggcgaccgccagaagcgctggcagtgccgcatgtgcgagaagtcctacacgtccaagtacaacctggtgacgcacatcctgggccacaacggcatcaagccacactcgtgcccacactgcagcaagctcttcaagcagcccagccacctgcagacgcacctgctgacgcaccagggcacccggccccacaagtgccaggtatgccacaaggccttcacgcagaccagccacctcaagcgccacatgctgctgcactcggaggtcaagccctacagctgccacttctgcggccgcggcttcgcctaccccagcgagctcaaggcccacgaagtgaagcatgagagtggccgctgccatgtctgcgtcgagtgcggcctggacttctccaccctgacccagctcaagcgccacctggcctcccaccagggccccaccctctaccagtgcctcgagtgtgacaagtccttccactaccgcagccagttgcagaacca

SEQ ID NO: 14675 - DNA, 2300 bp, Homo sapien
tgttgcaatccactgtagggacactcacttccagaaagggatgtaggacaggggtcttctgggggctgggtgccccccagctgtcctgcaggccagggccagggccacgtgcacacctggcttgaggagcgcatgggagaccccgggaggtagaaggcagagtgccctgcctggcggtccgtcgacagggcggggaagggggcctggacaaggtagaggtgggcagtactggccagaggggagctcagacatccttagaggcaggagttggccgtgaaaaagacatggctcaagtggtctcttcttccagtgtcaggacccctgaagagctctgctgggcctggagagaccccgagggccggtgcccttgtgacctgtccccagtggccccacttctcccactccccacggaagcaggccagggagacccagatctgggcctcgcgtgttctccttcccttgctgggatgcctgggcctgtgctggctcacagccggggccagtagtacagtctccatttggtctaaaggtccctagtggtgcaaatgactcggggagggagggctcagaacagtggggcagtagcttgtttctcggctgcaggaggtgcagcctgcagcccatgggtctcacccccatgccctcgcccccggcccccgttaggggtggcccagcttgcgctatagcacattgtagtaggccatctctttcatggcctgttcagtgaggacactggcctcggcgctgctgtccacgctcgcatagctgtaggcgttctcctcgaagtcctccatctcctgctggccgtcgagctctgaagggtcagtgcctgtcagctccatcatggggtctgtaagagaggggcacagtcagacctggctgccatctctcgggaggagccagtcacccccacgcaggaagctgatggcctttctaaagagagggcttcccagtcacggcctccaggagtctcagctgcctctcagccttcccaccctcggacgcctcagggtcctgtggcttctagctgggtgaccagacctaggccccaaagctgagtgtgggggagtgggtgctatcagtgagggcctttgtggtggagaactgcaggcctggccttgaagccttctttgggtcattcttccattgacccgtcaaagtcactaagccctacttatcccttctctgcaatgtttctctggccacgggaagctgcctgcgtgacatcacctttgcagcactcattagcacctgctgcatgccagccacttcgcaggcctcgcctcatccagcaatcacaacagccccatttagcagctcagaaggctgaggtttagagaggtgaatcaacttgccaaaggtcacccagcacatgctgttgttctgagccactgtgctgctctgcctcacactgcgggagggtgaggcctcctgccggcagctgtgcttttctgttggttctagccattggtatccttgggcctggctctccagggacaaacactcagggtaggttcataaagatatgtcaggcaaaaactcctaagaggccccttataattttataaaattgaaatctcattataaagctcttacaggggaagcccagggtaggatctgggggaactgggaggctggcaggggctgtggctggcccccaaagtgcattctggccctgtccgctgagatgtgcgtgttttgggggaaacagaccccaggctgggggcagccctgacaggtctaaggcagactttctcaaccttggcacttagggccataattctttgttgtgaggctgtcctgtgcattgtaggatgtttgacagcatccctggcctctacccatgagatgccagtagcatcaccccagttgtgacaaccataaatgtctccaaacatggccaactgtcacctggaagacaaactcatgctcagttgagaaccactggtctaagagtaatcccatcccttcccaattagtggttcaggaataggcacgtgacccaatcctgttgaatgggtcatgaggaaaggcctgctagtaagttcttagcaccttctcattggtgtcagagagctaaggggagcaggctgtcactcttccactggatgtgaacaaggaagcacacaccctgacggccactggcagccatcttgtgaccatgaggatattcgcagctaatgctgtggacagaggaagcctcaccctgatgtcactgttggcaagctgaatcagccagctctgaagagggcctagactttgaaccatttcttttctcttctttttttttttttttttga

SEQ ID NO: 14676 - DNA, 2300 bp, Homo sapien
accatcaagagcaacctggacagagccctgggcaggcagtagggggaggcgccacccatggctgcagtggaggggccagggctgagccggcgggtcctcctgagcgcggcagagggtgagcctcacagcccctctctggaggcctttctaggggatgtttttttataagccagatgtttttaaaagcatatgtgtgtttcccctcatggtgacgtgaggcaggagcagtgcgttttacctcagccagtcagtatgttttgcatactgtaatttatattgcccttggaacacatggtgccatatttagctactaaaaagctcttcacaaaattgtctgctgtgtttgtccctgaggggaggaggtagtgggaccctgaggcagaggccctgctagagctggcaggttcccctggggcagaccagagcacctcaggaaggggctgccacggcagggaagggaccaggcagccctgggagcccgcattccacaggggcccactgcggagttctcggacactcagggcacaggcctgtgggttccctggaattttctagcatgatccagtttctgtgtccagttctccattctgagagtcaatcagttcctgataggttgtcattgatttttttcttcgttggttttaaccttctaaacatctccaggccactttcttagcctttttctaggtactaaaaagaggtcctacccacacctgcctcacacttctcctttccaaggctgcctgagtttggaggggcttgggtgtgtgtgaacaagggccctgcattgtctaggcctgcagttcccaggcttgggttcactttcaccatgcattggcaaaactagaaaagtaagcttgtgacaaattgttctcggccgggcacagtggcgcacgcctataatccctgtactttgggaggctgaggtgggtggatcacttgaggccaggagttcgagaccagcctggccaacatggtgaaaccccatctctactcaaaatacaaaaattagccaggcgtggtgatgcgcacctgcagtcccagctactcgggaggctgaggcaggaaaatggcttgaacctgggaggcagaggttgcagtgagccgagactgcaccactgcactccagcctgggtgacagagcaagactctgtctcaaaaaaaaaaaaaaaaaaaaaaaaaaaaaaattgctctatgcaagttttttagccccatgtaaaaaggaaaaataaaagttgctctaaagctacatataatcaaaaggactgtcctctgcatagtaagttctgcaaagcttcttctttttggtgttaaaatgtcctggagaagagttgtataatctttataaagtcctggccaggtgtggtggctcatgcctatagtcccagcactttgggaggccaaggtgggaggatcacttgagcccgggagtttgaggctgtagtgagctatgactgcaccactgtactccagcctgagtaacagagtgagaccccatctctcaaaaccccatcttacaaagtccctttcctaaatactggggggactcctatggctcctgaaacccgaccattgcggtagactgagtggctttggaagggctctagccctccatccacactggtgaccccccgcttgcttttcctgagtaatgccctgaaactctcagggctataagaagaaacgtggactgctggctctagcaggcccagcccctgggaggaagctcaaggcttcctgcctcttcttgcctgtcaccagcacggggctggcagctctgcagaacgcagcctctgaagcccagcctggcatcgggagctggcttctttcctgaagccatgtgggtgggtagggaggggaagcagcttttctctgcaagtggtgggaatacaggggccgtggcccacaccactctcttgggcccggggcagctggctataggcgcctggccctgcagggggccattccagtgcagaggatggtctcagcctcccccgggccctgggagagtgcagccctgctgtgtggggctgggaagttttgctgggagttcctgctgggagtgagggccaggtccccaagagctggggaaagaagcatttgcagtcacctcactaaagaatattcatttatttataattattgctaagtaaacttctcttttaaacaggaacataaaaacacagtagggctttgcacaagtggaatctctaaacagttggtttgtatacatgtcaaaataagttagaatggaatttgtccaggagtttccaagtcacccgagaggctgtgcacctct

SEQ ID NO: 14677 - DNA, 2300 bp, Homo sapien
agagaaaggggcaagtccttggtggggggagggggacagcaatttcattaccgccatttcagaggtggcagtatgggtggctgacatacgtaagtctgattgtttggaccagaaggatcttcaggggtccagtcttccagtttacaggtgtggacattgagatccaggcacctgataataccaggttggcaggaaagtcaaatgccagaggcttccatggtctctacttgtgtttggagcaacagaattctgaacagagtcaaagggataaggggtctttctggcacaagctggcccaagaccaggcctttgacagaggcctcagactctggggggcccaaaagcagccctcccttgggctcagccttctggatcccatggccagagtagtagttctgccggctaggacttggtgaggggagctttgaagtcactagttgaaggtcaccttcctggtccagctccacctggcaatgttgactgtgaggtagtggaggggagggctgagaacacagaagagaaaggttgctcctatttggagtgaattagcgtgactgggaaagcagagaagggaaagaggtcaggtttttccaaataaaacccagccctcagctggtgtcttagtttaagaaaacagatgaagagagaaactttgtttgtggcagaatcaattacaactgtcttttgtggccaggtgcagtggctcacacctgtaatcccagtgctttgcgaggccgaggcgggaggatcatttaagcttaggagctggagaccagcctgggcaacatagtgagatccccccatctctatttttaattaaaacaaacaaacaaacccatcttttatatgcaaacaggcaaaaatggaactgtttctactgtggctgtttgactactctagggtctcagaaaacaacaccccaaaatgcaggcctcaggagcagctctctctgaccctctccctccctcctgtctttggcccctcactctcctccgaggccagccatagaaactggaatccttcttcctcaaggcaggtcatagaaaccagagcccttctcccccaaagccagacatcgaacccaaaaatattactctttctcccacacatttctgggtaaaaactggccataaattatctgacctaccttgtttgcttgcaggtcctaagacccctccatcccagagagagtcctgccccgtactcagaaggaaggaatgctgcagagaaaggtcaagaagaatctacacggacaggacttgctgggtttccccactcaggttattggccttctggtccaatcatatttcttttttcgtggttttttttttttttttttgagacggagtctcactctgttgcccaggctggagtgcagtggcatgatctcagctcactgcaatctctgcctctcaggttcaagtgattctcccgcctcagcctcctgagtagctgggattacaggcgcgcgccaccatgcccgatcaatttttgtatttttagtagagacaggggtttcattatgttagccagcctggtctcgaactcctgacttcaagtgatccgcctgcctcgacctcccaaaagttctaggattacagacgtgagccaccgcgcccggcccaaagtgagatttcaactctctctacaccagctggacctgacagcggactcgcggaggcgcagacgccgccggcggtcttagctcaagaatgaagcagccgcactgggctaatgcgcctttgggttcagcccggcaggcgagggaagcaagagttcgctcagattggcttttgggtttaagctaaagcgtcagaaactgacatccaggtttacatggggcatcctggagagggtcagcctcgcaagcggctctgctaatcccccagccctgatcccgctcgcgggtcccggtgggtctcacgcctgtagctcctgcggagctgggctttcagcggcgcccagagaagcaccagccgggcctggccgccgggtcccggctcccgcgggacgctggaggcgtcggcggccctggccccgcctcctccccggcaaggcccaatggggcggcaggcccggcagccccgccccggtggtgcccgcgcggccagcgcccgccaggcccagcgttagcccgcggccaggcagccgggaggagcggcgcgcgctcggacctctcccgccctgctcgttcgctctccagcttgggatggccggctacctgcgggtcgtgcgctcgctctgcagagcctcaggctcgcggccggcctgggcgccggcggccctgacagcccccacct

SEQ ID NO: 14678 - DNA, 2300 bp, Homo sapien
ttcaccccatctctactgaataccccatgtattttcagtagagacggggttggtcaggttgatcttgaactcctgaccttgtgatccgcccacctcagcctcctaaagagttgggattacaggcgtgagccactgcacccggcaagaatttttaatgttatagaaaaatgcgatataggccgggtgctgtggctcacacctgtaatcccagcactttgggaggcaaggcaggcagatcacttgaggtcagaagttcgagaccagcctggccaacgtggtgaaaccccgtctctattaaaaatacaaaaattatctgggtgtggtggtgggtgcctgtaatcccacctacttgggagactgaggcaggagaatcgcttgaatctgggaggtggaggttacagtgagccgaaatcgcaccgctgcactccagcccgtgcaacaagagagagactccatctcaaaaacaagaaaagaaaaacataatagaatgctgtcctaagtaaaagttagaaaacagtatgtattgaataatcttttttctaaaagatgtaagtgtataattatgcataggaaacacacaggaagatattcaccaaaatattaacaccagtatacctaagatttgtgcagtttactacatgcaaattaatcttaatttttaaaaagttttaaaaaatattaacgctgacggccgggtgtggtggctcacgcctgtaatcccagcactttggggggccaaggcgggtgggtcacgaggtcaggagttcgagaccagcctgtccaatattgtgaaaccctgtctctactaaaaatacaaaaattagtcaggtgcagtggcggacacctgtaatcccagctacttgggaggctgaggcaggagaattgcttgaacccgggaggcagaggttgcagtgagctgagatcgagccactgcactccagcctgggtgacagagcaagactccgtctcggaaaaaaaaaaattaacaaggttgatgccaatgtgtaggtaaaatgaaattatgagtgatattatttttaattgtgtttttctgttgtctaactttcttgtactaaatatgtgtttacttttatagagaggtaacaaaagtaaccacttttttctttttctggaggagctaggcagcaattcccggagaggagaggctgcagaaggacaatgtacacttaggccaggcctgcccggccctggaacgggctgccacttggcctctggtttctgcagtcccttgacccgtcagttcaggccagctcagccacttacaagtccagaactggttgtttcagtaaccgccctgaaagctgccgttgctttcctggaagatagcaccgggacgcaagagtggagagggaggagccaaggtcacctcataaatgcgggatatttataaccctatctttcacccctcctgcagatctccgtttcgttttactctctgagcacgcccgcccactgcatgttaagggagcagtgagcagcatttatctcgggtggagacgtgggtggtttcacagagtgtggatctgccctcctctctctcacttgcctccttctgtaaacaatattaccattcttgagagctgaccatgtgccaggtgtgtgcctccaccattgcatttcccatcacagccttgtgagatctctagtgttctgatgcccactttacagatgaaaaactccaggctcagagaggttaaggaactcgtcctacgtaacacagccagttaggtaagagtggatctaggatttcaacccgggccagcccagactccagctagtgaggccgccccctgtggcccaggtccagcgaggccgagtctcccaaggtgaaggaccgcacagtcccttgggctccacggctaacttgggccgaccagcggtcgtggggaggcggacccgacaggccagggtggtcgtggcatcgagtccatcgttggtgcaaatggccgggggccggtggcggtggtggggcggggggcacggcccgcatcaggcaaatcccggaggcgccctctggacaattcccgtaaacacgggcagagcggggcggggctgggcggggcttggcgggggcccagcatttccggggacgccgcgccggactgaggctgtgcgcccgagactccgggtccccaggggctgcgccgggccggcctggcaagggggacgagtcagtggacactccaggaagagcggccccgcggggggcgatgaccgtgcgctgaccctgactcactccaggtaggcgcggggggtgcctggcgaggtgggagccgctg

SEQ ID NO: 14679 - DNA, 2300 bp, Homo sapien
aaccaaggaggaaacggggagaacagttaggaggcccttgcagtaaccaggagaaagagggtggtgcctgggccctagggagctgggaagtggtcagattatagattttctaatggactggatgtgaggagtgagataatgagaggagctgagggttttggcctgagcaatttaaagatggaattgccattaaatgaaatggggaaggctgtaggtggagcacatttttgagaagggggagagatcaggagcttagtttgggacatgttgggctcgagatggttttcagacagccaagtagaaatattgaggccgggtcaggtgtggtggctcacgcctgaaatcccagcactttgggaggccaaggcaggtggatcacgaggtcaggagttcaagaccagcctggccaacattgtgaaaccctgtctctattaaaaatacaaaaaattagcggggtgtggtggcataaacctgtaatctcagctactcgggaggctgaggcaggagaatcacttgaacccagaaggcagaggttgcagtgagtggagattgcaccattgcactccagcctgggcaaaagagcaagactctgtctcaaaaaaaaaaaagttgaggccttttggagttaagggctgagcagggctggactaggcggcagataggggtttgggtatcactggctgtaggtggattgaacccatttagagtaagcatccaaacctgggcaatagtagcactgtgggtgcttggtgctgtccatatcccatgtggaattctgtgtccagttctgggagcccctttaaaagggatgctgctagcctgcaccatgtccacagaaggtgatggaggtacagaaatcatgcagcatgaggaaacttagctgtaagaaaggagacctgggaccatgtgggtgctgtgcccaccctcttgacagcatccctgttgtgggagcagatgtggcagaccctgaaagtcgggaggagaggaaaagaggtgctctgaggaggctgattttggctgggggtgaagaggagctttcctgcaattgcagcaaatttatggagcgatggtctctactgccatggaaataactagcagaggctttcactcttttggactcttaactacaggaggaactactacatttttctgtaatcctgtgcacacttaggaaaagttgaagtagctttcccaaaattacttatcctttgagattattgcttagatagtttctatgttttgtttgtttcttaatgctgttgggatccactaaattgatttcagaatctgctaatggtccaggctgcagttggaaacccctggtctcagcagagctgaactccacccgtggagatgttaggagccaggaggattaggggtgggtgcctctgggcttccactccagtcttaggggttcccttcccctgccgggtcacgtgcaggttgtgaaggttttacctcctcagcagtacattaaatcctattatcccacttaagctaatcttgcccttcccccacccgagggcttcgcgtggacagaatattaagcggacaagcccgcagggtgcctagactaagtgctgagcttgtagtgaatgcccagccatgacttgcagtggattgacctgtgcaaaaattggactctcaagctgctagccccagtgtcagcacgagctcggccgagttcatttggtcgcaggaacaagggggtcgccaggagcaagagcggagggggcgcctaaagggaggagaccaaggcctaatcaccatccgccccctaactccctaggcgcatagcggggacgcagcgtgtccccaaaccaacgccactagcagagggtcccagaggagccggaaggggccagggcctgggcggcggtgggagggtctgagcagtgggggcggggagctgggggtcggctttcgtccgcgtcccagcgctccggcggccgccggggctactgatcccgggcttggcccctgcggcagcgccccgagctgccgcccctcgcgctgccagcgcccgggaaggaggaagggggaagggggcgggccggccgggctcacggccgacttcctccttcagccccgccctccgccgcttgcgggtgagctctgcccaagccgaggctgcggggccggcgccggcgggaggactgcggtgccccgcggaggggctgagtttgccagggcccacttgaccctgtttcccacctcccgccccccaggtccggaggcgggggcccccggggcgactcgggggcggaccgcggggcggagctgccgcccgtgagtccggc

SEQ ID NO: 14680 - DNA, 2300 bp, Homo sapien
ttctttgttcctagacttgagtgccccatccccagtcctgggagcagaggccgggcctgggtgtggaagggggggctcggcggtgccccctggtggcatgcttgggcgtgggactgatatcccctcgctccttccccccagcgcgactgtcaaaactacatcaagatcctcctgccgctcagcggcagtcacctgttcacctgtggcacagcagccttcagccccatgtgtacctacatcgtgagtgacctgtcctcagccctgaggctgacctgggaactgcccctctttctgccccagggatcctgttctgtagcatagacccctgaggaaaggcagggcccagagggaggtttctaggtaccactggcctccaagagccctgaggtcccacaccctggcacaaagcgcagccctgacagccatgtctccctgtgcggggaggcgggggcacatgcggtcacttacccatgaagatcctgtgccacccaggccttgctgccctcttctgcttcttccagcatctctccctctcctttgcttgattctcttgtcttatcttgtacaccccctcctcagcacacacccctagcagagggtggcatttgatgctgtgggttggagcccagctttggggtcagacacacctgggtttgaatcacattgctgccccttccaggctcacatcattttatttcttttttctttttcttttcttttttttttttttttttgagatggagtctcgctctgtcgcccaggctggagtgcagtggcacgatctcggctcactgcaagctctgcctcctgggttcacgccattctcctgcctcagcctcccgagtagctgggactacaggtgcccgccaccacgcctggctaattttttctatttttcggtagagaggggggtttcaccgtgttagccaggatggtcttgatctcctgacctcgtgatccacccgcctcggcctcccagagtgctgggattacaggtgtgagccaccgcgcccggccaggctcacatcattttctaagcctcacctcctccgccaggtgggtctgataatgtgtcccgcgtcgggtcactgtgaggcagtgtggcactgtgtctgggtgaggcctctcctgaggccgactgtccaggttcaaacccttcggcaccgtgtcctggctgaggaggacggcgtccctgacacctgaccccttctgtcccacacacctcacctgcctgcagagttgccttctcctgcacgcctctctctttctcaccaagcctgctcctcattccctggagtgcccctgagcccatgtgtccaccctcctgcagaacatggagaacttcaccctggcaagggacgagaaggggaatgtcctcctggaagatggcaagggccgttgtcccttcgacccgaatttcaagtccactgccctggtggttggtgagtgttgagggcaggatggcttcattgaggttccatgtaggggcacacagggctagagggctagctttggacaggctgagtccatgccatgcttatttccaaggggacagaatggccaggggcttgccttgggtttggtttttccaagttccagcttccttctctgcccaccacaggcaaaacgggcagtgctggggtcactctgggccctgagcagggagaaggggccgtgctgaggagcccattcccatgggaatgttttcttggcagatggcgagctctacactggaacagtcagcagcttccaagggaatgacccggccatctcgcggagccaaagccttcgccccaccaagaccgagagctccctcaactggctgcaaggtgaagtcctcttgccaccacccagagggcagggatcctgttcacccagccctagaagggggcactttcccccagcttggcctgtctccagggttcctgggctgactctgagctcctgacctggtccctacagacccagcttttgtggcctcagcctacattcctgagagcctgggcagcttgcaaggcgatgatgacaagatctactttttcttcagcgagactggccaggaatttgagttctttgagaacaccattgtgtcccgcattgcccgcatctgcaaggtgaggggaacgggctgacagggtggccaccccagggacctcaaagcctccacagctgcaagatcacccacatccatgcatggcctttcccatcccgccaaggagtacagcttggctaacagcttttctctctcaccttttaaattaaaatatcttactacttttttcttttttttttttcttttt

SEQ ID NO: 14681 - DNA, 2300 bp, Homo sapien
cctgttcacccagccctagaagggggcactttcccccagcttggcctgtctccagggttcctgggctgactctgagctcctgacctggtccctacagacccagcttttgtggcctcagcctacattcctgagagcctgggcagcttgcaaggcgatgatgacaagatctactttttcttcagcgagactggccaggaatttgagttctttgagaacaccattgtgtcccgcattgcccgcatctgcaaggtgaggggaacgggctgacagggtggccaccccagggacctcaaagcctccacagctgcaagatcacccacatccatgcatggcctttcccatcccgccaaggagtacagcttggctaacagcttttctctctcaccttttaaattaaaatatcttactacttttttcttttttttttttctttttatttttagacaggatctttgctctgtcacccaggctggagtgcagtggcacgatcacggttcactgcagcctcgacctcctgggctcaagcagttctcctacctcagcctcccgagtagctgagactacaggtgtgcgcccccatgcccagctaatttttgtattttttgtagagatggggttttaccacgttgcctgggctggtctcaaactcctgggctcaaacaatccacccacctcggcttcccaaagtgctgggattacaggcatgagccactgcacccagccattttttttcttttcttttttttttttttacttaaaaaatgtgaaaatagccgggcatggtggctcacgcctgtaatcccagcactttgggaggccaaggtgggtggatcacctgaggtcaggagtttgagaccaacctggccaacatggtaaaaccccatctctactaataatacaaaagttagctgggcgtggtggtgcacgcctgtaatcctagctactcaggaggctgtggcaagagaatcgcttgaacctgggaggtggaggttgcagtgagccgagatggtgccactgcactccagcctgggtgacagagcaagactgtctcaaaaaaaaaaatgtgaaaatagaaaactgtacacacaaaaatcacttacaagttaaagaggcactgtagcatcagctggagagcacagaccctggaggccaactgcccaagttcaaaccctgctggcctaggatcttgggcaagtccctcaccccctcggttaacagtttcctcttctgttaaataggaagaataacactgacctcagagttgttatgtgaattattaatccacgcaaagctcttagaaatgtggtgggcagtgactaaatgtgaactatgaatgttattaccccaccaccccagcacaagaaggagtcactggtatcattttagaatgccccctccaaatctttttttttttttttggcatatgtgtaactctgtgtatatatatatatacatttttttttttcctttttgagacagggtctcactttgtcatccaggctggtgtgcagcggtgagatttcactgcaacctccgctgcccaatctcaagcaatcctctcacctcagcccctcatgtagctgggactaccagcatgcaccaccatgcccagctaatttttttgtatttttagcagagacagggtctcaaactcctgagctcaagtgatccacccgccttggcctcccaaagtgctggaattataggcattaataatataagtaccatcccgaccttgtacttatattattaactcactcaggaacatggcattaggctatattggggtcctttggcttccttgtttgctcagcagtgaatcgcgtccatatttaggaaggctctgcttagttacagtaaggaccatcctcctgatggatgcgtacactgctcttcctgactttagatggaacttggtcctggccttctcctgcccttcagtcctggtgtctggggtgggtccattgaggcagtcctgtgccgtgcatccccgtcatggctcagcatgtgcctaagcccagcccatccgactctccctccagggcgatgagggtggagagcgggtgctacagcagcgctggacctccttcctcaaggcccagctgctgtgctcacggcccgacgatggcttccccttcaacgtgctgcaggatgtcttcacgctgagccccagcccccaggactggcgtgacacccttttctatggggtcttcacttcccagtggtagggcctccagacctcgctggagatggaagggtgaagggtggctgggactggggcccccagggctcctgggtta

SEQ ID NO: 14682 - DNA, 2300 bp, Homo sapien
gaacacactgaggagatccaggaagtcctcaaagctaaggctgtctttggctggggatgtggagaagaccctgcagattcgctccttgaaggggttggcctaggagaacaaacgccacaggacgtggcccaggtcacacgctcattaaagcctaccagaaacttgagagagcaggtcacaggaccagcaccagcgagctcagcctcgtgggggtgaacagtcagtgctttggggccaacatggagggcagtgggggcacaggaaagcaaactgacccagctggggaagggactgagatggcttcctgggagtcaagtgtttaacccaaaggcaggtcacatacaacgtaagtgtgggcagagagggaagaagaagtcatcctaaacaaagggaacgagatgggctggttattttaaaacacaaatatttacttgaacagctattgtgttacaggcaccgggccaggccctttgcacagaaattttgcagcagccttacggagtggcaatcagcctctagaacacggttcctcaaactctaatgaggtacctcaactcctcttaagggacaaaacttctttgaacttccaagattatgttctagaatccccatttgaaaagcaccattctagataattctgccaggtgattttggtaaagtccttgcccctagaaaatcagaactaagcagaaaaatgaccagagtggggaccagtgaccccatgatcccaaagctagtggcagatggagttagggggtctagcagggagggagtggtgggagaggtgtcaaaggaggggagcgcttgcaccttgagctctggaaggctgagaatctgctcgaagggcacttgtgcccgaagtgacgactccacgctccgctgctcctggggaagcagctcacaaaaccgcctgtgggctctggtagagagaggggaactgtcggtgttctcagcgatcggtctccctgtgtgttcattcccactccttgcctgctgctcattgtcaaccaggtgaggagctaaaaccacgtacacagaacttccgagtcatcaggcaacggtaagcaaaaggacatgtcacaaggcagtacagcctaggagtctattcttgcaatgagtatttactgagcatttactatgtgcttggcactgattctagagatccccaagggatgaagaagttgggaaaggagccagaagttggccctaaagaattggccaggcacggtggctcacacctgtaatcccagcactttgggaggccaaggcgggcggagctttggaggtcaggcgtctgagaccagtctgagcaacatggtgaaccccttctctactaaaaatacaaaaattagccgggcatggtggcgggtgcctataatcccagctactcaggaggctgaggcaggagaatcacttgaacccggaggcaggagaatcacttgaacccggaggcagagcctgcagtgagccaagatcgtgccccagcactccagcctgggcgacagagcgagacgctgtctcaaaaaaaaaaaaacggagaaaagagcaaaaccaaaaatctcattctcaccttcactccagggatctcttaccctcaaagcctcctttttagcaaccacactgaactgtcctcctcggcctccacctccttcccatgagcttatctttgccacaggaacctggcctgcataaatccggcaaaagggcttccagcccaagttcaaatctacttactcagagtgttgtcttaagcagttaccaaacctttctgaacctgtttcattgtccagtacctctctcctaaagattaaattaggtaacgcaggcaaccatttagcacagtccctggcacatggtgagtgctcagaaagcgataacggttactgtattattcaggtaaagttgggagaaggagccgggctccccaaggcttctgtggtttagccactgggcaaggtcggcccctgccggactggggcaggaagttcggcagtgctgaagctagtggagcccagggtcaaagagcgcctaacttttcctggaggctgtaaggtggctccgcggtgccacgctggggcctcaggcgagggcggggagggcgtgccgggaggagggcgcagcccgggctaggtctcccggcctccagctcccgctcctctgcagacctcaggccagcccccgcccctccctcgggacagcgcccccgaagctgtctctagaggatcccggggtcggaggcagggttcaaggcagcacttacaggaggatctcctgcttcgtcaggaacgtcaagtcctgga

SEQ ID NO: 14683 - DNA, 2300 bp, Homo sapien
attaccatgcagtccaggtattcgccttggcttgtaagaggcaaacaaggtctatttagtacaggagacataatgacagcttcttgctttttgcctaagcttttactaacagaagactaactctttctcggacagaaagagcctgctattaagagaaaaatgatcggccgggcacggtgggtcacgcctgtaatcccagcactttgagaggccgaggtgggcgaatcacgaggtcaggagatccagaccatcctggctaacagggtgaaaccccgtctctaccaaaaatacaaaaaaattagccgggtgtggtggcgggtgcctgtagtcccagctgctggggaggctaaggtagaagaatggcgtgaacccaggaggcggagcttgcagtgagccaagatcatgccactgcactccagcctaggcgacacagcgagactctgtctcaaaaaaaaagagaaaaatgatcaggttgggatgggcctataccctagttatttttttttatttttattttttgagacagagtctcactctgttgcccaggctggactgcagtggcacaatctccgctcactgcaacctccagctcccaggtttaaccatgtctggctaatttttgtatttttagtagagatggggttttgccatgttggccatgctggtcttgaactcctggcctcaaatgatccgcctgcttcagcctcccaaagtgctgagattacaggcatgagccaccgcgcctggccttgaatatttctacaatgatggaatgtacctgttaatacagtgtgtcttatcaaacacatgctgccaaggagagcactgggtattcttccagtgtaaagtagattcctaggcagtctagggagtcaggaaaggcttccctgaggatgagatggaagagggactgagggcccaaagtggctgaaagacagagagccaataggaggaagtccagttacagagggccaggatttgggtttttaaccatttaatggttataaactgagactaacatactcagatttagactttacaaagatcagcaagtataatggattggaaggatcaagaattaatcccagcctgaccaacacaacctccacttcctcctcccagcagtttggaatccttaccttttgcaatagtatacgttcattcatttattatgcattcgataatatttactgagagcctactatgtgccaaacattatcctagaggttaagaggggacaagagcaaagggtcagcagtctaggggtgagatggagtcaaaaggacggcaggtcagctggaatgatgagaacagcagtggagagcctttaaaagtgccttggactggaccgattaccttctaaatgccggcgcccggaaaaatcactaacaccctttggacttacgtatttccatctttgtaaaatgggaacctacctcgcaagggatgttgcaacaatcgaagaaaactatgcacaatgcttgacatccagtgggtcctcagtaaatagcctaagaaggaagcaaggttatggttacttctggaagaggtggcttgggggctgcgacaggtgcagcgattgcctgatgataacatctagaaaagcccttgctgggcagaggggcagccgacgacccccgccactcagcgagtctccaggtttcccggaaacgctagctccagtgacttctcagatgcccctatgggaccccacccagggctgccgccgccaccacctactgcagccgaagcggatgcacctcgcgactttccccgcagccgctgccggggccacagcgaggtcatgacgcccgtgacgcatacgcagccagcacgcacgcgcgcggcgtggcccgcccccccctcccaccccggaggcggggccgtgagtcccgggctccgccccggagcgtcgggcccctccccgggccccgcctccagctcgcctaggaccgcttggagccggcagctcgcctgccaaacccggctgggaacgcctggcagcttttaggagggggcgggcccgggggtggtggccccaggagcggttgccgcggggaccgggcagtgacgcggcccaagggcggaagtgagaaagttgtctgcgtctcgaggcgagttggcggagctgtgcgcgcggcggggcgatggggggctcgggcagtcgcctgtccaaggagctgctggccgagtaccaggtgcgcgggacgcctggccctggggagctcgcgtgcgggcctcttctcgggagcagggtccgggagctggctgcggggcggccgcggcctcccagcggtccg

SEQ ID NO: 14684 - DNA, 2300 bp, Homo sapien
caggaggagagtttcatatgagagtatcatatgctgaggaaagatcaagaagtctgtgaatcgggcagcccatttctccatcagccaggaaggacattggtgttgaggttgacatacctatcaaggacaataactaccatggcttccagtgttttgatgaaacctcagatgcatgacctctggtttcacattgctgtatccctgtatagagggttgtagcactctatacatttgctgtggctgaaccgggaaagaaggcatatgcagatttctagagaaattataattccatcaaagatttttttgtttgctttttttttttgagacagagactccctctgtcgcccaggctggagtgcagtggcgcgatctccgttcactgcaagctccggattcacaccattctcctgcctcagccttccaagtagctgggactacaggcgcccgccaccatgcccagctaatttttatttttttatttttttatttttagtagagagggggtttcaccgtgttagccaggatggtcttgatctcgtgacctggtgatccgcccaccttggcctcccaaagtgctgggattacaggcgtgagccatcacacccggccagatatttgtttttttaaatacgagttctcactctgtcacccaagctgaagtgcagtggcataatcatagctcacggcatcctcttaactcccatgctcaagagatcctcacacctcagtcttcctagtagctgggactacagggcctgccacctagccttgctgattctatgaaagattttgaggagatgaggaaggctggtatctttcaaagtgcaaagtgattttggtataaacagtttctttgggttgcattacatagaagtttatcactaacctatgttcctgaactatgaaacatgaatatgtgggcaaagaaatagcttatctttatagacaattaacaacaacaaaaacagtctatgaattagagaatgtccatgccttttttaggccgagttcagtggttcatgcctgtaatcccaccactttgggaagccaaggtgggcaggtcacttgaggtcaggagttcaagatcagcctggccaacacagcaaaaccccatctctacaaaaaatacaaaaattagccaggcatggtggtgcgcacctgtagccccagctacttgggacgctgaagtgggaggattgcttgagcctgggaagctaagtaaagttgcagtgagctgcgatcacaccactgcaatccagcctgggctacaaagcaagaccctgtctcaaaaaaaaaaaaaaaaaaaaaaaaaaaaaaaaaaaaaaaagtccatgtctttttaaaaggatggaaacattttaagtgttctctagatttagccacacagtataattttagggtgacaagttgagctgagttgggtggaggtggtgagcagaaatcaaagtgggtggatgtcaggaagagaaggtgacagtgaaggagcactgtgataaggcggtttggttattccttaatggagctgtctcagtccaccagaggcaaagccttgaaaggcacgtggccttaccatggctgtcactcttgaatgcataggctttgctagctaaacttagagttactaaagaattgagcccggcgtggtggcacgctcctgtagtcacagctactggggaggctgaggcaggaggattgcttgagcccaggaggtccaggctgcagtgagctatgatggtgcattccactgcactccagcctgggcgacacagcaagaccccgtctcaaaaaaaaaaaaaaaaaaaaaaagggagaattgaggagaggcaaacagctatttgtcctcattatatgcttggccaaattccttggcccggggtttagggaaagatgggagtgcggcgagaactggcttcgaagcgggagggctgcaagtcccatgatacaccggaagaatctggcgtcgaggccggccagctccaaagggcaaacgctgtctcccccacccaaggtagcctcggcccgcgcccaagtgggtgtggctgcgggaaagccccgcccccaggacgcttctccaatgggaactgccctcgtgtccatggcaacggcggcggccacgggcttgctagaggaagcgctgccccggcagccgcagccacggccaccgggagctaggagtgaacccctgcgggggagcagcttccccctcgcgatcgtggggacagccagtcctgtgaaacgaggaggcggttccggacgcccagaaacgcccagggagacctggagccgggggaagaggggac

SEQ ID NO: 14685 - DNA, 2300 bp, Homo sapien
ctattccctgggctggtagcaaacctgttgggtcttctgtttttgttgaaccccaaaggagtatctggttaaatagtggccgcggcctagaagagatttttttcagttacctccttcttccaacgctccatccaaacttacataaaaatgtggtaaggggctgctcttctcctctagcctagattttgctaggacaggctgggcagtcaagaactgaaatctatgagtctggtcctactggtgctcctaagaggggctgccacagagcagggcgctcctcatttcctgcatccagttctgccccatgaatcaatccccaggatcttaggggcactgccaagcatgaatgctgcaatcccacatgttccccggtaccatctgcagcccaagaacttcaactggacaggagagccggcagccatcaactcctgttcattgtcaatgaagaaggctgggaggtgctatttttccagtgccagaatcaggctcactagccgtaagtatgcaaaactagctttggtcattttgacatatgtaaatcccactagcaagcatagagcttggatgcccctaaaatataatatggcacttccaccagtgtaagaatggggaagttagggtacccatttatttactcctttttttttgagacaaggtcacgctctgtcgccaaggctgaagtacaatggcttgatctcacttcactgcaaactccactcacgggctcaagtaattctcctgactcagcctcctgagtagctgggactataggcacacaccaccatgctcggctaacttttgtatattttgtttttgccacgtagcccaggctggtcttgaactcctgatccacctgaatcagtctcccaaagtgctaggattacaggtgtaagccaccgcaccaggcctatttaatcctttctgtacactagaccctggtgatagaaatggcagaaatacagtcccagcactcaagaggtaataggaacatggacaaaaagacataccataccaattacaatacagtgtgggaaagacagtggagggaagcatgagatgcccttcctctgtgttggtaattgggccacagttgggaaagaggtgaacaaatctcttctgtgaataccaactcagggacatccatgtttccactgcagaaggacaagccagcagaaggctagaagccataaaccgagtcctggcaggatcagtgccacccactttaaccccaaagcagggctattttctgcaaccggaaagagtggcatctgactcatggactgaatgcaccttgccctccatggtaaactctgaacacagagcagccaaggttcccctctgccctgcgtctgcacccatgctgcagcgttccagagcactcctcaacatcaatcagttcaggtaaaagcaggagggaagcactctacctctcctggataacctccccaggtttccaaagggcattaaatctttgctaaatgaatgactgccaccaagttccactttgaaaagccctgcccaggaaccccatttgtataaggcaaaatacaaagacaccaagaattcctcaataccctaagattaattggggatcggtaaagactagaagatgaagaggcgccaaggccagccatgtactcatttctgctcatcaagccttagcctgggtttatcgctaggtgatgggtctgaaccctaggtgcggcccggggctggaggccatccaggagacaatgagcccctttcccagagaagccgagtgcccaaggcactgggctgtcgccgtcagaagactgccgagcggaagccctgcccaccgaggtggcggagacaggcaggcctgggcagccgctggggcggagggacggctcttggaaacggaatccgtactttaattaaagtttatgcagttttccaggagcgtcctgtacctcatttcggccctcacgtttcagggaagccctctccacagttacaggcagaaagggtgggccactgagcagcgtgagcccagatcttacccccaccaagtgaagcgggaaataacttgctactacccagcctccggcccgccccttccacttccggtcttacccggctacttccgctgctgtttcgtagccgactgctgaaggctggtttgcgtcgacatggcggttaccctgagtctcttgctgggcgggcgcgtttgcgccgccgtcactcgctgtgggttcgcgacccggggggtggcgggcccaggccctattggccgggagccggaccccgattccgactgggagccggaggaacgggagctg

SEQ ID NO: 14686 - DNA, 2300 bp, Homo sapien
tctcggctcaccgcagccttcacctcccaggttcaagtgattcttgtgccacgtggtagctcatgcctgtaatcccagctacttcggaggctcaggcacaagaatcactggtctcgaactcctgggctcaagtgatccgcctatctcggcctctcagagttctgggattacaggtgtgagccaccatgccaggcctcaacccctcttctttatcataggtattgcgagttagatgttctgataggagacttcttcacaacttgcaaacctgctccttcttcccgtaggtatttacatgaggaatttccagagtcctggtcagttcccaggttggctgaaggctttgatgtcagcactgatgtgatccgaagagttttaaaaagcaagtttttacccacattggagcagaagctgaagcaggatcaaaaagtccttaagaaagctgggcttgcccactcgctgcagcacctccggggctctggaaatacctcaaagctgctccctgcaggccactctgtatcaggctctttgcttatgccagggcatgaagcctcatctaaagacccaaatcacagcacagctttgaaagtgatagagtcagacactcacaggacaaatacaccaaggagaaggaagggaagaaataaagaaatccaggacctggaggagagctttgtgcctgttgctgcacccctaggtcatccaagagagctgcagaagtactccagtgattctgagagccccagaggaactggcagtggtgcgttgccaagtggtcagaagctggaggagttgaaggcagaggagccagataacttcagcagcaaagtagtgcagaggggccgagagttctttgacagcaacgggaacttcctgtacagaatttgagtcggggcttggcttatggagatgcctcgtgaaacacagctgggcaagtattaatgtatatggaacagcctggatttctgcatatggataagccaccttggaataggaagaggtgttgagcctggactgtgggaggaaagagctgcgtggatagattcaaacttcctgtggtagtgctcccagtctgacctctgtagaccttcagtactcactcttcttgcttaggctctctgtgtgttgaaagccatcccgtgttgcatgtgttgttacaattttctgtgatacttgcaatttatgtttgagaagaagtgaaaagtttgccttctgacctcatttccttcttgatcagtgaacactaacattttggggacaacttagtcaattggttttccttacaacaaaataaagtaaaatgtagcagtctgcctctttggtgctctttggggtgggatggtttacctgtgaaccttggagagagggaaggacaaaggcagaaaggaaggatccctggtcagtaaacattgggagagagatggaaccagaggaatttcccagcaaagggctctgtgcagagcatcctgcttagtgagggattctgacaactgaaaactggacgcctttcttttagttgctggggttctggcagagattgggaaatgaggggttggcagaaaatacaaagcaggcaaaggctttagggcccttataatctccagccacattttaaagtttatattaagagctgggcatggcagaatgtgcctacagtcccagttacttgggaggccgaggtgggagaatcgcttgagcctcggaggttgaggctgcagtgagctatgattgcaccactgcactccagcctgggataacagtgagacccccatctctaaataaaatcaatcgatcttcaattatgtctcattatacagtttacttaaccagatttttacaatggtgccatggtgtaggcaatcccggattaagaggtcccttttacaaataaggaaatagactttaagatggctgccagtaagtggcagtgctgggacttaactcgggtctcatcattaatccagggcttctggaattccgggaatatggcactgtctgccataattttgttaatttactgcttgttttagaaatacatctgttataactagaaattcggggacagcttagtcaatttgttttccttacaagcaaaataaagtaaaatgtagcagtctgctcattagtgctctggtgggatggtttacctgtgaaccttggagaaccatgtcctgctttcacaatttaccaggaaaaatggctactccgaatttaaatatatgtaggacattaatggaaacacctacattccaactcagtcattgccactctgtagaatcttactgctatttcaaatgtcc

SEQ ID NO: 14687 - DNA, 2300 bp, Homo sapien
tccccactccagtcccagattgaagaataatcttcatgatctccttaatggcaaaatgctagaaagacttaccgaggggtctgaagatgccttcggttctccaggtcctgaactctgttccagttacaggaggactggcaatccctaggtttcctgggtgttactttgttactgacctcctctgagatttccattttcctcaatttcgtctaactaaatctaactacgtctaactacctctgctaaccagacatttgttcatagtcgacagagtttccgaaaatgcaatgtagttaccttgcagatgactataattgtgtagcaaaataactaagatgccactggctatatggaaaaaaaaattacttaggattttgataccttttatggtttatttccccttttggcctgtgaacttcatgaaggtaatggttatgtatgattcccgagtaatcacagttcccagaacgatcttttttttttttctttctttttttcttttttgagacggagtcttgctctgtcgctcaggatggagtccagtggcgcgatctcggctcactgcaagctccacctcccgggttcacatcattctcctgcctcagcctcccgagtagctgggactacaggcgcccgccaccacgcccggctaattttttctatatttagtagagacggggtttcaccatgttagccaggatggtctcgatctcctgacctcgtgatcctcccgcctcggcctcccaaagtgctgggattacaggcgtgagccaccacgccctgcccccagaacgatcttgagaacagaatgttcccaataaatatccactggaaaatgcaccttatttttgttgaaggaatggtggaattagcatcaaagggatcttcaacattaactcgggccgggcacggtggctcacgcctgtaatcccagcactttaggaagccgaggcgggcggatcacgaggtcaggagatggagatcatcctggctaacatggtgaaaccccgtctctactaaaaatacaaaaaattagccgggtgtggtggcgggcgcctgtagtcccagctactcgggaggctaaggcaggagaatggtgtgaacctgggaggcagaactcgcagtgagccgagatcgtgccactgcactctagcctgggcgacagagcgagactccgtctaaaaaaaaaaaaaaaaaaaaactctatggctggtaattctaagcgttttataatacatcacaaaatgttcttttatttttctaaattgcactgaatcaacaaacggagtagacaggcacattttcttcactttaaggaaagactttgttgttttttagctaggggccgacccaaagtgatcactggctctcacatgagacccaggagcctccccagtttgaagcccgatatcacatttcccagaatacttgatgccctcgcccgcctcctctggctatcaaccagacggaaaggggatgtgcctgggagtttgatgccaagggaaggatgcggaatgtctgttttctactaagggcttctgctgggcctttccaatgtccagtttgagttggtctgggacctggcctccgcaaacaccctgcaggctccggccgccggggatgaggtggaagactgggcagaagagaggccgcaaaggcccgagggctgagctgctctgcgctggggaggggcgaagtgccagagcgcgggagacctcatggtgggcaccaggctgctccgcggtaggtgggtgaggccaggagattcacatctgcagatgccacagtgaggatacagcatttagatccctcggctccaaacaggcggttccgggggaccggtagctggggaattgggtttagcactttccaacgcttggaactggacatccacggctccgagtcctttgaggtcttgctcgggactacgtttcccagaaggctaggcgataattgacagctctatcagcctatggacagagaaaaattctagccatggaaactgaaaagccaatagcaagaggatgggggcggtactttccggccgctggctgtcgaagccggagtcccacctgtgtccccacagccctgtcacgaatcccggtcgggttctgggaggcacagcctcggggttgcgggccgggtgcggctcggcggtggaggactcacttcctgctccatccccggctgggccctggggcggtgagtgattcaaggagggagaccgcggcggcagcggcgcgctgctgaggggcgtggagggggcttgcccgccacccagacgttttctcagcggggtt

SEQ ID NO: 14688 - DNA, 2300 bp, Homo sapien
cccccgcctccgaaataaataaatcattcagtttctgaaaagtgtttggtaaaatgtgctagacttataaatagaataatacaatttgtaaagtgaacttaaaagcttaagaatgaaataactttttactttgtaggcttaataaatgaaacccttgcccacttttctacaggggtgttttgttcttacaggttttcaagtatctttaatagtctgaaggaagagtgaatacattgaaaatagctggagcaaaacatctggagtcaggctatgatttggcatgctaaatcatgctgaacttggcccattatcttgaagggaggaatagaaaaaaaaatttaaaaagagaaacacaattgcatttgcactttagagagaacaccctgataactgtgaggatctagttggcagaagggcgactacagtgtaatcacaacagggatggagacaaaagtagacatctcagaaataaacacagattggatgtagggtgcgaggcaaggagcctggggtgttcccactgggaattgagtacttctgtgaatagagaatatagcaggagcagggtcagtatttgacacgtgggatttgaagtgtctgccctatacacaggtgaaagtgttcattagctgaaaatactgagggacttccagacgatctggtctggtgatacatatcgaggggtcctcagcagttataggcgagtgtagaaaagattactgagtaggcaaagaataaacggaagagggccgggcgcggtggctcacacctgtaatctcagcactttgggaagcagaagcgggtggattacctgaggtcaggagttcgagaccagcctgatcaacatggtgaaaccctgcctctactaaaaatacaaaaaaagtagttgggcgtggtggcgggcacctataatcccagctacttgggaggctgaggcgggagagtcgcttgaacccgggaggcggaggttgcagtgagccgagatcgcgccactgcactccagcctgaacgactgagcaaaactccgtctcaaaaaaaaaaaaaaaaaaaaaatgccgggcgcggtggctcacgcctgtaatcccagcactgtgggaggccgaggcgggtggatcacgaggtcaggagatcgagaccatcctggctaacacggtgaaaccccgtctctactaaaaatacaaaaacttagccgggcgcggtggcgggtgcctgtagactcagctactcgggaggctgaggcaggagaatggcgcgaacccgggaggcggagcttgcagtgagcccggatcgcgccactgcactccagcctgggcgacagagcgagactccgtctcaaaaaaaaaagaaaataaaaaaaaagaaagaaagaaaagaaaaaagaataaacagaagagggctgcggacagaataccgttgaataccaatatctgaagggcaagccacaaggtgcagggggcagaggcatccctgatacgggaaaagagttattttaaaaagaacttgcaaagaacaatgtcaagggatccaaaggtagggaatttggacagagttcggctttagcatccgcatctcaaatacctgggtacctgggtaatctggtgactgctgccgaatctaagaggactgaggccaggttgccaaactgcggagagtggggttggagggctttcatggcagtttggggcctgcttgtgtccaacaagacaacctgggtcacctcaaagggtgtcttctccaaatattggtgcagaggttagctgggccggcaagagaagggagatgacccactattttgatttcaggcagcagacaccggcagcctttcggttagagttgcggatagggcagtggccttgggggcggggctataaacctgggcgggcattcccggcagggcaagctcagcgtgagcccgattggaggatgggctctaccttcttccttccgcctacggagaccatagcgggatgcagggcggggccgggctgagggggcggagttaggggcggggcacggtgactctggccccgcctctttccggccgctcagggcggtgtcgctggggcggtgccgctggggcggggcctgcggggtggggctgacggcacggggcggggcctcggggaccccggcaagcccgcgcacttggcaggagctgtagctaccgccgtccgcgcctccaaggtttcacggcttcctcagcagagactcgggctcgtccgccatgtccgccgcagacgaggttgacgggctgggcgtggcccggccgcactatggctgtgagtgcggggctccgcggc

SEQ ID NO: 14689 - DNA, 2300 bp, Homo sapien
ctgtgctgttgcactaagataatattatgcacacctgagaactggtagttgatgtattatagttctctttttctccctttcccaacaaaatatttaagaggtccaaaccagctttgcaagtaaattctaaaaatgtgtaagtctaaatgtaacacatttccctgctagaagatacaaatgggggaagaaaatttgagatctgaatttctctgttaatttgtgaaaacaaattactgcctgttgaatgtatggttaggtcaggcaccgtggctcacatctggaatctcagcactttctgagaccaaggcaggaggatcgcttgagaccccatctctacaaaaaaaagttttttaattagccagatgtggtggcatgtgcctgtaagtcctggctactctggaggctgaggtgggaggatcattttagcctgggaggctgaggctacaggaagccgtcaaccactgcacactcgagcctgggcaacagagtgtctaaaaaaaaaaaaaaaaaaaaaagtaggtagtcatatttaaggcagagttaagcattgctgggttgtagtgtgaaatgataatgataactgtcgttatttttctaactttaataattatgtctcaggatattcggaatcagcggaggtaccgacagaggagaaaggccgaactagtgaaactgcaacagacatacgctgctctgaactctaaggccaccttttatggggagcaggtggattactataaaagctatatcaaaacctgcttggataacttagccagcaagggcaagtgagtattttttctttttaaagaatcaatgtcagaattagagtgaggaaaaagcagaggcaactgaaatgacactggaaatttttacttaaaatacactggatctatttattgcattagtcttttattttacctctaatcatttgtgtaattgcctaattccatttgtaagtgtatgatgtgaatagtgggtgggggatttcatggatgcttatcgctaagtattccttttgcaaaatatcttcttggggcctgtcaaggtggctcacacctatcatcccagcactttgggaggccgaggcgggtgtgtcacttgatgtcaggagttcaagaccagcctggtcaacatggtgataccccatctctactaaaaatatacaaattagctgggtgtggtggcacgcacctatagtcccagctacttgggaggctgaggcaggagaattacctgaacctgggagatggaggttgcagtgagccacgattgcatcactacactccagcctgggcgacagaacaagactctggaaaaaaaaaaaaatcttcttggccttagaaattaaaatcatgaaaggagatcatctgctggtcccagaatcacttaaggaatattatacaaatttgggtccccttgctcctctctatacttcctggggacaagatcacaggctctgattttttttcctgggtgctgaggaaagtctgatccagccttcttggcactggccacaaactatcagcatgcccatgttacagggagggaattgaaaacccagagaggtgggtgataagagcaggttttacttgcagggtagtttattatttattcctaactttttattttaagagttttcaaatctcagatcgaatgaatagaacaataagcacccatgtgcccttcacctagattcacccatttttaatattttgccatatctgcttcccatttccctggctcttgcatgtcctctgtttctctctttccatggaagactctctggggtcaggcatgggtgatggaagggatgaaaaacaggcccacctaaccctgcttgcagatctgactcctgtgagcttttgatgtgttttcattgttccttgtgcacttcctgactttctgacacaagatgtttcatgttcaacctgtagtttcccctccccagggccagaatgaactgtttctccaagcatgcctggtttctttgaatgaagaatggtatttagaaaccaagatctagaactaggtgtgttcactgccagatttgtcatggcctccaggccttctaagcagacagacctagattctcatttttttttaatgctgcatattattccattatgcagatagatataacagttgacttcagcagttctccattgatggacatttaagttgtttccagttgtttgttattattttttaaattctgcagcaaataacctcttgtacatatgtcattttgcaaatgtgggcatatttctgaagttagcacttcttgccttgattatcctaat

SEQ ID NO: 14690 - DNA, 2300 bp, Homo sapien
ctggaagtttggtttctgacatgtttccttcagttaccaatgatgaagattcagagtagatggttacttatagaaagtgacatgatgtgatttttacagagtctccaaaaagcctagggaaatgaaaggaaagaaaagcaaaaagatttctctgaaatatacagcagcaagactacatgaaaaaggagttcttctggaaattgaggacctgcaagtgaatcagtgagtctttgctttttgttttataagttgatttttatttctacatttatcacatctttgcctttttgtcttcatttctcttttctggatggttacttttagtattttttatgtatttatatatttttatgtgtagaattaggcctcatactcagagttaatttgtcataaaagagtttttcttttccttgtttgtagaacatttgtctcaggtcatgttcacttatttgggtctgatcttaatttttcctcattaaagcaggaagccattccttggatttcttctgtttctgaaccaagaataaattaagagtaacaataagaggagtttgctttattccacttatagctaggaaccaggcacttatcttcatttgcttttctgggaagtatcagcttgctttgcacgtggttcatggacctgacatgtcatcctcccacaggtcctgggcccagcgtcattagcaagcatttattgagcatctgctcagtcagccctgtgacctcaggctactgatctttctcttcttttgtctgtttagggggggaaaaaaaacaacttttaaaaaaagaaccttttacatttttctaattctaaaataatatgtattcgttattaaactttgaaaatacagtaaagcataaaaaagaaaacacctgtaattccacaagccagagataaccactgaaatcgttttaatgtatttttttctattcacataaagattatacacgactcacccacttatgtatttaactactttatatataaatacatatatatatatttttttcttcttcttctttttcttcttcttttttttttttcacggagtctctctgtcacccaagagtacagtggcgcgatctcagctcactgcagccttggcctcccaggttcaagcaattctcccacctcagcctcccaattaggtgggactacaggcatgcaccaccacacccagctaagtttttgtatttttagtagagatggggtttcaccatgttggccaggctaatctcaaactcctgacctcatgtgattcacccacctcagcctcctttgggattacaggcctttattattatgttattattattattattattattatttattattataggtcattatcttccactactgttcaagtgcctacctctatttgcctttctgtcttctttttaatttgctcctatgggcttagaaactaaatagccaactaaatctggtaaaattatttatcacttaagataaatatgtttaaggaataacccgtgaggcgttccagttgaataagatgcatgtgtgtttcagtgcatgggtttttgtgacttctttaactctcagtgacctttttgcatctttcatggttctcagccctgttcgtaataggtaaggcagctccatagttgagttctggaaatctggggtgctatactttgatcatccagagaacagcataatccctttttttttttttttttttttttttttttgagacggagtctcgccctatcaccagactggactgcagtggtgatagggtatggtactcagctcactacaacctctgcctcccgggttcaatcaattctcctgcctcagccttctgagtagctgggactgcaggtgcatgccactatgcccagctaatttttgtatttttaatagagatagggtttcaccatgttggccaggatggcctcgatctgacctcgtgatccgcccgcctcggtctcccaaagtgctgggattacagatgtgagccactgtgcccggctgcataataccttttccttttggccccccaaaatttcctggcacgtaacatattgtgaatgagtgataacttaaatacgttcaataataacaatttatctttggtaatactgagtgtgcttatatacacagcacctactctttctagaaaacctcctcccttggtgctttttatacggacccccttttgtttatttacttctcccagtcctcaaacatgcatgtattcaaacacatacaccctctccttccccagtgtcctccgttttctccttttatcattaggtttcctttt

SEQ ID NO: 14691 - DNA, 2300 bp, Homo sapien
atcacctgtgatcagcagtttgagaccagcctgaccaacatggtgaaacctcgtctctacaaaaaatacaaaaaattagcctgcgtggtggcgtgtacctgtaatcccagctactcaggaggctgaggcaggagaatagcttgaacccaggaggcagagattgcagtgagccgagattgcaccactgcactccagcctgggcgacagagcgcgactctgtcttaaaaaaaaaaaaaaaaactagccgggcatggtggcgcaagcctgtaatcccagttactcgggaggctgaggcacaagaatcacttgaactcaagaggcagagtttgcagtgagctgagatcaggccactgcactccagcctgggtaacagagcaagactccgtctcaaaaacaaaccaacaacaaaaaaaaagcatggtaaataacacaaaatacaacagaaaaaaaaatccaattataattaataaaaatagctaaattctagctaacagagatatattttcagaatacattttctaaaaagtccagttataggctatgtctgagagacaggtgaaaaacataatggaatattatcatataaatgaattgacacaaatatatctcgaaaacataatggagaatgaaaaaagatgcaaaatgattattcagtatggtgtcatttttgtaaagtttaaaaacaaaattaggtattccatatagcattgctggatctctacatcatatgtaataaaagtataaaaacacaaactggaatgatatgtaccaacttgagcacggtgactatctgtggggcggaagaagaaatgagagtggggccgtcgttatgactaattttgtatgtctttaataaatcccaagtacatgcagcaaaatgtattgatgtctgtttaatcttgatagtggggggcgtgggtagtattaatattattttccgtactcttccgtaggcctctaatatttccctctttacagaacactgacacacgctcagggctccccgggacatctttgtgcacatcaacatttatgctgagagtagcttctggactccaaagaggaaactccccgggcactgtggcccacgcctgttatcccagcactttgggaggctgaggtgggcagatcgcttgagcccaggcgttcgagaccagcctgggcaaaatagcgagacccacccccgccccccattgctacaaaaacatttacaaactagccgggcgtggtgacccccgcctgtggtcccagctggtcgggaggctgaggtgggaggatcttttgagcccgggaggtcaaggccgcggtgagtcgagatcgcaccactacactccagaccgggcgacagagaaagacatccattcactcccccaaaagaaggggaaattcgctgaggctgagcgctggtttcccaaggtggggctggcacctgctgaagctgccacaggagtggagaggccgtagggagacttggaaagaacctggaaagggggccggggctatggagccaaggctgcagcagggctggatggtgtttgtagtttgtgcagaataggaggcagtttttaaagccgagatacagctctggttgactggagcggggaggggtgggtgtgagaggtcaggaaaccagcggctggaggccgggggcctggagcggcagggctggcgggcagacgttaggccccaggcaaaatgggcgcaccccctgcgggggcccgaggtgacctgctcgaggtccggtcgcccaggttccacctggagaagaaaatcttcgtaatttggctgggggaggggggatgcgggcacaggctgtgttctccacgtcgcgtagacgcagaggccatccctgggtcggagagtctccgtggagtggcaccccagcgttccccgtacgccggggccactttgtcgggctgacgggggtccctccaggtggccgccggcggcgggtcccgagccagaccgggaagcggggagcagccctcagcccgcgagcgtggggccggggcagactggaggccgggcgggccccgccgagggtggggcggggccgggcgcacgggggcggacctcggcgcgctcccggccgctcgctggctccggggccgcggcggctcctctgccgggtcgcgccggacgactggcttcgggcggcggccccggcggcctgtggacggacgggtgggccgaggtacaggccccacggccgccgtctcccgcttctgcccgcgcagagtccgcgccatggccgcctcgccgggctcgggcagcgccaacccgcggaagttcagtgagaa

SEQ ID NO: 14692 - DNA, 2300 bp, Homo sapien
gggactgcaggcgcccaccaccatgcctggctaatttttttgtacttttagtagagacagggtttcaccgtcttagccaggatggtctcgatctcctgacctcgtgatccgcccgcctcggcctcccaaagttctgggatttacaggtatgagccactgctcctggccttttttttgagacagagtctcactgtgtcacccaggctgtagtacagtggcatgatcttggctcactgcaacctctgcttcctgggttcaagcaattcttctgcttcatcctcccaagtagctaggattgcaggcatgcaccaccacagctggctaatagttagtagagacggggtttcaccgtgttggccaggctagccgtgttcttttttaacagtctttgaaggcttcggaaataggtgctttgggagggagagcagttatgggggattgtgagacggccttcagctcagttgagggcaggtccctatctggatttataacttagtttggttgaagtgtcaaggcttttgggtaagagttgaagcctttgtgagaactctctgaaggcaggaactttagcatacattcatcttagtaagccagtgcctggcatactacctgacacacagttaagtttttgtatcagtaaatcaatggataaattgatccttcaaaaaagaaatcaaaggctttaaatcaagatggctgagaattttgtccagagaatttcaagaatagtcagatgcttctgataagtacttttagaatgttaagattgaaagctgagagactttattcctataactccactcctagatggaaaaaacaccatgtcgtcctcctcatgtttgactctgagatttgggttttgattaataggttataactgtctccctgtgcagtacatttaagaaatcaaatacagcaggtataagggaagttaaagccactgaaggatttcgtatgcctttaaaatttccaaacaagtataagtctttatcttttgagaatacatattgaaatatggagtgataccatgtctgaaatttctgtcagtgaggcactgcgggtagtggagagggtaaagatgaaagatgattgtatataagttggtaatttttaagctagaagatggatagatggggtttcattatacttgtctttatttcacatatactatttgaaatctttcataataaatgtaaaaaggaaattatcagagagcttcataggttcaacaatgcttttggtaaaccaaacttcaccttttttttttttttgagtttgtaattagtatgatcatcgagggaaagatgggacaaaggaaaagagcatggcagaaatgggcatatgggctttgaggctgacagccgtggctcagcctcctgctagccacgtggcaagtcactgaacttccgagtctgggtctccaggtctgtaacagcaggagagtacagtctcatttgcatggttgtggggaggattagggatgaagtgggccaagtgtccgagaacagcacctggcccatcctaggggcttagatctggtagtgttttattattgttagagacagagagtgatgaagggtaaaaatctgccccagggctctcgtctataaccctttcttctctatatgaattatagtgccaagggttatgtaaccatggagctaatttattattttagaaacagaactcttaaagaccagatcagaccactttgagatttacaagaactgtaaccagtttattgctttttgaaaaatgaagtaaggaagaacttacaaagaaaagcatattaaaatggtgggatgccattttatacctattgaattgacctccttccttaccccaattaatggtaatatccaatatcaatgagtttttttggtgaaacttttctcatatgtatattataaactctttgggaaagcatttcggcagtatacgttgagagccaccaaaaggcccatatccagagatttagtaatcaccctttggaaggtgttctaaggaaataattcagaagaactgttatatacccactaaaaattactctgtaatagcatagaaaaggcttatgatgagcatgctaggttgtacctatcttatgatcacagctatgcagttcttaccataaatgtaaacggaggctggaaaagagcatgaagaagggaaaacagctaatgtgttagggttgtggatagtagcttagtttttctttcagaaattcttttattgttgttaaagattatgccagtgtatccaaacatacacactcaaagaccttgcaagaggacgttactatc

SEQ ID NO: 14693 - DNA, 2300 bp, Homo sapien
aatcctaatgcctctcctggcaaagaagacatttcccaccaaatcactaagaactcatgagagcctccgttttcctaattccagattctgtatttatttgagctgcccagcccaggcctgcaggatagggccccactccatcaaggctcctgtttcctcctgagcccgagcagatggtaccttctcttatagcctccatccttcccagaacactccaggtactattttctattttctgggggcatttggcatagttcactgtttcctgagaggcagcatagcttagcggagagctctcaggctttggtgtcagtgatttgtgggtctgacccctgatccaccaggcgtgctatctgatcttggatttctcagctcttctagaactgagcctcagtttcttcagctataaaatggggaaaatatctgcctctcaggattgaggttaaataaagtgtgaactcagcacaggcctggcacacagtaggtgcttagatatctgttttcaaatttctgtcttaatgtgtagtttgtatcttctttattatttccaccttaagaaataaaagtttgggatgaaaagtattattggtaactgccgaatgtatatttaatccaatcagtgatccaggagacaaaaggaatgggcttggtttgggtgagtgataaggaggcaaccttccacataggaggtgagaaaggggaaatggccttagcaaaggcagaggggcaggaaaatacaggctgtgtttgtggaactcagaaagctggagggaagacaagagcagaagagaccattgtccccaaattgtggatcaccgcaattactaagccagtaagttttgattttgccttttaggctgaacaaaatcattgaagatttcttagcagaataatatgattaacagtgtcttcagaaggctattgtgtgggaacaattaactaaacgaatgaaaacagcgcccctctgctcggtgtgtagtgcagcatcccatttgtgtctccgtgcgtccagaatatgctccaaggcatggtagacccagtgaacaacacaagactgataagacagtgcccccaacaacactggaaagtttacctttcttcacacatctaatgcgcctcttttttggttataaataccaggaaccgccgggcgcagtggctcacacctctaatcccagcaatttgggaggccgaggtgggtggatcacctgaggtcaggagttcaagaccagcctggccaacgtggagaaaccctgtctctaattaaaaaaaatacaaaattagccgggtgtggtggcgcatgcctgtaatcccagctactcgggaggctgaggcaggagaattgcttgaacctgggaggtggaggttgcagtgagccgagattgcgccattgcactccagcctgggccaaaaaaaagagtgaaactccgtctcaaaaaataaataagtaccaggaacccaccttaacttaaaaaaagaaaatgtattggcatatgtcactggaagcccaagggctagatccaaggggtcatacaatgtcattgagacctacctctgtggtaccacttctgagatgacttcaggcataacagacaggctttctccaaggtgaagacccccaggttcagacagcccttgggcttaccagccctattggggcactccttttttttccactcaaaagcactctccttggttctgtttgcgtcgtgagccgatccctgagccaaacactgtttccagggggtgaggtacctagactagaatcctgggcctgggtccctcacatgtggcacagagggaatggcagtgttaccaggtttggagcaagagtggagacagttcctgaaaacaaaagttgccggacaggcaaaaaataataaacaccccacaaaaaatcatgcaaagaaaacaccggttagaagacagcagaatagacttgtcctcaaggagggagataagagaaagcatgaaggaagagctgtcaggtacagggataaggaaccaaaaactcagttgtttaactctctgtgagtccaccttgttaattctgcttcatctttccattaatttttatttttcctttattaaaaattctactttgatggtagtgcttttggagccaattattcctcacagcctctggatgagagttggccaaggtaagcaagacatactttaaaagatatgatgggcatgtgttatttttagataatttcactttatccactttgaatgttgtttagaaatttctaatataaagcatagaatcctgttttctcttataacatttaatttca

SEQ ID NO: 14694 - DNA, 2300 bp, Homo sapien
cagtacctttcagggcaatttttatttatttttatttatttttatttttattttttttttggagacggagtctcgctctgtcgccaggctggagtgcagtggtgtgacctcggctcactgcaaacctccgcctcctgggttcaagcgattctcctgcctcagcctcccgagtagctgggactacaggcacccaccaccacacccagctaatttttttttttgtatttttagtagagatggaattttgccgcattgtccaggctggtctcaatgattatcattatattaatgattaagtcaggtaacatttgaagaaaagagaatcaacaaggatgttgacaaaatacgctcttcaaaagagagtgatgtaaatatcaggattaagagagacacctgggaacactgacaaagcatggcctggtttagcagaaatgactgctgccctggtggtactggacaggttgcctgaagagcattgtatcctccccttaccgtgctgtcaaataagttagaccgctacccatacttaattcattctagaagtccacaactgcatttatatcatcagttttattaaatacaagataaacttattttagagtttttgtttcaaagtcttttctcaaaatttactaggaaagtttgggccctgtgtcatgtgacttctttctggggtccattattcttgggtacccggccatcttgtgtggggctaagacaggatagtcatgacagtcacactggagcttctgtggccactggaactcaacagcattcctggttctgagtagtcactggtgtccctaacttggaatccccttcctgacatcagatcacttaactcctgagggctggcccttgttttctggtctctttctgagaataaaaagtatttacttgttctgtgacccagcattcttgttttacctggcacgactgagagagttaaagcagaaagccctggaatggtccctttatacaggttgtttcatagcattaaagagccaacagccgtcccggcagctgcccagcctcagatcctcttggttgttggttcctctttgtcccccatttccatcccacaaccaaggagcttcactgccaccatgtcttccagctaatactcctcttctcaatactttccccatttcatcgttgttgcaggttctctcctcatccctcttcttccattctctcctttgccaagcctgcagagcccccctgccctggcctcaattgtctacattttacttcctaccatccccttgactcagcctacactccagttgaaaagagttgctccactcttaccttcccctctcttggaattcccttctcctgtgtctctaaagggctccccccagtgcccagctccaaagccctcctggcctcttcctcttctgcacttcatctctcagcagcatcataccctcggctctctcgggcttccactcgttttttccttcagtgatcgttatttatgtgttgcccttatccactgactagattacacattcgtgaaaggttgaatccatgtcttactcatttctgcaactcccacagtagtgcccaaagtggcttccctagtagacagtccataaatgagtcatttttgtgtgttaaataagtcaaacattttatttgttaaatcagtttttacaaagataatttgttcagccaaaggtaggtaggatggatgctttctctttttgttgttgtctttgtttttttgggacagggtcttgttctgttgcccagcctggagtgcagtggcaccgtcatgactcagtgcagcctcagcctctcaggctcaaggagacctcccacctcagcctcccaagtagttgggactacaggtgtgagccgccacacccagctaatttttaaattttttgtagagacgggggtctcactatgttgcccaggcttgtctcaaactcctgggctcaagcgatcctcctgcctcagccccataaagtgctaggattataggcgtgagccaccgtgcccggcctggattcctgccttctcatgcaatgactgtgctgctttttttttccctttagtagcatctttccctggcccattgaaagaagagaatctgttaaatgttccgaagccactgccaaaacaactgtgggagaccaaggaggtgggtgaacagtactcagctatgtttgttgtcactgaatgtttgtacttagaggtcattgaaaaatcctgcagaggtgaaagcaagaggaactgggggaaaaggagaagatttgtctgagaacagagataagaatatacaagggaag

SEQ ID NO: 14695 - DNA, 2300 bp, Homo sapien
tccatctcccaccactaaccagccctcctaaactcaacctcccgtggtctgaatcctcacagttctgagggcacaccatgtggtctcacacctccctgcttttgcgcatgctgtgagctttgcctgaaatctttttcctgactagatcacctgagttctttagcctttaaactaagctcagatgtcctccaaggaagcctccccaggtcagctgggcttccctccacatggcctccctccaggctctatcactgcactactgaattgtattatgttgccggttatgctccttatggctcagtctcttgaagccctgatgccagtggctggcccctgggaggtgctctgctgatgtgtgcaggagggaatgaagtgtcctcaggattcgtgacttccctctgctcctggctggtggcaccttctcccgcattctcctccgcgtcaccctcactgctcttttcctatatcacccctggaccactgcaggtggtccttctaattggttctccctgcctctccttctgcctgctgaggccatcctccacactggaaccacagtgacatttctgaaacgccattctccagcttaacctggcctccctctttccacagtccctgatccagactcctgagaacagcacattctctcccgcctgcctctccctccccatgtgccaccctccctcctcaccctctgccctgacacctgacacctcagccatgcccagctactcttaattccacgcacacactgtgtcacatccatggcaaacccgtcccctccacagcccatcctgacatggacaactcctgcttttttgctcccggtgtcacttatatgcactggttacacacaccccttctcaaacccagcatagcgcgcttcctgccacgttgcagttacttgctttcccaggctgtctctcctgcccatctgtgaattccaaaacaaggtcctctcagacctggctagcaggcccctccctggggccccgcccttgagagggcttcattcccaaagggaacgtaccaccagtgtatacgcactaggcctggggggtggctagagagtcagcagggtgtggacagagtttggctgcataggctgggatagctatgtgcgtactgcagtacagaacagaactagggggaagagaaggggacgtggactgagggccaggctgtctccctgtgcattctggcacagaactccaagaagtctgagaattctacatgtaaatctggcttcacaggctattatgaaggtataatatgtcaggatagacacatagaacaaagttcatgtaagggtttgttcatttgatttataacttttaaaaatggaaacagatggtatgcgggccttcttttatactcttgctccaggcctgtacatttcaggagtaggcctgaccccggcggacacactcgccctgcttgttcatcatggtgccgccaacatgcggcccgctgcctggcacacagtgcctagcccatagattgtgatgaatgaatggcaacatctctttgtcactttaaagtttatgaagactgtaattttaaaaatatatcttggaaggtatattggaaggtagctagttactcagagatactttttctggtagcaaagataacttaaaaatctagcaaaaagaactacataaatagcagtgcctcacattttatagagtggtttataattttcagaatacttttgcatccataatctaatctggtcttgattattctagaccctaatctagtattcctgtaatgtgggcacaggtagtgggtgaggatatgtgtttcggagaggttaagccgagcaccagtgttctcagaatcagagaggccgcaccaggacctcggtcttttgtagccactgctcttatttgacaaggaaaaggtttcagccatgtttggtttcccaacagccaaatacattgtagaaagtcattcttaatctttcttttttcagtgcttttccacataatggtcaaaacctaggcctctcacccttcttggggaccttgaacactggagggtcattgccagatctaaccaacctccactactcgacacccctgccagcctccctggacaccaccgaccaccactttggcagtatgagtgtggggaatagtgtgaacaacatcccagctgctatgacccacctgggtataagaagctcctctggtgagtatctcctgcttagcagtgacctggtggcttaatcataggtggtccccacccatgtggcctgttcagtgaatcattgaatgagaatgactgcatcccag

SEQ ID NO: 14696 - DNA, 2300 bp, Homo sapien
gggtactcactttttatagttttgtattgtttgtgaatgttttctatttcatatgttttgtaattaaagccaaaaagggtaatgacaaaaaggaaaaaaaatgctatgtgtctgactttcgggaatttattagagggagtggaaattctaccacctcctattgctaaatctcattaaaatgcccttgaaatcaacccaaaccaactctcaggcacagccagaacaacggaggcagagcagagctcaggatcctgaatccacaccccccggccactcctggtgggaagagaagaagaggagagctcgcttcccaccatccccatcccacctggctggagaggctgatgtggggcgaggtttggccatcagtccacagaggggacttcatgtacacaattcattaacatttattgagcacctatgatgtgccaggcactgttctaggtcctgaggatatggtgatgaacaagatccctgctctcataggttacccagtgggtgccctaagcaggcaataaataaatatgtgagcaagatgacaagagaatagcagaaggcactaaagttttggagtaaagccatgaactctttttttttttttttttttttgagacagagtcttgctctgtcacccaggctggagtgcagtggtgcgatctcggctcaccacaacgtctgcctcccggattcaagcgattctcctgcctcagcctcccgagtggctgggattataggcacgtgccaccacacccagctaatttttctatttttagtagagatggggtttcaccgtgttggtcaggctggtctcgaactcctgacctcgtgatccaccagcctcagcctgccaaagtgttggaattacaggcgtgagccaccgcgcccggcccgaaagccatgaactcttttcccaattattttcttattgagaagcatctctcagcttgctgttgggttctgctgttagtaagcgtaaggatggaggaaggctggctgatgacattaagcagctaaaggcgtggactgtcgaggccaaatagcatcagctctctttggcttccccagcccatggaacagtcttcctattttgcgaatttcctaccttatgaactcacacctgcttatgatggaagccagaacctttccccatctctcttgaagattgggcacagcatacaacttaagacaccacccgttggctgctcctgcatgaggctaagtgacactgagaagcagatgactggagtcctttctgtcaggatgacagcagatcccagaggcagcagcagaaagaaccagtgcaggtaaatggcctttgagcctggttctctgatttcgctaagattttatgaggcacctcctatcctttaataggttcctctgtagcttaaaagcagctaaagagcagtctgttgcttgtaattaaggactcctaccagtacacgaagggagaaaagcaataatcaaataaattactttcagatagagatcagtgctaggaggaggtcagcacaaggtgatgtaagacagagtgacaggtggggtgagggctacacttgataaggggtcagtgaagcctctctgaggaggtgacgttaggctgagacccaaacaatgagaaggaactagccatagaaagatctgggcgaggagacttctagacacggggagcagaaaatgtaaaggatgagcttcagatgttgatggatgtagggagggttgatgtgtttggagtttagtgcaggtgaataaagaggaacataatgagattggaaagtaggtaggagtcagttcatgccaggccttgcagatcatggtaagacatttggattttattctgaggttagtgggaagccattagagagttttaaacaggacataatatagtacctggggtagccagcctccaaaacatcctccagtgatccttgcatccttgtatttacactcttgtgtagcccctctcacattgactagggctgacccaataggatgctgcaatgtgacggtatataactttcaaggataggtcataaaagacattgtgactctgccttggtctctcaaatgtctccctctggggaagccagccaccatgttgtgaagatactcaagcagccctatggagaggcccacacactggggaggcactgcggctttctgccgacagccttgtgaatgagacaccttgaaagaggatcctccagccccagccaagctttcaaatggttccaactctgacatgctgacaacttcatgagaggccctgagccagaaccacccaaactcctgacccatta

SEQ ID NO: 14697 - DNA, 2300 bp, Homo sapien
aatcctaacactttgggaggccaagacaggcggatcacctgaggtcaggagttcgagaccagcctggccaacacggtgaaaccctgtctctactaaaatacaaaaagctagctgggcatgatggcgggtgcctgtaatcccagctactcgggaggctgagacgggagactctattgaacctgggagatggtggttgcggtgagccgagcttgcgccactgcactccagcctgggcggctgagtgagactccgtctcaaaaaaaaaaaaaaaaaaagaaatgcaaattgttttcagtagaatgcaattgattactaagctgtggatttcatcagttctgccagtttttgtatatatttgtagttatttcattattcctcatttgactatgtgtgtggtactttgaattttccattgaagcagttgtaatctttctggatatctcattcattaatgagttaaataaaatctctaacatttattttatatctgtattatatttgatattaaaattattcttcaacagtagtatacagttatatgaataagctgcaatttatctattcatctattggtggacatctgggttttttccctttggctattatgaataaagctgctatgagtcttttggtgaataaaggcattcattttttggggtaaatatctagaaatgggatttctggggtatagggtaggggtaaatttgatttcagtagagactgatgtttccaaagtggttgtaccattttacactcccatcaacactgtatgagagtcccatttctgcatctttgcaactaagggaattgtcagtcttttcatttcagctattctatggagtgtttaatagtatcatattttggtttcaatttaccatagaagattttcaggagggaggtaacttgaacagatttttacattttagaaaactctttctgcgtattatgtggagaatgattatttgtataccaaagttcatagcagcattattcacaatagccaaaaggtgggaataaccaagcatccatttatatggatgaatggataaacaaaatgtagtatacatgtataatggaatattatttagcctcaagaaggaagaaattctgatacatgctacaacatagatgctccttgaagacattatgctaagtgaaataagccaatcagaaaagagcaattattgtatgattcaatttatatgcggtacctcgcacttacagacagaaagtgcaatatcggctataaggggttgtgagaaacgggtaacggggagttactgtgtaacaggcagattttctatttgggataatgaaaaagttctggagatggatagtggtgatggtttcacaacaatgtgaatgtacttaatgccagtgaactgtacacttaaaaatggtgaattttatgttagatagattttatcacacacacaaagaggagggagggcgggagggaaggagagagggaaggaagtagagaggggagaagagaggaagaaaggaaagaaagtaagatctggcatcacagggcccacattcccgcgtgtcagcaataggctgaaacagaagcatggtttctcacgtgtccatggaggcatctgagtgtgtgcccactttcccggttcaatgacaatttgcacctgctcgtgtagaggggtacgggtgaaacagagaccagtattattaaggggatggagaggagagaccgccaaaacatcgcagagacacaccgtcggaaccaagagaatggggtgcagacgcctggcttggcctgtgggaactggcaagtctcagctctcaaacgcccgggcttttcaacccgccacagccgggttccagctgcctacttcctttaaagccttcaccgactctaaaacaccaaaaacaaagacccaactagctccggaagcccgagatgtaaccgtagtcatctgaccctcccgtccggactctgattgggctttggagatacgcgtccctcccggcgctgtacggcgaccccgccccagcagcctgagggggcgggaacagatgtccgagtgcgacagtattggtcggcttccccaggaagcagccaatcggaataggcaagcttccggcgggaagtgagccagggcttggcgcggcggccgtggttgcggcgcgggaagtttggatcctggttccgtccgctaggagtctgcgtgcgaggtgagtaccgcgcgcgtaactacgggtcggtccgcattgatctagccctgctctggcggcccggcccggagctggaggccgctcgggttcttccgtttcctgcactg

SEQ ID NO: 14698 - DNA, 2300 bp, Homo sapien
acatttgtcattctatttttcccaagtccctgataataccgttccagacatgttgatttgatggcatcagtcaacggaaagactctctggggcctgccgtaggccagaggacaggctctccgggccacactcaggggcgactgagccaactcttcacgccattcctttccttccctgcctaggacgaccttacagcccatgatcgcttttcttcttcttcttctgtttgttttttcttcctgttttctttttaagtactacagtgaccccttatttattcagcaaagaaatggactactccacagtagtgaattttcaaaataatgcccttcaagcactaaaactttaaacaacacatcttcaaaacagctttgctgaggtataactgacacactataaacggcatggatttaaagtgtacaacttgatatgttttgatatatggacacacccatgaaaccatcaccacaatcaagataatgaacatgtccatcattcccaaaagtttcctcccgcccctccctgcccccttccccaagcaagcactgatctgttttccaaatacgtctttaatgctacaagggctcacacacctccccaccttagaaaatggagtatgatcaacatgattgatcctttccttgattcagcattatcaccaacacgatggaaagtgatctcagatgtcatgaggatgcatgattgtttgccctgatcactaaacggcccattgttgtgctggcatactgggcagtttcaagtttgggagttttctccctcactgctagctgtctcagagcttagttcccagcagacaactcttgctgcctcgaaccctggcacactaaccaccatcctgtgacgttcccactcctcattctgcgacagtggttctttgctgggagagatttttgtctcccaagggacatttggcaatacctggagatctttttggttgtcatcatgggagcgggaatgctactagcagctaatgtttagtgactagggatgcgactgaacatcctgcaatgtagagtgcagtgtcccctacagagaattatccgacccaagatgttgataatgccaaggttgagaaaccctgttcaggatgacaaactgattgaaaactcaacaaggggaccgggcgtggtggctcacgcctaataatcccagcacttagggaggccgaggtgggtgtatcacttaaggtcaggagtgcgagaccagcctggccaacatggcaaaaccccatctctactaaaaatacaaaaaaaaaaaaaaaaaatacgagtggcgtaagcctgtaatcccagctacttgggaggctgaagcatgagaatcgcctgaacccagaaggcagaggttgcagtgagctgtgatcaggccattgcattccagcctgggcaacagagcgagactcttgtctagaaaaaaaaaaaacaaacccataaaacaaacaaacaaaaaaaactatgaggattgagtgattcacatttctgaatcgagagagagaaggatgggcagcaggcttgttgaagctggaaggccagggaggtcgcagactgaggaagaccctggtgtgtcccaggtacctccatgcaaccctactagagaggtggtctctggcttcctatggacaagctctaagggacccagctatggggcaccagagcccagcgttcagcagctgctcaatgaatgtctgccaggcgagactgcacccaaagcatttattaggtacataattgtggcagcactggctggccatggaaggcaaggcagaacacaaggagctggagctggcggaaggaagtcattaagtcagccagtggctgggatgcagcaaagccaggcagaaggtaagtgcagacccaccccaataaatgaggaaaatgagaagggctggctggccatgttaggatccagttccagtgcgaccagatatgtcaccaccacatcacttttagctcctccccccacccacagacaccctgtttgcctgtcatataaagaaggttttcccaaagtggtttagccagaactggaagggccccgccctgtgaagggataggagcctgactgttgcagctgcagtgagtggcggggaagcagcagcggccaggatgaatcccaggtgctctggagctggatggtgaagtatggacatgctttattcgattttgcattgacttaaaggtttaattattttaggagttcttgtagacattcctgaaaaatgcaggtaggcaaaaagaagaaaacaaagatcgcaaatgtgaccctttcattcggagagaaca

SEQ ID NO: 14699 - DNA, 2300 bp, Homo sapien
gctcccagggtcccacatcctctgttaaatgagggacttggggtggggggggcggtccttccatcccctagggctggggcgcctagctgcccagccattgatcaggccagctttctggaaccaaccacccaaagcaccatggggctgtggttccgaggcctgccctggaagtcctgtggagtctgcccgcagggatgtgcaggagctgtattgtagatgtctcctgccatcagctgtcaggttattttggtccaaactgaaaatactccaggaattgtgtgtggagtacccccagcctgcagggtgggactgcagcagtcagggaggccggttgtgtctaagggcagcttctggagaagcaaggagttttctgtggtgagcctgcctctctagctccccagggcctacgtgagctggggtgccttccttttggtatccggcagagtggccttggctatggaagtgctaagggcatccagggccctgctgctgctcagggagcttggcactgatatgggatacccccagcagcactgctgggacctcccctagcttcccccccttcctccagggccttggcttctggctagtcaggggcactatgtggggacagttatgtggccccgggcagagagaggtcccgccgtctgtttgctgaaggaggaaaaacaacactcggactattgattcagtctcaccttggcgctcctggctcagcagccagtgtttgccctggctgcctgggctcggattacgcaaggctggtgggcgtggagcaagcaagggggcagctgggggcctccaggcccaggcagggcagggcttggcggccccagcgttccccaggaaactgtaaaaacgagtctggggccctgactttgctgatagcggccatctcagccatagagggaggtgaagcctctgtgatctccacccccgcaccccctcaggacatggcccctaaaagcaccatcccatttagggtcacccattttcttcctaggagctgtggggctttgcgaataactccctatggctgaatctgctttgctgaactaggaaaccctagtgagttgtatagatgccattcatttaagaaccttgaaaagccaacatcttattcccatgtaaaacatacctaggtgatttggagaatacagtgacacaaagaagaaaataacaattacttgtaattctcaccatcttgagagaaccaccgttaacattttttagcgtgtgtatccttccagatttcgctttagtttgtataaatatacatgtataaatagtttttaaaaaataaaatgggattatgtgtacatactgctttataatgcatcttctttaccttgatcatggtgaacatttattcatttgttgtttctgattttgagtgactcagggcttgatagtcttcatcctgcttcttctgttacacttttttttttttttttttttttgagagggagtatcgttctgtcgcacagactgggaatgcagtggcgcgatcttggctcactgcaacctccacctcctgggctcaagcaattcttgtgcctcagcctcccaagtcgctggcactacaagcacccgccaccacacttggctcatgtttgtatttttagtagagacgaggttgcaccatgttggccaggctggcctcgaactcctgacctcaggtgatccacccgcctcagcctcccaaagtgctggatgacagaagtgagccaccatgcctggcccttctgttacatttcttatattcttgcatggagaaaggattgggggggattgtgagggcatccatctgtccatctatgtggctggccttgggggctagatttcttctggggaggactaatttttttacccttctcccccagatctcatttcaggccccaattgaaacttggggtgggcagggcagctttagtgcgtagcaggggaggaactgaccctctctccccttttcccctcttgttcctctcagggtcggcactcttcaccctcccgagccctgcccgtctcggccccatgcccccaccagtcagccccgggccacaggcagtgagcaggcacctgggagccgaggccctgtgaccaggccaaggagacgggcgctccagggtcccagccacctgtcccccccatggagctgaggccctggttgctatgggtggtagcagcaacaggaaccttggtcctgctagcagctgatgctcagggccagaaggtcttcaccaacacgtgggctgtgcgcatccctggaggcccagcggtggccaacagtgtggcacgga

SEQ ID NO: 14700 - DNA, 2300 bp, Homo sapien
taggaagggaccaaggcaaggcaggtgcctccaggtgtgcacgtggcatgtggcctgtggcctgtgtcccatgacccacccctgtgctccgtgcctccaccaccactggccaccaggctggcgcagccaaggccgaagctctggctgaaccctgtgctggtgtcctgaccaccctcccctctcttgcacccgcctctcccgtcagggcccaagtccctgttttctgagcccgggctgcctgggctgttggcactcacagacctggagcccctgggtgggtggtggggaggggcgctggcccagccggcctctctggcctcccacccgatgctgctttcccctgtggggatctcaggggctgtttgaggatatattttcactttgtgattatttcactttagatgctgatgatttgtttttgtatttttaatgggggtagcagctggactacccacgttctcacacccaccgtccgccctgctcctccctggctgccctggccctgaggtgtgggggctgcagcatgttgctgaggagtgaggaatagttgagccccaagtcctgaagaggcgggccagccaggcgggctcaaggaaagggggtcccagtgggaggggcaggctgacatctgtgtttcaagtggggctcgccatgccgggggttcataggtcactggctctccaagtgccagaggtgggcaggtggtggcactgagcccccccaacactgtgccctggtggagaaagcactgacctgtcatgcccccctcaaacctcctcttctgacgtgccttttgcacccctcccattaggacaatcagtcccctcccatctgggagtccccttttcttttctaccctagccattcctggtacccagccatctgcccaggggtgccccctcctctcccatccccctgccctcgtggccagcccggctggttttgtaagatgctgggttggtgcacagtgatttttttcttgtaatttaaacaggcccagcattgctggttctatttaatggacatgagataatgttagaggttttaaagtgattaaacgtgcagactatgcaaaccaggcccagtctccagtgtggtaccgttgctcctgcatcgcagctgaggatagggggccagttaggcctacacagtggcctgcctgcctggatgtgggcccaagtcagaaggccaaagtcctccaaggggcgggaggatgcgccagcccctagtggaggagctggtgcccctggggtggggctggtgacccctggtcctcaggagctgagcactaaactcccaaagtcctggtttccagcagtgtgaagaactgggcctattgtgtcttcctgggctgaagtgatctggtcgccacaggctatagggctgaggcctaaggtggagggaggcctgactgaatcaagatgacttcttgtggggagcctgagtcccaaatggaaaactccacgcctgtccgctccccaacccctgccccttgatttccccaggtctcccttgggacaggaagcccctgcctgggggtaggaggatggggacaaaaccactaggatctgtatccgagaagcagtctctgttcgggatatttacttggaaattttattcaaatggaagctggcgcctgagcctctccttagggaattccgtgaggtggggagggctgggaccagggttccctctttctcttctgcggtggccctggcctggtgctaggactgcgcgcctcccctcagtacccgcggacaccctgggcttccctgggcccagcatctgcctggggcctcgccctgggctccccctcctgacccccaccttgcgccccttcccggtgttcccggggcgctgccgggccctggggcctgcggggcgcgggcggctcttggctgggccattctttcccggccccctcctcccttccgtttccgtggccgtgcggccggctagaggctgcggcccagcgcggagcaggggggctggcaggcgtcggggcggtcgggccggtcccgcccgccccttcccctccacaggcccgccccggggcctgggccaactgaaaccgcgggaggaggaagcgcggaatcaggaactggccggggtccgcaccgggcctgagtcggtccgaggccgtcccaggagcagctgcccgtgcgggtacctctagccccggggcctggaggagcggtgggagctgggggcgcggcaggcaggggcagagcaggcgttccgagggccagagacccacccaggtgggggtaggggccgcggaagggcggggatggccgcag

SEQ ID NO: 14701 - DNA, 2300 bp, Homo sapien
cacaaaaaataaaaaaattagggccgggcacagtgactcacgcctgtaatcccagcactttgggaggctgaggcaggtggatcacctgaggtcaggagttcgagaccagcctggacaacatggtaaaaccccatctctactaaaaacacaaaattagccaggtatggtggcacgtgcctgtagtcccagctatttgggaggctgaggcaggagaatcgcttgaacctgggaggcggaggttgcagtgagccaagatcgcgccattgcactccagcctgggcaacaagaacgaaactccgtctcaaaaaataaaaataaaaaaattaaaaaataaaaaaattagctgggtgtagtggcacatacctgtaaggctcagctactcaggaggctgaagtgggaggatggcttgagtctggaaggtcaaagatgcagtgagctgagatggtgccactgcactccagcctgggaaacagtgagatattgtctcaaaaaaaagaaatggtcgttaaataagagatagcattgatcattctcagcaaactaacacaggaacagaaaaccaaacaccgcatgttctcactaataagtgggagttaacaatgaaaacacatggacacagagaggggaacatcacacaccggggcctgtcgggggttgggggcaaggtgagggagagcacctaatgtatgtggggcttaaaacctagatgatgggttgatgggtgcagcaaaccaccatggcacatgtatacctatgtaacaaatctgcatgttctgcacatgtatcccagaacttaaaggaaaatttttaaaaatgagatggcattatatatctcattaatcagctaaaacattgtttaagcaatatccagcagtttgttattgatggtgtaaactggtacagtcttttgggggagcgatagtgtcatcagtcatctctgtccttatcttttgcccgggtaacttcactgttgcaaattcatcataaaataacgtcttaatctgttcgggctgttaggacaaaataccataaagtaggtagtttatcaacaacagaaatgtattttctcacagttctggaggctggaaagtccatgataaggcataagcggattcagtgtcgggtgagggcctgcctgtggtgcacagatagtgccttctagctgtgttctcacgtggttgaaggggccgactctcggggtcatttgataccggcactaatcccattcatgagagctctcccttcaaactctgttcacccccaaaggcccatctcctaataccatcatcaccttgagggattaggatttgaacatgaatttggggggtcacattcagataatgttatatataacttaaaaagaacaaaaatgtggaattcatggagatgttcattgcagtatggattacactgaaaaactgtaaacaacctagatgcccagtaaaagggaaacagccaagaaaagtctgtgtcttgttcactcgctggcaggaaacatagagcaggcacggaaaggaaagggactcgaggaatgcgctgtaccgacaggaggcagcacccctttgcccgaggggcgcaacgacagagacctaaggctacctgggccggagccgggtgaggccgcggagaacgcaccccgctacgcgtctgccgagacggaggcgggcgtttcgaccactgcccgatcatgcgcttactcaagtaggattccgaaaaaattcagtcgcgcgtccctcctgaggttccgcagctggccaggcccggcccgggctggtgcggctgcgcactgcagcccagcggagcgggcccgggaggagccgggcggggaccgcggcggccagagctcctgtcagctccgccgggcacacgcaggccggggcgggcggcgcggctgtccccgccccgcacgctgctgggcccggcagcttcagaggctggcggacccgcgcggggccggcgcagcggagcgcgccggcggcccggggcccagcgggagcgcggcagcggcgcgcggagcagggggctacgggtgggcgggcgcccgccttcgcctgcgtcgctgcctgcacgcgggccgccgtccccgggcgtgtgagagccggcagctcggccgactgggcccggagcggcgcggaggccgggcgctgacggtaacgggccgggtgcgcgcgcgggagggctccggctgccccgacagaggccgggctcgggcggcgggagtgcgagcgccactgcggcgtcagaggggccaggaagggacaggaggctgcctgaggcccgtacctggcgcctgtctctgc

SEQ ID NO: 14702 - DNA, 2300 bp, Homo sapien
aggcccatctcctaataccatcatcaccttgagggattaggatttgaacatgaatttggggggtcacattcagataatgttatatataacttaaaaagaacaaaaatgtggaattcatggagatgttcattgcagtatggattacactgaaaaactgtaaacaacctagatgcccagtaaaagggaaacagccaagaaaagtctgtgtcttgttcactcgctggcaggaaacatagagcaggcacggaaaggaaagggactcgaggaatgcgctgtaccgacaggaggcagcacccctttgcccgaggggcgcaacgacagagacctaaggctacctgggccggagccgggtgaggccgcggagaacgcaccccgctacgcgtctgccgagacggaggcgggcgtttcgaccactgcccgatcatgcgcttactcaagtaggattccgaaaaaattcagtcgcgcgtccctcctgaggttccgcagctggccaggcccggcccgggctggtgcggctgcgcactgcagcccagcggagcgggcccgggaggagccgggcggggaccgcggcggccagagctcctgtcagctccgccgggcacacgcaggccggggcgggcggcgcggctgtccccgccccgcacgctgctgggcccggcagcttcagaggctggcggacccgcgcggggccggcgcagcggagcgcgccggcggcccggggcccagcgggagcgcggcagcggcgcgcggagcagggggctacgggtgggcgggcgcccgccttcgcctgcgtcgctgcctgcacgcgggccgccgtccccgggcgtgtgagagccggcagctcggccgactgggcccggagcggcgcggaggccgggcgctgacggtaacgggccgggtgcgcgcgcgggagggctccggctgccccgacagaggccgggctcgggcggcgggagtgcgagcgccactgcggcgtcagaggggccaggaagggacaggaggctgcctgaggcccgtacctggcgcctgtctctgcggtccccggggccgacgaagtcggagcgggtggggagggagccgggcgggcggccagagacctggcggcaggtgcctgccctctgtgatccaactctctccccagctccacccacattggcctagacccagtctctaagggctgaaaatattgcccggaagctcccgagcagaatcagatcgcgctaagtagggcacaacgcagaggcgacaaagctcctcggccccagggcccgcggagcagactccggagcgcggtcccgcccacgctcggctccgcagttagcgtcctccttcctcctgagcaggcaagcggagcccgagggcggtggcggcggggggcacgggtcccctgaagttgcctcgcagctgagcactgggccccgtctctcccttcccagggggccttcggcgtcactgcaggcttcctaggggtcccctaagtgctctgcaaaccgcggctggaagtttcccactgcagtgaacagtagagaaacagggagaacacacagggcttgctttatgctagaaacacaagcatctttcttctttattagaaagaaactcattctgtgtttctgagaaaggatcgtgccaggcactgtttctggtgagtgccagtttgacccgaaagggcactgagaaaggctttcctatcagtctctttgggttctggctaaacttttaaatcaaacaaaatagagactagcttattcacctgaaactagaagcacatggccgaggagcctgaacaggcacctcctatctaggcagggaagctgtgtaatcaggagcttgtgtggtgcgctccagtcggagctgggactcttatcctgggcccgtttttcatagcaccagccaaaggagagcgtcctctccaccctagcggcagagctgctaccaggaccaggtgggccagcctcagatgtgctgcttgtgctacttggagccaggcaaatgggtgttcctttggaacagccctcaggaactcactggggtatttggtggaaagactgccacgggcattttgcatgttggagctacagatggtgtccttcctgccaggtgtgtgtggaggccagtatgaagctgaaaaagcaggtgacagtgtgtggggctgccatcttctgtgtggcagtcttctcgctctacctcatgctggaccgagtgcaacacgatcccacccgacaccagaatggtgggaacttcccccgggtgagtcgtgcctggttgctaatttctttgtatacaagtcacctgggctc

SEQ ID NO: 14703 - DNA, 2300 bp, Homo sapien
actttgggaggccaaggcaggcggataacttgaggtcaggagtttgagaccagcctggccagcatggtgaaaccctgtctctactagaaatacaaaaattagccgggcgtggtggcacacatctgtaatcccagctactagggaggctgtggcataagaatcgcttgaacccaggaggcagaggttgcagtgagccgagattgcgccactgtactccagcctgggtgacagagcgagaatccatcttaaaaaaaaaaaaaggctctggaacatttcatttcctgttttgttactgacctgtgactctgtaaaagtctactttcgcaatttggattaataattttatgaatgcaaattggagatgctgttcaaaaaaaaaaaaatagaaaagtcttacaaaggaaagacaatcacagtgatagcagacatctagttagctacagtagacacctggagtccattcaaacctagagaaaactcagccttgaatttgctatcagctacaccattcaagagcacgggggaaatgaagacattttcagacatgcaaagactcaacagtttgcaatgtacaaaactttagtggaagaaagtaggtgtacttaagcaaaaagagaatttgtctaggggcataaactaatgagagggagggtacacctaaatactggctataaatgtaatactagtttatagtttaaaaagaggcaggaactaaaattctagaaagcaatattgtgaagagttattcaaggctgggcacagtggctcacgcctgtaatcccagcactttgggaggctgaggtgggcagatcacctgaggtcaggagttcgagaccagtgtggccaacttagtggaacgccatctctactaaaaaataaaaaataaaaaaatccaaaaacaggtactaagaggacagaccttgcatcaaatggtgctaggaaaactggacatccacaagcaaaaccatacatcatatattttgtatatggtgtatatacaaaaaaattacaccatatacaaaaattaacccaaaatgttcttgccacaaaaacaacaaaaaattgggtaactacgtgaaatgatggatgtgttaatttgcttcactatagtaacctttttactacctgtatgtagcctcataacatcatgtataccttataccaaattaaattgatttaaaaagaaatttaacccaaaatggatcaaaaactttacttgtaagagctaaaacgataactttgggaggccaaggcgggtggatcacctgaagtcaggagttaaagaccagcctgggcagcaaggataaatcccgtcactactaaaaatacaacaattagccatgcgtggtggcgcacgcctgttatcccagctactcgggagactgaggcaggagaatagcttgaacccgggaagcggaggttatggtgagcagagatggcaccattgcactccagcctgggcaacaagagtgaaactccgtctcaaaaaaaaaagctaaaacgaaagctcctagaagaaaacaggaaaagcttcatggcattagatttggcaacgatttcttagatatgacactaaaaacacaggcaacaaaatatataaagtggactacaacaaagtcatcttttcttaaaaaaatctcgttatcttactcccgcaaaactatttaaaaaaattaagttcaaagttctccaaaatgtaccataccctggggattactctgaactttgttcatttgttttcttttaattcggcttttttggttgcctttcacctactttttcgcagagccctccgctggggccttcacttgggcaaacaactatcgtagtcgaacagctttgacctaacaatttcctcgtacccaagatgatcgcttttccagacaacttaataaactttggctttaatggatgactggatgcagaataaaatacataaaaataaacctcagctgctcagcaacgactgaaaaaccaccaccgggcaatccctccccatggccaccgagcaaagttccaccgcctcccctacgccgaccgccgggctcccggggtcggacagccccgggccacttccgggccttcccggaagtccctgtcacttaacaaccgaagtaacccgcaatgcggaagggcgaggggattgcgagtcaccgagtttcccgcgcggcttgaggtactggggaaccggaatcccccaccggcccaatcatgttgctgctggggtctctccggtgcccagcagtggttgtcagtaagcgggcggcactcccttccgatacgtcttttcttttttcatt

SEQ ID NO: 14704 - DNA, 2300 bp, Homo sapien
tcccttcactagtctgtaagttacaagcctaccaccccataatttaggaacagagccccagatactggaacaccctgtcgatgttccagtggctctggggttggagatctcacctgaggatgggcgggggcggaagagcggacagattgacttggtacagggcctcaaattcagcccgggtgcagcaggagccccctgcagcctgcaggtggcagcagtaggcttcctctggagaatcagacagacgagggcaaaagaaaccagggtagtgacggccatggacatcccgggtggtctggcacaagtgagggtggtggaccagagctgaagagagaggtgggggtgctagagacaagcaggaggggcctttccacagctcactccacccctactggagagtaaaagagatcagcccctaccagaagaaaagatgcccttccacccatccccatcagttccagttcccaggaatagcccatagcaccagaggcaggtgggccacaggggtaagtgctgtacctgagagagaggttggctggacaagggtcacccagctgaagagcagcagtagccccacagataggcctgtcagcaaggggcctgaccttctctggatgcccatgagagttcactaccacctctgtcctggtcctgggaaccccaacatctctctttctaggccgtgactgcagacaataaggaaataaaagtcaaagccccaaggcccttgggcaccattaatacgagcctgaagcttctctatcacaggcttttagagagagatgacagggactgggtttctgtctcctgttggaaaacgtggggcctgcattgccaaactgctgaaggagagaaggctcaaaggactagaggacagaatgagggatgagagagcagctgagccattagtatgaagaacaaacaagcatttacagccaaatatgtttctacccattctccaacttccaggctgccatggaagctctgggaattctgaccctcctatttcaggtcccagagacctcagttccagcatgtggggcttccctccctaacctctgctacgtggcaaccaccaagactagctgaaaaccaagggtgactcctttcattagcctttcccctgagccttatctgccccagctaccagccagaacacaaaagctacatgtctgattagagtatacttagctaatagggaaccccctctcacagagaagttctatggggatcaccaggtctctcttacccctcagctgcccctaaggcagggaatttctccagaaggccaccagccagcagaattaagtgttattccagtgcctacccaggcctgacaacatcatgctcccaggacagcagtgacaacactcatcaccccaggggcccacagaagatgcctagagactgaaataggagctctcatagcataagaagacaaggcaaatttcatctgcaacactgaggacaaacaaaggcagttcctgcagaaacgtcacagctacctgggagcctaagtctgaagcaattaggcagggctcccagggaaggctctgatttttcaggtcaggccctagggtctcctggagggtccaaaggtagactcccctgcccacagaacctggcccatccctacagggagaactatttttagaacacttggagaattttcagagcttttacaggttgaagatggttcttggggggagcttctgggagaagctgtctctgactctgagggtgtggggattgttctttcttcccgctcccatagtcccctgagccttggccaccctggattcagagcactgtgaggccactgccttatttcttgtctgtcttcctcttttccacagactgtgggctcccaaagagccaggcttatgttcttcttgcacccccaacagagcacactgagctgggggctgcgatgctgaaggcagctgtccacatcacttgctctctgcgcgggccggtcagctccagaggaattcatctggggcaggcccaactcggcccgctgaattagcctccacgatccccgggcctccccggcgccagggggcgctgtaaacgttccgtccctgcccctgcggccgcagtcgtcggccccatccgcgcgatgggctctgaggcggcgcagctgctggaggctgccgacttcgcggctcgcaagcaccggcagcagcggcggaaggaccccgaggggaccccctacatcaaccaccccatcggtgggcgcgtcggccgcggagcgccggctgcggcacctgggtggtggggactgggaaggaaacgtg

SEQ ID NO: 14705 - DNA, 2300 bp, Homo sapien
gttgcagatgaaatttgccttgtcttcttatgctatgagagctcctatttcagtctctaggcatcttctgtgggcccctggggtgatgagtgttgtcactgctgtcctgggagcatgatgttgtcaggcctgggtaggcactggaataacacttaattctgctggctggtggccttctggagaaattccctgccttaggggcagctgaggggtaagagagacctggtgatccccatagaacttctctgtgagagggggttccctattagctaagtatactctaatcagacatgtagcttttgtgttctggctggtagctggggcagataaggctcaggggaaaggctaatgaaaggagtcacccttggttttcagctagtcttggtggttgccacgtagcagaggttagggagggaagccccacatgctggaactgaggtctctgggacctgaaataggagggtcagaattcccagagcttccatggcagcctggaagttggagaatgggtagaaacatatttggctgtaaatgcttgtttgttcttcatactaatggctcagctgctctctcatccctcattctgtcctctagtcctttgagccttctctccttcagcagtttggcaatgcaggccccacgttttccaacaggagacagaaacccagtccctgtcatctctctctaaaagcctgtgatagagaagcttcaggctcgtattaatggtgcccaagggccttggggctttgacttttatttccttattgtctgcagtcacggcctagaaagagagatgttggggttcccaggaccaggacagaggtggtagtgaactctcatgggcatccagagaaggtcaggccccttgctgacaggcctatctgtggggctactgctgctcttcagctgggtgacccttgtccagccaacctctctctcaggtacagcacttacccctgtggcccacctgcctctggtgctatgggctattcctgggaactggaactgatggggatgggtggaagggcatcttttcttctggtaggggctgatctcttttactctccagtaggggtggagtgagctgtggaaaggcccctcctgcttgtctctagcacccccacctctctcttcagctctggtccaccaccctcacttgtgccagaccacccgggatgtccatggccgtcactaccctggtttcttttgccctcgtctgtctgattctccagaggaagcctactgctgccacctgcaggctgcagggggctcctgctgcacccgggctgaatttgaggccctgtaccaagtcaatctgtccgctcttccgcccccgcccatcctcaggtgagatctccaaccccagagccactggaacatcgacagggtgttccagtatctggggctctgttcctaaattatggggtggtaggcttgtaacttacagactagtgaagggacagaccgcaacagaaaatcatgtagatcatgattacaattacaaaggagaagttcagggggctgtgcaagctggtaatggggagccatcctgaatctgcccatgggtggctctaggatgagctcctaaattcgtatgcaaatgtgtgtatgtaagacgacacttatttggggagggagtcctgagctttctccggactcccagggattctgtaccccccacagagcgcagcagcgagagcgcggtcggggccgggatccagatactttttctctcccgcaggggcccaggcccgctcctagtgctgggcctctacaacctactggttgtgaccctgatgaccgtagacctcgtgcacttctgctgcggtcggggccggagtctgggctggagccaccgcaggcctccctctgggtcctccgccgcgagctccctgcaggtctctgcggggacagcttaggtgcgcccggagcttgcctgcacctgcgatccagagccaagcgccccgcccctgcccgggcgcgctccctccttagccctgcccctctctgaccccacctccgacgcaagagtggggcggggcagctgccggtggcgtcccgaacccagactcgccccgccccagagactgcgcctgcgcgggcacgagacaacctctccgcgatgactgtgagtggtccagggacccccgagccccggccggccacccccggggtgcgtacccaacccccgcgccatcaccccttcgcacccgccctgaccatccctggcctccttctccccatccatgaggctcgccccgatccctcctctcctctccccttagctcccgggctctgcc

SEQ ID NO: 14706 - DNA, 2300 bp, Homo sapien
aaatgaaaggtttccagcagaaacagtaatcttggggaggactagttggaggctgaacaaagggaaagtggccccaaggcccacttcctgctccaaagtggcctccgcagggaggttctttctcaagtcaatgttccaataatgcaacaaacgccatcaagcacgtactgggtttaccaaacacttcctacgcttctgttcccacacagatgaaacatgacagtcctttttttttttttcttgagacagagtttcactcttgttgctcaggctggagtgcaatggcatgatctcaggtcaccacaaccttcgcctctagggttcaagcgattctcctgcttcagcctcctgagtagctgggatcacaggcatgcaccaccacacccagctaattttgtatttttagtagagacggggtttctccatattggtcaggctggtctcgaactcccgacctcaggtgatccgcctgccttggcttcccaaagtgctgggattttttttttttttttgagatggagtttcgctcttgttgcccaggctggagtacaatggtatgatcttggctcattgcaacctccaccctcccaggttcaagcaattctcctgcctcagcttcccaagtagctgggataataggcacccaccaccacgcctggctaatttttgtatttttagtagagatggggtttcaccatgttggccaggctggtctcgaactcctgacctcacacctgaggtgatctgcccgccttggcctcctaaagtgctgggattacaggcatgaggaccgcgtccaggcgacagtccttgttcttaaaggagattataggccaggtgtggtggcttacacctgtaatcccagcactttgggaggtggaggcaggtgggtgatcaccttaggtcaggagttcgagaccagcctggccaacatggtgaaaccccatctctactaaaaatacagaaaattagccaggtgtggtggtgggtgcctgtaatcccagctacttgggaggctgaggcaggagaatcgcttgaatccaggaggtggaggttgcagtgagccgagatcacgccattgcactccagccttggggacagagtgagactctgtctcaaaaaaaaaaaaaaaaaagaaagaaaaaaaattaaaggagcttacagctgttggggagaaaactgatgataaattatgaaataagccgaatcatttcagagcttaagtccaggaagggacatcactggtggtatgggagtaacctgtattagatactatgtcagggaaggcttgagtgaaagtcgataaagaaaatcagccattattgtccaggtggaaacgtcctagtcctcccattggcagctttcctgctgtttctgcccaagtagtgcaggtgcctggccagtggaggggaagggagggaagaagagtccctttatgttggccttggtgtgacggctgtcaccctgtgcccctcaggagctggtttgagggccaagggctggccgggaagctacgggccatccagacggtgtcctgcctcctgcagggcccatgtgacgctggcaaccgggccttggagctgagcggtgtcatggagagtgtgattgctctgtgtgcctctgagcaggaggaggagcagctggtggccgtggaggctctgatccatgcagccggcaaggctaagcgggcctcattcatcactgccaatggtgtctcgctgctgaaggacctatataagtgcagcgagaaggacagcatccgcatccgggcgctagtggtgagacggtgggcctggggtgggtgggcaggcagccaggcaggggtcctggtccagccggtgttgcagggtgtggccccagcacactccagatgaaaataaggaatactgtaatgccaaaaaaattagctaggcttggtggtgcatgcctataggtccagctacttgggaggctgaggcaggaggatcacttgagctcaggaggttgaggctgtggtgagtcacgcatgtcactgcactcctgcctgggcaacacagcaagaccctctctaaaataaatggatgaatgaacgagattctgggctttcttgtggtgagagacatcggcatggctcctccctccatggggcttaagactgggcctgcaggggtcatgcagtgttcctgggagctggtggtttgggggtttggggactacctggccctccatgagcctgttgtggctgtgcaccctgtggaagctggtcttcctccctggggcactcagtcctggatttctccatcccataaggatttggctgt

SEQ ID NO: 14707 - DNA, 2300 bp, Homo sapien
gtggtttgggggtttggggactacctggccctccatgagcctgttgtggctgtgcaccctgtggaagctggtcttcctccctggggcactcagtcctggatttctccatcccataaggatttggctgtggctgaagcacctgtcctctccccacatgcctctcaactccacctgcagagggcttctttgtgcgacatggaaggaaacagagccattctcagtgtggcctgggaaggggtggggcccacgactgtccagcggccagcgcatcagtgtctgcagatgctgtgtcatgcggccaccccagtagctgattttcttgccacatgctctaggtggtggtctggagggagagggtgctgatttgtctgtgtagcttccagggggccatggcagagtgccagggagggagtccaagccaggtgtggaggagctcagctcctgcctccttccccagaggccaactggtcttgccctcttcctccagggactctgtaagctcggttcggctggagggactgacttcagcatgaagcagtttgctgaaggctccactctcaaactggctaagcagtgtcgaaagtgagtcatctggccttgctgtggttccccacctgtggggtagatctcaagacacaggggtctgggtgggggttggggcctcctccgtcctgctctctggctcaggcaggggctgcagtctggatcctggtacgtgaactgcttctgtacattgaggggatgcccaaacccttggtttttcccccttggccttggtgtacccctccgtacccccaatcctgagggtcgtccactatcctgcgtgtccccaggtggctgtgcaatgaccagatcgacgcaggcactcggcgctgggcagtggagggcctggcttacctgacctttgatgccgacgtgaaggaagagtttgtggaggatgcggctgctctgaaagctctgttccagctcagcagggtagctctgtggttcctgccgtcagcctggggacactgtctaggattagaccttaccaggctttctcggcagggcttggccaatggggtcttttgaccccagggaagagggctggtggctgagtggctgctctgtgtagtgtgggcatgttggccagcaccagtggtgttagcaaggacgttcttcttggaggagctggggaggtcaagtttgtaagctcccaaagtctggggcctgggagtttcccgaattcatcctgtacccaagggtcccagctgagggtggaattgggggcctgggcctgggcagcatttatctgagtactgctctgccccgggatgcccatgtgaattcctctgtgtcctggcagttggaggagaggtcagtgctctttgcggtggcctcagcgctggtgaactgcaccaacagctatgactacgaggagcccgaccccaagatggtggagctggccaagtatgccaagcagcatgtgcccgagcagcaccccaaggtgaggggccgccagaggggctagagggttccccaccatggggacagctaacccagggcatccacagcagaacaacctccctttttttttttttttttttttgagatggagtctcactgtctcccaggctggagtgcagtgatgcgatctcggctcactgcaagctccgcctcccgggttcatgccattctcctgcctcagcctcccgagtagctgggactacaggtgcccgccaccatgcctggctaattttttgtatttttagtggagacagtgtttcaccgtgttagccaggatgatctcgatctcctgacctcgtgatccgcctgcctcagcctcccaaagtgctgggattacaggtgtgagccaccgtgcccagccaacagcctcccttttaagccagtttgtttccttttgtctggctgttttatttcccagttcctcaattactgctgtgagaagggtccccctttctctgtgagtcagcctaggcccctctcctaagctgcctcctcccccaggacaagccaagcttcgtgcgggctcgggtgaagaagctgctggcagcgggtgtggtgtcggccatggtgtgcatggtgaagacggagagccctgtgctgaccagttcctgcagagagctgctctccaggtgagccagccttggtaggagccaacctttcccaactcctgagcctcagggctgcagatgtggctccagagggtgcaggttccagtgctgtgggcctcttagagcgacgggggctgcctgcgtggctgccgtctttgctgagcctaggagtgcagcgtctgcctg

SEQ ID NO: 14708 - DNA, 2300 bp, Homo sapien
gaggatagcaccaagccatgagggacccatcccatgacccagtcacctcccaccaggccctacctccaacattggggattatagttcaacatgagggttagaagggaaaacatccaaaccgtatccctgctgcttcctcctgtggccctgcaggcagaagatcctgaaggagaaggctgtgcccatgatagaaggctacatgtttgaggagcatgagatgatccgccgggcagccacggagtgcatgtgtaacttggccatgagcaaggaggtgagggttggtctgggtgctcatgacaggcggggatgcagaggtacctgtgccctggctgggctttacacccaactgacttggtccactcctcacatctggccacaggtgcaggacctcttcgaagcccagggcaatgaccgactgaagctgctggtgctgtacagtggagaggatgatgagctgctacagcgggcagctgccgggggcttggccatgcttacctccatgcggcccacgctctgcagccgcattccccaagtggtcagtgcctcttctcagtgggggaggagggacggaccaggaactcccagcagcagctgaagggggcagtcctagggtgtgtgggtgtgtcccttgccaaggttgagcctgttgcccaggggtcatatctaccctgtttttctcacagaccacacactggctggagatcctgcaggccctgcttctgagctccaaccaggagctgcagcaccggggtgctgtggtggtgctgaacatggtggaggcctcgagggagattgccagcaccctgatggagagtgagatgatggagatcttgtcagtgctagctaagggtgaccacagccctgtcacaagggctgctgcagcctgcctggacaaagcagtggaatatgggcttatccaacccaaccaagatggagagtgagggggttgtccctgggcccaaggctcatgcacacgctacctattgtggcacggagagtaaggacggaagcagctttggctggtggtggctggcatgcccaatactcttgcccatcctcgcttgctgccctaggatgtcctctgttctgagtcagcggccacgttcagtcacacagccctgcttggccagcactgcctgcagcctcactcagaggggccctttttctgtactactgtagtcagctgggaatggggaaggtgcatcccaacacagcctgtggatcctggggcatctggaagggcgcacacatcagcagcctcaccagctgtgagcctgctatcaggcctgcccctccaataaaagtgtgtagaactccactgtgtgccctgtccttgggcagggagggctgctgtgagtgggagtctctgagtgggtgagtgtgggtgagtatgggtgtgagctgggcgtgggtgagtgtgcaacggagcttcacagtggcagacccacctccatggaaggaatccaatggattccccaaccagggcccactgagttgcttcttaatcctactggagggacaaagggtaagcctaggaagctaatcaataagaaactcaccaggtgcggtgcctcaagcttgtaatcccagcgctttgggaggctgaggcaggtggatcacttgaagtcaggggttcgagaccagcctgggcaacaagcaaaactctttctctataaaaataccaaaaaaaaaaaaaaaaaaaaaaaaagagcagagtgtggcggcatgcacctgtaatcccagctactcggtaggcgaaggttgcagtgagcccagagcgcagcctcccaaagtgtcgcctgggcgacacagcgagaccctatctcaaaaaatattaaactatcccaagaaataagtcgtttagggtagagactcccatatgctgggccttcagtacgtttgtctttatattgggagtcctctgtggcctccgctgagggcgctggggcgggggttggggttggtggccagctgagcctggttgaagggcggcttgggccccgcccaccaccccagcacgttcgaggagggctaagcccagcgtgaggctcgttggctcgacagaggcacgtgacgggtcctgagccaatccgtggaaggtaaaagctgcttcctgttggggcatgagtccggcgcgtgtcgggttttgagctgccgcggtcccgggactgaggtgggtggcggggtccgcccgtcttgggcgtcactcctcgccaaacctttagctcaagtcttaatgaatgtcctctctgtggttctaatccgagctccagccccacgggttcctgcaggggcgggac

SEQ ID NO: 14709 - DNA, 2300 bp, Homo sapien
ccacgctctgcagccgcattccccaagtggtcagtgcctcttctcagtgggggaggagggacggaccaggaactcccagcagcagctgaagggggcagtcctagggtgtgtgggtgtgtcccttgccaaggttgagcctgttgcccaggggtcatatctaccctgtttttctcacagaccacacactggctggagatcctgcaggccctgcttctgagctccaaccaggagctgcagcaccggggtgctgtggtggtgctgaacatggtggaggcctcgagggagattgccagcaccctgatggagagtgagatgatggagatcttgtcagtgctagctaagggtgaccacagccctgtcacaagggctgctgcagcctgcctggacaaagcagtggaatatgggcttatccaacccaaccaagatggagagtgagggggttgtccctgggcccaaggctcatgcacacgctacctattgtggcacggagagtaaggacggaagcagctttggctggtggtggctggcatgcccaatactcttgcccatcctcgcttgctgccctaggatgtcctctgttctgagtcagcggccacgttcagtcacacagccctgcttggccagcactgcctgcagcctcactcagaggggccctttttctgtactactgtagtcagctgggaatggggaaggtgcatcccaacacagcctgtggatcctggggcatctggaagggcgcacacatcagcagcctcaccagctgtgagcctgctatcaggcctgcccctccaataaaagtgtgtagaactccactgtgtgccctgtccttgggcagggagggctgctgtgagtgggagtctctgagtgggtgagtgtgggtgagtatgggtgtgagctgggcgtgggtgagtgtgcaacggagcttcacagtggcagacccacctccatggaaggaatccaatggattccccaaccagggcccactgagttgcttcttaatcctactggagggacaaagggtaagcctaggaagctaatcaataagaaactcaccaggtgcggtgcctcaagcttgtaatcccagcgctttgggaggctgaggcaggtggatcacttgaagtcaggggttcgagaccagcctgggcaacaagcaaaactctttctctataaaaataccaaaaaaaaaaaaaaaaaaaaaaaaagagcagagtgtggcggcatgcacctgtaatcccagctactcggtaggcgaaggttgcagtgagcccagagcgcagcctcccaaagtgtcgcctgggcgacacagcgagaccctatctcaaaaaatattaaactatcccaagaaataagtcgtttagggtagagactcccatatgctgggccttcagtacgtttgtctttatattgggagtcctctgtggcctccgctgagggcgctggggcgggggttggggttggtggccagctgagcctggttgaagggcggcttgggccccgcccaccaccccagcacgttcgaggagggctaagcccagcgtgaggctcgttggctcgacagaggcacgtgacgggtcctgagccaatccgtggaaggtaaaagctgcttcctgttggggcatgagtccggcgcgtgtcgggttttgagctgccgcggtcccgggactgaggtgggtggcggggtccgcccgtcttgggcgtcactcctcgccaaacctttagctcaagtcttaatgaatgtcctctctgtggttctaatccgagctccagccccacgggttcctgcaggggcgggaccacctggcccaacctctgccttggtccaacgcccccggtttcctccagggccttggtccaacgcccctcggaggtttcagcccatttcacagaccgggccgcagggccccggcgtaggcctcgggaccggagaggccctcaaggggagttgaacagggctgcggccgccgcgccccgggcggcgacgtcaccgcccttgctggtgattggccgcctcgcgccgcgcgcccttcaaaccttttctccccgtggctgtcggcgcccgctgggcgggaggcctttccggaggcggccgctctgcgcctcggcgtttcctccaaggctgcccaccagaaggacctgcccgagagggtagagggcatagggtcaagatcaaggtcagaggcccccttgggttgggagaggacacggaaggggttaggagcccaggaactggggtctcaggagagacccaggatctgacttaagaggcctgaaaatgcccatgcaattctgcttcagcccgg

SEQ ID NO: 14710 - DNA, 2300 bp, Homo sapien
ggtagagactcccatatgctgggccttcagtacgtttgtctttatattgggagtcctctgtggcctccgctgagggcgctggggcgggggttggggttggtggccagctgagcctggttgaagggcggcttgggccccgcccaccaccccagcacgttcgaggagggctaagcccagcgtgaggctcgttggctcgacagaggcacgtgacgggtcctgagccaatccgtggaaggtaaaagctgcttcctgttggggcatgagtccggcgcgtgtcgggttttgagctgccgcggtcccgggactgaggtgggtggcggggtccgcccgtcttgggcgtcactcctcgccaaacctttagctcaagtcttaatgaatgtcctctctgtggttctaatccgagctccagccccacgggttcctgcaggggcgggaccacctggcccaacctctgccttggtccaacgcccccggtttcctccagggccttggtccaacgcccctcggaggtttcagcccatttcacagaccgggccgcagggccccggcgtaggcctcgggaccggagaggccctcaaggggagttgaacagggctgcggccgccgcgccccgggcggcgacgtcaccgcccttgctggtgattggccgcctcgcgccgcgcgcccttcaaaccttttctccccgtggctgtcggcgcccgctgggcgggaggcctttccggaggcggccgctctgcgcctcggcgtttcctccaaggctgcccaccagaaggacctgcccgagagggtagagggcatagggtcaagatcaaggtcagaggcccccttgggttgggagaggacacggaaggggttaggagcccaggaactggggtctcaggagagacccaggatctgacttaagaggcctgaaaatgcccatgcaattctgcttcagcccgggtgcagcggctcacgcctgtaatcccaacgctttgggaggccgaggcgggcggatcactcgagcccaggaatttgagaccagcctgggcagcatagcgagacccctgtctctattatattaaaaaaaaaaaaaaacaaacccgctccagccgaatctgcttgaagttggcgttgctgttgtaaccaccagactgtttgtctccccatttaacggttagctccttgggagcagacagctgtcctcactggcagaggaggagcgctcagtaaatgctcgctggacgaataaatggctagataaggtacagttgaaattctgtctgtataagtttctcaaaaccagtaagatgtccagggataatttttttgtcaacactaaatactggattcagtaagctaatactgtgtgtttatcatggcatgtactcgcaccaaaccctttatttgcatttattacaattctgtgaggaaggttcaaacagcaccgcccccacctccctttgtaaactgaagaaacgcagttggactcaggtggattggctgcggtcccaaggccccgctgagttgcagaggcactgcctcccaaacgctcttctgcgttccgctgtggggagaggggcagagcactgtgtgtggagttggtgggacctgatttcagcgctctgcccctctctgtctggctgtatgagtgtgtaagggttactttgtctcagaatctcctctgtaaaacgaccattttggttcccaagattacatgggataaagtgccagatgctgggaagctgcgggacggggtgggggtgtcgggggcgctcggatcctagtccaatgcctaaaggacaggccacttcgtacccactttgtggcacgctgagcttgagccaaaagggaggacagggaaagtgcctctaaatatttgagcatctttgtaaatccggtagggcattagtcagggcgcctgctcagcgaaccttcgtggcacggactctgcctttgtggtcgggagaatgatagtttctccattttacagataaggcagctccagcccctggaaggccagagacttgccagtgtcccactagcgggctcttcgcaagaatccccccgggcccgccgcagccaggcggcggccggcagagggcgctgctcgggcatggcggaggagcggccgggggcctggttcggcttcggtttctgcggcttcgggcaggagctgggctccggacgcgggcgccaggtgcacagccccagtccgctgcgggcgggcgtcgacatctgccgcgtgagcgcgagctggagctacaccgctttcgtgacccgtgagcactccccgccccgtccccacttattccagccgc

SEQ ID NO: 14711 - DNA, 2300 bp, Homo sapien
cggccggatcgtcttccccttcggcctcgggcaccacattctgggcccacaatggctccccacgcagcgccgattcggccgcccagacctgcagtaacgcctccggccccggcccggcgcgcagcaccgcgaggagcccctccgaggcccacgcgtccttgcagcggcccgccgcgccgctggctgagcccgacagctccaagcggcctccacctgcggggcggattggagcagggtggccagaatggaggcggcggggatggggggagcggggtgttcctgggaaggggtcgaattggggaccaacccagaatgtggggctggcggcctgaacgggggagacaaactggactggccacagcggtgcggggaggcgactggggagcgcggctggaataagtggggacggggcggggagtgctcacgggtcacgaaagcggtgtagctccagctcgcgctcacgcggcagatgtcgacgcccgcccgcagcggactggggctgtgcacctggcgcccgcgtccggagcccagctcctgcccgaagccgcagaaaccgaagccgaaccaggcccccggccgctcctccgccatgcccgagcagcgccctctgccggccgccgcctggctgcggcgggcccggggggattcttgcgaagagcccgctagtgggacactggcaagtctctggccttccaggggctggagctgccttatctgtaaaatggagaaactatcattctcccgaccacaaaggcagagtccgtgccacgaaggttcgctgagcaggcgccctgactaatgccctaccggatttacaaagatgctcaaatatttagaggcactttccctgtcctcccttttggctcaagctcagcgtgccacaaagtgggtacgaagtggcctgtcctttaggcattggactaggatccgagcgcccccgacacccccaccccgtcccgcagcttcccagcatctggcactttatcccatgtaatcttgggaaccaaaatggtcgttttacagaggagattctgagacaaagtaacccttacacactcatacagccagacagagaggggcagagcgctgaaatcaggtcccaccaactccacacacagtgctctgcccctctccccacagcggaacgcagaagagcgtttgggaggcagtgcctctgcaactcagcggggccttgggaccgcagccaatccacctgagtccaactgcgtttcttcagtttacaaagggaggtgggggcggtgctgtttgaaccttcctcacagaattgtaataaatgcaaataaagggtttggtgcgagtacatgccatgataaacacacagtattagcttactgaatccagtatttagtgttgacaaaaaaattatccctggacatcttactggttttgagaaacttatacagacagaatttcaactgtaccttatctagccatttattcgtccagcgagcatttactgagcgctcctcctctgccagtgaggacagctgtctgctcccaaggagctaaccgttaaatggggagacaaacagtctggtggttacaacagcaacgccaacttcaagcagattcggctggagcgggtttgtttttttttttttttaatataatagagacaggggtctcgctatgctgcccaggctggtctcaaattcctgggctcgagtgatccgcccgcctcggcctcccaaagcgttgggattacaggcgtgagccgctgcacccgggctgaagcagaattgcatgggcattttcaggcctcttaagtcagatcctgggtctctcctgagaccccagttcctgggctcctaaccccttccgtgtcctctcccaacccaagggggcctctgaccttgatcttgaccctatgccctctaccctctcgggcaggtccttctggtgggcagccttggaggaaacgccgaggcgcagagcggccgcctccggaaaggcctcccgcccagcgggcgccgacagccacggggagaaaaggtttgaagggcgcgcggcgcgaggcggccaatcaccagcaagggcggtgacgtcgccgcccggggcgcggcggccgcagccctgttcaactccccttgagggcctctccggtcccgaggcctacgccggggccctgcggcccggtctgtgaaatgggctgaaacctccgaggggcgttggaccaaggccctggaggaaaccgggggcgttggaccaaggcagaggttgggccaggtggtcccgcccctgcaggaacccgtggggctggagctcggattagaaccaca

SEQ ID NO: 14712 - DNA, 2300 bp, Homo sapien
ggcgtgaccatgcctcactgcagccttgacctcctgggctcaagtgatcctcccacctcagcctcccaagtagctggaactacaggctcataccaccacacctggctaatttttgtattttttatagagacagggttttgccacagtgcccaggctaaggtcatatattataaacgcgtattacacagtgttttacatgctgcgtttatgctctgaatggatatctttgcatcagttctatgactttgttagcctcagcacctcagtgtaaaggacaagagagaaaaaattgccttttctttggatacttcataatgctggtgctaagaacaagtatgaagatcacaaatttgtgaagctttctgaaaagctctcctgttaatttaatcaacaaagaatgcaagtaaattttaaaagtagtgctaccatctactctattagtggtgtcaatgttaatcacagagtgcaaggaaattgaaaaagtggtgcctgtcgcccactgtgttggtgctgtgaatgtttggcatgctgctgacaagttaaaaagaacatggaagccgggcgcgttggctcacgcctgtaatcccaacactttgggaggccgaggcaggcggatcacctgaggtcaggagttcaagaccagcctggccaacatggcaaaaccccgtctctattaaaaatacaaaaaaaaaaagtatccaggcatggtggtgcgtgcctgtagtcccagctactcgggaagctgaggcacaagaattgcttgaacccaggtagcggaggttgcagtgagctgagattgggccactgcactacagcctgggtgacagagcgagactccgtctcaattaaaaaaagtaaaaagaacattgaaagcactaatgaagtttttctgaaaataagaaaaatatggttctgaaggtgaagcaaacaagcatcctttacctttagggaaaaggcatatgaagaggattcacttaagttacagttggccaataaacacgaaaaatgtgcaatttcaattataatcaagtgccaaacaaggaaatgccagtattattattttacctacaaaatgagcaaagatgtttagaagtacaatagaattcagccctgctgagggtaacaaaaggagggtacttttccggtgaggctttgtgcagaaggcaaattaataaagggagcattcagtaattacacctctaggaatcagccgtacgaaaatgcaggatgcatttataaatacatacatacacaaagatttatgtatgaagatattcagcccagccttatcttttaaattatcatctaaatatcaatagcagaatgggcgagatatctacacaccaggattcatgccaccatgccaccatgaatcactgggaaaaaacggtgatatataagcatttagggatgtaacatgttcatcgaggaaaggaggctacaaaagtaatgtctattttgagttttaaatttttcatgtaacgatttagaaactcatctaatttgataacgtgacttaggcaaatcattcaaatctttttgcgtttcctctgcaatggcgattgtggaggttaaatgggataactggcgttgaaacgttccaggcccatgagcaggactcaatgttccttcccttcccctttagtgtatggcttcttacatctggggaagagtcccaccaaagatcgattccaagcttcgcttcttggatgagcgagggaaactaggcgctaacttacctattcacccccgcgcccgttcccggcagccgggactcagggaagccaggtagccgcggtgctctcaactccctccccgcccgcgcacttcgaatccaaactgcgcggggcgaggcggggcggcgctccgatgaggtagctggcttgggagaggagtcccttgaggctgccgccaagccagggaagcgggaggcgcaggccacgcccggccactcacagacagtgacgtcatcccccgccgccactccggcgcttcccaggccctgctcgcgagtccccaccccgattgcgcacccgcgacttcagcccgaggggcggggattttcttggagcgacgggacgcgacgccaatcgcgacgaggcttcgccccgtggcgcggtttgaaattttgcggggctcaacggctcgcggagcggctacgcggagtgacatcgccggtgtttgcgggtggttgttgctctcggggccgtgtggagtaggtctggacctggactcacggctgcttggagcgtccgccatgaggagaaggtgcgggttgcggggaaatcgaggggacgcgg

SEQ ID NO: 14713 - DNA, 2300 bp, Homo sapien
cttttaaattcttcagacattgttgcaagtcttttatgtgcatgtcactgtgcaagcactaagtattaaagagaaagaagccgggagtggtagctcaagcctataatcccagcactttgggaggctgggacgggcagattacctgaggtcaggagtttgagaccagcctggccaacatggtgaaaccctatctctactaaaaatacaaacattagccaggtgggctagcgtgcgcctgtaatcccaactactggggaggctgaggcagaagaatcgcctgaacccgggaggtggaggttgcagttagccaagatcgcgccactgcactccagcctgggcaacggagtgagactgtgtctcaaaaaaataaataaaataaaatagaaataaaatctggtctaagatgccctgcagttctcatcttgatccatcttccttccagtcctcacaatgcagctgcagttctacatttctatctgctggatgttacaagctatatttcttacgggcatcttaacttcccccatccaaacccaaacaaatcaacttcccccatcaaacctgttcctttttctaattatttttctcatttctattcaatgttaatacaacaaatatttattaagcacatggtgtgtgcttgactctaagctaggtactcactaggtagtgttgaacaaaacaaacatgatccctgcccaccttccagtctaatgaggaatacagacataaaatgaataactaaatgattacacaagtaatccattaaaatcacagtggcagtattattttcctaataacccaggttaaaaatctcactcatttttgcttctccttcaacatttataaccaatcagtaagtctttgagttttctttcaccataacttaaaaatccatcactttccttcattcccactgctaccaattttgtgtgggcctttatttcttgtctgatctacggtctcctaactggccttcttgttgcccatttacgccaccacacacatcactattagaatcatcaagtattgtctcatgccacaaatggaaaaaaaatttttttcagtggctactgtgtaactgctgatgggtgtcttcccttacatgccttgtctttccctggtttgccaactttgctcctaccaatctatctgcctggagcatgcttagtctccaaagaaaatatgcttattactcacactcacttccttgaagctcctagatcatcaccccaactagaaatgatcacttactgtgaactcttcgggtacactagctctatcactcatttaccacctgtgtgtgataatttgtgcttcatacagctcctactggagtggtaagatccctaatggcaaagatgtcttaaccatctttccgtccctagggatgcctggcactaatggtgtctcccttgcctgtatgcggggttggggggtgatttccattaactctctggccaggttccaaacagctcttactactccctggattcattctggacctgctggggaagcgccaaggacaataccaggggccaagaacaagatcaaaggggcacggcaaggaagaaatgtgcatccaatgagtgctaaactgtagatgcgataaaggcgtcaggcaagcactgacctgctccagcagatagatgagctggtctcgagccagcctcttcagcatggagaagtcaggcagctcaggggcgtccggccgatggggaaaagccatggcagcggtcacctgcgccgcggggtggaaggacgcccttcgttctgagaaggccggccgcagcccagggaagcgcaaggggggctatccttcaggcctgggcaccgacttccagagaccccagatgggccctcgctcctcagcagcactccaggaatgaatggccacctccaggcaagagagctactacctcggagcagccttgtctcagacctgcagccaccgtgtctcgaccctccctccctgatccactctgcccgtcagcaggattccggtctacaccccgcagagactccgcagcgtacgaggagaaccccgccttctaccagaaaaagaagcgacttcctagatctcccggaagtccctttcgctcccagcgcttcgcgtaccaggaaggggacggcgtcctgaaagggacatttgaaaaacggaggcaacgcgtctattaattaggtggcggcgcctggggtcgcagcactccagaggctgaggtgggagaatcgctcgagtcagggaggcggaggttgcagtgaactgcgatcgcgctactgcaccccagcctgggcaacaa

SEQ ID NO: 14714 - DNA, 2300 bp, Homo sapien
agagcaacactccatctctaaataaagacgtagaatactaaaatgcaataaacccccatgtacccatcagctttaacaattaacaaatggccaatcattttttaatttttttatagacatgggggtcttactgtgttgcctaggctggtcttgaactcctgggctcaagcaatccacctgcctcggtctgggttcacaggcgtgagccaccgtgcctggcccaatctttttcctgaatgttcctacatctccccctgggttattttaaagcaaatcccaaacatattttagtttttttttttattttttaagagacagatcgggccaggcatggcggctcatgcctacaatcccagcattttgggagactgaggcgggaagatcacctgaggtcaggagttcaagaccagcctgaccaacatggagaaactctgtctctactaaaaatacaaaattagctgggtgcgtggcacatgcctgtaatcccagctactcaggaggctgcagcaggagaaacgcttgaacctgggaggtggaggttgcagtgagctgagatcgtgccattgcactccagcctgagcaacaagagcgaaactccatctcaaaaaaaaaagagacagaacatatcactgcactccagcctgggtgatagataaagccagaccttgtctcaaaaaaaaaaaaagaaaagaaaaaacaaacggtgtctcactctgttgcccaggctggggtgctgtagcatgatcgtagcgcactgcagcctcaaactcctgggctcaagtgatcctcctgcctcagcctcccaagtatcgagattaaaggtgcccaccaccatgcctggctattttttatgtgttgtagttgaccaatcttatctcaaactcctggcctcaagcaaccccccgaccccgacctggacctcccaaagtggtgggaattagagacatgaaccattactcctggccaaattatttcacctgtaaaaacttcagtatgtatctcaaagagataaggacttgtttttaacagaaatacaagcctgtatgacatagaaatacaaaaaataataataacatagaaatacaatacctggcccaacgttgtggctcacgcctgtaatcccagcactttgggaggccaaggcaggcggatcacttgaggtcaggagttcgagatcagcctggccaacataatgaaaccccgtctctaccaaaaatacaaaaattagccgggcatggtggcactcgcctgtaatcccagtctactcgggagactgaggcaggagaatctcttgaacctggggcggcaggggggttgtggcgcggagcttgcagtgagccgagctcctccactaggcaaaagggcgagactctgtcaggaaaaaaaagagaagaaaagaaatacaatacccgaaaagttttagtaattccttaaatcagttatctttgaattattatccaaaaaagatccacacattgaaacattttgttgatacatctcttaaatctcttttattctgaagtgttttcccctcccacatttcccactttgccatttttttgaagacgacagatcatttgtcccatataatttcctacattttggatatggttgatttcatacctttggtgtcttaacatattcctgctaatctctatatagcctataaactggtagttagatcttgaggcttgattaggttcaatttttggcaataggtgatgctctgtatttcctatgcatctcaccaggaaatgatatgatggtatgattgatcagagttgaggtattgttagctagcctgatgcattcattatgtctttttttttttttttttttttttttttgaggcaaggtctagctttgttgcccaggctggggtgcagtagcgcgatcgcagttcactgcaacctccgcctccctgactcgagcgattctcccacctcagcctctggagtgctgcgaccccaggcgccgccacctaattaatagacgcgttgcctccgtttttcaaatgtccctttcaggacgccgtccccttcctggtacgcgaagcgctgggagcgaaagggacttccgggagatctaggaagtcgcttctttttctggtagaaggcggggttctcctcgtacgctgcggagtctctgcggggtgtagaccggaatcctgctgacgggcagagtggatcagggagggagggtcgagacacggtggctgcaggtctgagacaaggctgctccgaggtagtagctctcttgcctggaggtggccattcattcctggagtgctgctgaggagc

SEQ ID NO: 14715 - DNA, 2300 bp, Homo sapien
gtagttcaagagcaggtgatactaattgctgctgaaaagggtcagagtggtggttacacctaggtggagggtgactggtattgcctgggaaagagcataaagagaccccttgatgccaggactgtttgccaccttaatctggatggtggctgtagcaatagatattaagcagatacgatattctgggtccctgtccatatgaggcagacaacagaggcgtgcgttcctacagcttacattctcttatggaagccggacaacaactttagtaaggcgttgggtgctgtagtagaggaactaatggtagctctgggcacatggagcagggagaattcaggtatttcaggaatgagggaagacttctttgaggaagagatggctcagctgagaataaggctttaggcagaggtaagaggaatgggaggaggagaacattccaagcagagggaacagtatgtgcaaagacctagaggtgaaagagtgaggcacgtccaaggaattagaagttccatatggccagagtacaggggaaaagatgagggtggaggggtgaggctgtggggggttagcaagggtttgctttccagcactaaatgtgatgtgttaggctggcgctgtagcgcgagcctgcatcccagcttgggaggctgaggcaggcggatcacttgagctcaggagttccagaccagcctggagaacagagtgagacttctactctacaaaacgtttaacaattggccaggagtggtggcgcatgcctgtagtcccagctacttgagaggctgaggcaggaggattgcttgagctgcggaggttgaggctgtgatccagccactgcaccacagcttgggcaacagagccagaccctgtctcaaaaaaaaaaaaaaaaaaatgtttcggatttttcaaggacactgggaagccatcacatggttttaggtaggaaagagtcaagatcagatttacatgttgagaaatgactccaggagcctgagaagttgaagtccttgcgggtggtccaggtgcgagtcggcggaggccccagccagggaagaggcagggagctggagcgcaggtcattgacggcagcgagagtggggagtccagctgaagacctcatgatggaggatgtgctccatggagaagagggggaaggctcttccagaactggccttcattttagccctgttaggaaaggaacgtagcttcggatcctagaggggccaggcacctgcagtgttgtgctgtttgagtccgcatccgaatttccagtgtcctttccttgctccttacttgctcctagaaggagccctatgctcctaaagagtctttcggtgctgagccttggcagtttagtttgctgaactctcgtcagtggagttagtgggtggtggtttggaaggagggagacagaggtggagggcttgtttgaatgcaccaagccttgcaggctttcctcctccccgcgctggccgggtaggttctcttcagttcctgatgaggcaaacgagaacaaagcagtcgaacagcaccatgatcgacgatactttgggggcggcgtgatcagaggattccccttcccgggaacttgcgtctagtcctctgacgcatcctagttcggagtgggtggaagggcatgtggagtccacagcgccccctcgccctaggcggggtggagacagcgagacgacgcccatgatcagctggttacaaaactcgaggaataagaagtttaatatttattggtctgcaaatccggagaccttgcggcctcactggtcctccttccctctgagctatctccacacccagccttcgatcagaaggagatttagaagcagagctgcccgcagcgaatacttttaatgcccgggccgggaagaaagcgggttaggatctgatcccgctgagtagaggacccaggagcctcccgccccgcgtgctctgtagcgcgggggcgcgctgcgcgctgcgcctgggcggctggcgggggcggcgtgggcgcggtgatgcaggtgtgacacccgccggcgcctgcctccgcccggatcgcccagctccgcgttagccggagctgcacgcggggctgccggggcggacgctgctctgcctgcatccggaggcggccgccagcggatttgccacccaggtaggggactgcgttgctcgctgcggtgcaaccgacccagccggggcgcggaccccgcgtgcgccagggctcccagactcgcctgcctgggctgaaatatacacgctcgcacagctgagtgctgttcatagtaaatggcacaaaagatcgg

SEQ ID NO: 14716 - DNA, 2300 bp, Homo sapien
ttcagtgcttaagagaactgtttcctgaagtccagctttgaacataaacaggggtgtgggttgggggaggagcttaggacaaacctctctgatgaaggtcagcaatagactgaagtcttgactgcatggaagaggaaaaacatcagaactgtctgacaatggaggggacagtgagctacgcacaactgccagcggaggtgaacttgcacctgcccaggccggatgaacatcagcctgcaagaactagttgtttgagttgatttgcagtgctctcaatgggcaagtgccacattttccctggcagagatctccaaaaatttaaaacagaataataatggctatatcgagtgttttctcagtattggagaaatgcttaggtcctatgatagcttcgggacatctttctgtaattttcctcaattaacgggttggtaggggtaaatcttatgacacctttccaccgtcgatttgagatcagttttaatggttaaaatgtttactctccttctgtcaaccctcacctttttatttacacccctccctttttttctgtacagggagagaagacatattgactctgactggacaccctgattcctccaaatatatataccactgtgtattaatctttctctcagtgttttataggagtactaacatttattgctctgtcaataatgaaaggctcgatgtaatatagctgtaatttactttccatatgaatacagtggctaggttcataaaagagaattgtgtgagtctgggattaccacatctaaaacattattctttaatgggataatacaattcattgagcagctaccacttaaaaaacttgcaggacagttagagcctgcatttctagttaagatggatcttgtaaatttaaaattggattaacattggagtgctggggtggctgcaataatttgggggctaactccatttggtttccaagatctcacttctgcattatctttatggctctttaaaccagccacctagccaatcaagggcaattcccatctcatccatcactcaggtctttgtaaagggtgcagccaagctctgcagacttttgcaggattgtctagcctgagtaccgggctacttcttaaatgccgtcactcctgctgagataaatgcgtctttaaaaatagtctctgtggcaggtcactgggggacaatgtacagcattctggccatccacttctttttcacttcatgttctaccccaagagactcccgatgtcggctgtggagggttaaagggatgaggctttcctttgtttagcaaatctgttcacagttcttgatgatgtattttatgatgcccagcttggaaatagttgctttccatagtctcaactgtattgtgtcatctcctgatgctgatttttgatcttttgttttattaaaaataattagtgaaagaggtgtgcctatctgtgaagtttgtagtacatcatcctgaggtcatgtaacaagtaaaccccaacccagcgttccctcctacgttgtgttagttcattaaaactaaataataaaaataactgtaagaaaaccttaaggactggggttagagattattttcaggcactaaggtctcttctgtattccaaaattgattgaatcagctgggagaaacattgagaatcgcttccttcaacttttattttgcaacatggggaccttgagaggttaaacgatgtggcccagattacatgtaatgtgaggagtgggcgagaaggcctaaggtgatgctctcatgacagttctggggaagcctgcagtttggggaatgggacaatgtgacaaatactcgccattccctgagaccattcattgactattcccttgatggctttactataatgagaggaagcatcagtttaaacataaaaagattagtatttatccatccatttattcattcagcaaatccttattgagccctgaccatgggccagtctctctgccaagccctggggacacagtgatgaaaaaactggccacagtttctgcttcctgcctcattccacttgcagtgagcggatattaaattggccataaacaccgagtacgatgaccttacaatccgcaaactgcacctttcatgtgtaaaaggattgctactactttacttgtcagctgtggatttccaaatgtggtggctccctcttatttttttttctttgaggagtgtaccaattttttatctttataaaccaggtaagggaaatgatgcccttgcccattttctacagacctaatcgatttttacctaatcagttttacag

SEQ ID NO: 14717 - DNA, 2300 bp, Homo sapien
tcacctcagtctttcaagtagctgggaatgcaggtgcatgccactctgcccagcaaattgtttaatttttttgagacacagagtcttgctatgttgcctaggctagtctcaaacccctggcctcaagcaatcctctctcggccttccaaagtgctgggatcacaggcatgagccaccatgccctgctagacatgtaactcttgacttgacaaaactgttgtgtactgaaatgtgtctcccccaaatttatatcttgcagacctagcccccaatgtggtgtttggagacagggcctttaaggagataattaaggttaaatgaggtcataagggtggggcctaaatctgatacgactggtgtccttagaagaagaagagagaccaaagctcttgctctctgcaggcacacagaggaaaggccatgtgagggcatagtgagaaggcagctgtctgtaagccaggaagagagccctcacctgcaaccaaatcagccagcattttgatcagggacttccagcctccggaatgtgaggaaataaatgtccattgtttaagtcacccagtctgtggtatttttttatggcatcccaagcagatgaatacaaaaacctgacataaaaagcccctgggaaaatttgtttttattaatatttttgttttcttggcccacgttgaatgcatgtgtcagtgtgtgatgtgacaacctgcattgttggtgttcgtcccgttcaggaagagggtagtgactctgcattctgtacacattaaaccatatgtgtacacatctgttaccacatttcaagaaaatgcatacagatatggcatgtgataactgtatcagtaaggaagagagttctggacatcgcattgtgtgtagaaaagttcaaggagctgataaaataggtaaaaaagagctggggacagatagaaatgatgacctccagaattgaaaggccaatatcttatctaatttcaagatgaggaatttttaggtagtcagattttacctgaatgtaaaagaccacactagcagaattatttaaactgaaaaacattagaaagcagtaatctccctttttctggaagtaataatctcagcctagaaaaatatttgcatggtacacagtatagtagatttcctcttccttgaggggacagtcacccctcaacacatgtgtatggaaagacattgaccaaaaaagggaaaaatagattgtttcatgaggctgggcactaaggtcagattatagacataactgtaaatgtttcaatattatgtatgaaatcaaagtacatcaccaggctctgaatctgctgcatacttcattcatttgtgcagttcttgatttggtaagttggccccaggcaaacaaatattcacattatggattttgatattgctttttatatttgtgaagtaatgagtcaattccttttccaatactgaaatcattttagaaacagaatataaataaatgaacttcaataaacaaaataacattatttttatggttacagatgtaatgcctgttcatggtagaaaatatagaaaattatgtgtggaataacagtattcacccagattcctagctgtaagagataatcaaggttaacattttagcatatttaatgccaatctttttactatgtataatcatgtgtacatattttttattttttattgtttttatttaaaaaatagacatgaggtcttgctatattgctcaggctagtctcaaacccctgaggctcaagcaagccacctgtcttggcctcccaaagtgctgggattacaggtatgagccatcacggctggccaaccatgtatatgtaaaactgcaactatatacacacacacacatccctttaaaattgaaagtgggtcattttcttttctataatacattgtcagcaatgctgtatgccattaatgaatttgaaaatgtgatgttttaatatctgtgccatattccgtgcataaatttgccataacttacaatatagtttcacatttgaccactgaatatttacagtgttgccagttggtatggtttggatgtgtgtccctgcccaaatctcatattgaaatataatccccagtgttggagatggggcctggtgggaggtgatcggatcaggggggtggatttctcacagatgctttaggaccatcctcttggtgctgttctcatgatagttcagtgaattctcactcgatctggtcgtttgaaagtgtgtggcatctcccccctcgctctctctcttgctcctgctccagccatgtgacctgcgtgctccctg

SEQ ID NO: 14718 - DNA, 2300 bp, Homo sapien
agaacctgggctatgatggcagacaacctggttttcaaagacttgccctgccacttactagacaagtgacactggtcaggttaacctttctaggcctcagttgtctcatctgtaaaacaaggctaataatagtatctggtttagaggattgctgtgaggattacgttgtaaatgcgggtgaagcactgagaatggtgtctggccataataagcacacagtaaacattagctcttgttattacaaagaatgtaaataagagttgaagactataaagcactccgcacatttcattagcaatggggtcaccattcgtagacaagtctcagctcagctttgcagcttaccgtcacagaggcagggaacagagctagcttgtcaagggtcttctcaggaggaagtggggaggtagcccatgaagcaaagtgatggggagggaaagagggggacataaagatcctgcagagaagttggctccgagtgataggagggtgtggggaagaaagaagggggcagtaaggattctcattataggactggccgggaatggtgtgaccactgattcaggaagtggggaagacgggaagagacttcaagtgtggggggagccaattcagataggaggtggcctagacaaggtgagggcatctcaaagcgacaccaagcctgggtgagatcacgtctggagccacagaaggatgaagcagtttatatttaaatgccatggcaaaacaacatccccaccattacaccctccattctcattcaagttcttcgggagaaaggaaaaatatggtcgggttcattgctattcagttttgaagttgagcctgcatttggacacaggcgcttgggagagtgggtcattttctttgacacaattattaaggaaaccgttttaaatgattccttgagtcccccaatggcccaggtggaaggtgctgtttcctggtacctgtccagccctctgagcttttctctcagcttccaaacgctgcagttgagaactagcagatcctattggtagtgccctgtggcccacactccttggtaacggtgagagtggggagtaattaggagcggctgccatgggccaggcattcaggtcaaggccgaggatggtggccagggccacagagccaggggacgggtggggacccagcaggcctgcggctggccgcttgctgagcgctccagcagcggggccctgggcggatgaagggccggagaaggccctctgctggggccgcggcgatcttgcagcgcctggacaccgaggctggggcactaacggtccgtggggctcccgacgtattcctctaacttcccctttctgtcctttcggtctggggccttttcaacaccccctgtggccggggacagctggggcagaaaccggcaggcggcagaagcctcaagcagctctgacctctggcacctccccaagacccagagcacaacatctgtccccagaaatccccgggcggagaagagcgcgcgccaagcccttcctgggtactcagtattctcccttcctgggaacagcctgccctctgaggcctgggcacccgggttcccgagcgccgggtcccagccccgcgggggcgcctccgcaccccatctccgcgcccggcgcagagccgccagtctccgccgcggggccccgtgccccgcagcgccacctaggggccgggcgccgcctcccgccctcaggggcaccccccttactccgcaaggactccgggtctccccagttctcccggcagccggaccctcccagcctcggccgccgggccgccctccgcatcccaagcccgcctcccgtgcctccccgggggcgcaccggcagcgaggagcggctcggcgagggcgcgcagcggcggcccaggcccaggccttggggctggggctgagggggtgagagcaggcgcggccggcgggcaaggggaaccgggcgatggcagcggcgggcggccgcgggaggcgaggcagcggcggcggcgggcggcgcgacgagcccctgtgattggcacagccggagccggaggaggaggccaggggagggcggaggcgggggaggaggaggaggaaggggcgatcgcggcggcggcggcggcggcgaggagctgtgccttccacctctccagccccggcaggacgggggcggccgccgcgaacccggggcggggacagcacgcagcctcgaggcgcgcacccccgcccggcagcggccccgacacccggggcgagcgggaaagcggcagcggcggcggcggcggcggcggcgggggaaggatgcagg

SEQ ID NO: 14719 - DNA, 2300 bp, Homo sapien
gaggtggcctagacaaggtgagggcatctcaaagcgacaccaagcctgggtgagatcacgtctggagccacagaaggatgaagcagtttatatttaaatgccatggcaaaacaacatccccaccattacaccctccattctcattcaagttcttcgggagaaaggaaaaatatggtcgggttcattgctattcagttttgaagttgagcctgcatttggacacaggcgcttgggagagtgggtcattttctttgacacaattattaaggaaaccgttttaaatgattccttgagtcccccaatggcccaggtggaaggtgctgtttcctggtacctgtccagccctctgagcttttctctcagcttccaaacgctgcagttgagaactagcagatcctattggtagtgccctgtggcccacactccttggtaacggtgagagtggggagtaattaggagcggctgccatgggccaggcattcaggtcaaggccgaggatggtggccagggccacagagccaggggacgggtggggacccagcaggcctgcggctggccgcttgctgagcgctccagcagcggggccctgggcggatgaagggccggagaaggccctctgctggggccgcggcgatcttgcagcgcctggacaccgaggctggggcactaacggtccgtggggctcccgacgtattcctctaacttcccctttctgtcctttcggtctggggccttttcaacaccccctgtggccggggacagctggggcagaaaccggcaggcggcagaagcctcaagcagctctgacctctggcacctccccaagacccagagcacaacatctgtccccagaaatccccgggcggagaagagcgcgcgccaagcccttcctgggtactcagtattctcccttcctgggaacagcctgccctctgaggcctgggcacccgggttcccgagcgccgggtcccagccccgcgggggcgcctccgcaccccatctccgcgcccggcgcagagccgccagtctccgccgcggggccccgtgccccgcagcgccacctaggggccgggcgccgcctcccgccctcaggggcaccccccttactccgcaaggactccgggtctccccagttctcccggcagccggaccctcccagcctcggccgccgggccgccctccgcatcccaagcccgcctcccgtgcctccccgggggcgcaccggcagcgaggagcggctcggcgagggcgcgcagcggcggcccaggcccaggccttggggctggggctgagggggtgagagcaggcgcggccggcgggcaaggggaaccgggcgatggcagcggcgggcggccgcgggaggcgaggcagcggcggcggcgggcggcgcgacgagcccctgtgattggcacagccggagccggaggaggaggccaggggagggcggaggcgggggaggaggaggaggaaggggcgatcgcggcggcggcggcggcggcgaggagctgtgccttccacctctccagccccggcaggacgggggcggccgccgcgaacccggggcggggacagcacgcagcctcgaggcgcgcacccccgcccggcagcggccccgacacccggggcgagcgggaaagcggcagcggcggcggcggcggcggcggcgggggaaggatgcaggggaagaagccgggcggttcgtcgggcggcggccggagcggcgagctgcagggggacgaggcgcagaggaacaagaaaaagaaaaagaaggtgtcctgcttttccaacatcaagatcttcctggtgtccgagtgcgccctgatgctggcgcagggcacggtgggcgcctacctggtgagtccccgagccaactccgccgcgggccccttccccagcccggctctcgagcggccgcctggcccgacgagggggccgcccggcgctgggggcaggcgggcatgacctcggcccggcgtggaggttggcgagtggtgcagaggcggccgccgggggagctgccggccggggctgccagcgagcgggtagcgggcgggaccgttgatgccggtagcagctcgcgcgcgtccggctggggcagggggtgccgggggaggagaggcggcgggcaggtgggcgtgaaactattcctctccccccataagagcggagcgagacggtgagttcagggttctccttggagaggaacgaaaaagcgtcggggttttcaggtgacctgcacatgggaagaaaaaccagttagcatcctgcgtcctctactctccattgcatcctcctcgaga

SEQ ID NO: 14720 - DNA, 2300 bp, Homo sapien
gaccccagcttgcacagttaccaagacaggaaaccagttttactctggcccttgaaacctctactcagaaatgacatacagtgtttcccctcatatttcattaaccaaagcaagtcacgtggtgtattggtttcctgttgctgcataagaaataaccccaaacctaatgacctaaaacagcagacatttcttatcatactgtttttcgtatttttttctgtgggtctggaatacaggagcagcttcactgggcagttctagctcagggtctcttatgaggctgcagtcaaggtgttgcaaggtggcaacctggtcttggatcatcccaaggctcagcttggggaggatccacttccaagctcactgccatgggcccacaggaggggactacctcaccgtgacacccctgaagcaaacaacccaagagaaggtgagagagagcacctgaggcaggagtcacagtctttttataacctaatctcagaagtgacatctcattacttctgctgtatttcgtttgttagaagctagtcacttgttcaggtttactatggaaagagaagggattattacacaaggaccagaataccaggcagcagggactttaggggaccgtctgggtcattgcctaccatgtgctgtcacatctctaccttgtgtctgaaaaggaacactatatttccatgtagtttagcatgcagcaaagccatatttcctttctctctgaaaacagagggtgagaagccattccagcctctgcttctcatgccgatctatcctcaggatcagtaagaattctcagtccccaggttctcaatccatcatctcttgacaatgctaaatttactaattcaccccaaagaaataatgtggttttaaatccaagtcgctttgtgattcactccattaatcctactgatatatttacttgtagctaatgatgttacaaatttccaagtggaaaaaaaaaatcagaggcagccctatttatttatacttttaaagtgctgagtctgttccgaaggtgattgagtgctggtgttttgcagccgtcggctggccctttgaacccgtttcctagggagtgtggtaacaggtaggctgggaagacacaggacacatgaagtgagtcagtttccatcttgctcgtatagacaggccagcttccaccactgcacccaaggcagcacaagacagggccagcagaggggatagagaggaggcatactcctgatgcaatggggaagccaccttgaagggtagcaaagtggccagatagcatattttgccctcagtgctatcagtggtggccttgaaccaaaagcctgcgaatgaccagaatatctgagctggaaagagcctcagacatcattcctttccaactctttcattttacaaatgaggaaaccaagtcacagagaggggaagggatgtccccaatccaaggaatgtatctctataaaaccccgatctcctgagcctgcctgtggagatttcactcaccaaactctcttaggagaatgaaacagcaccttttctcagtgcctgaaatgaccagcgggtagacagatggctggagggggcttagcccatccactcccagttccctccatttgctgagactgttccttcagcctggaatgctgttcccatcttactgtgttcggcatctctgtttgcccgttaaggcccagggtggagcggtgtgatccatggttccaggctcattggctacttggtgcctgcatggatgtaaggcaggtgggctcctttcagtcccgtgtgggcatctcgctgatgacaggcttccccaccaagttgatagcggacttccctttctgtttccaaagaatgcaaggtgcattgtcagtcacggtctttgtttgcgtccttcccggaggcaccgtgaggcaccgtgtggcacagctctttaccggtagagggcagaagaatatcatttatcctatttagggagtcagccatagaattctatagttgccagcagtttttattgtttctagtcttgtgaaacttgccgcctgcaggtggatttgggctgtatttgaggaggggattcttaattgctttagggcctcccctatcttttccttgctttcctaaaacagtgctcttctgtagggctgtccaatgtatgggaacattactgtaggcattaataggcaagggccacacacgtggacacatgtttctgaagtccccactgagattggggtccaggaaaagcagcagcctaaaatttgtggggaaggagcaaggcaggtccacagagggccctcgtt

SEQ ID NO: 14721 - DNA, 2300 bp, Homo sapien
tcttatattattaaagttactccagataaggacaataggagaaaagaaatgtatagtcttattttatgtattaatgtagaaacaaaatcctacacaaaatattagcaaactaaaaccaacagtgcattaaaaatatacaaggaaccccttgtagataaataagaaaaacagcaacctcaatagaaaaatagtcaaaggatgtggacatataatttatgaaagaggaaatcaaaagcatctgaggaaatgctcaaaattattactaatcaaagaaaggcaaatacaaaataaagataatgccaaatattggtggatacttagggaggggaagccttgggcactgctcccaggagagcagacgtacatgggcattctgtagagtacagctggttcacttaattgagttcaattaagtagatacacactgcatgactcagcaattctatcccttgctatgcagtccaaagaaatccttacacagctccccaagggacatgcatatataaagtttttcactgcagcactggttgaggtgccagaaagctggagacaacctggctgtctgtcttctgtagattggataggcaaatgtggtgcgtgtacacagcggagtatggtgcagcagtttagaaaccacagattagttgtagccatagcaacatggatgaactgtttaagaaatggtaattagtgagaaaggtaaaatgccaaaagaaatctatagctcagttaaaaaacggaaatacatgcatacaaaacaacactattttgcaagaatacgtacaaacagaagcacagaatgacatagggatggttttcatcattagaagggaaccaggagtggggtgtatctgtgaaagttccagcaggaagcaggtggcacccctaaatgaagataactcaagataagtgtatgtacaaaggtgtgggagggtgtaaggaaactcccagaggtagtatagaaacctggagttactggaagtagagctgttacttcaacgcagcctgaagggagggaggagggaacagttactacaggaattcaaagggaagagagagttcttgctccaggagagtggtagtggccttcatggttgagggacctagctagggaccttgacctcatctcctctcttccttgtccagctagagctccccatgggccaatccaacagaaagccaaagggcaaggaaagccattgatatagccactgaagcctgcctcttggacagaaagaagtgtgaagaagtgtattgggggattgggtctggagggacaaatggcagctgtgtgactaatgggctatgaggaaaaagggtgctagttaataaaacaatcaaataagtataaacatagagggagggcaaataaagacaattttctacctaagaggaatccaggatcagtggtaaaaaaaaaaatgaattttttagaccacatattgatatcctacactgtgtgtttgacacaagtaaatttgttttctatgttcatatttatcatatttaccataaagtttgtcagttaacatgtaaatgaaaacaccagtgatctcaaataatagtaaacttttggaaatgtaaccttcgagtatgcacgtttttattagacttttcagaaatagttacataaatggaatttctgagccaagcttttatataatccttgcagacctgcagcatcccctgggaccctagaggtttagggccacagtttaaaaattactttcttgaatgaatgcatatctctctgtgattatctaatccaagccatcaatctccataatgtctcctctcttccagctccggcctttgattaatccaaatttctcctagtttcttttattacagtgtattaatgtttaaaataccatagtctataagagtgcaattaagtggcctctggaaaattccactccttcttgcacttgaatgatgaagcttctgaaaatgacttgaccataatgtaatcagaggacaggccttcttcccccacaacccccaccctttctcacagttggatgttaaatgtggcacttgtgaacatcactggaacttgcgaggtgaggcacaatgaagtccaggctttgagatcggcagtgacttcatgaggcctgaggcaatgacaaagagcccccaggtaaggtggcttccattatgggtgctttccccagaccctgcagggagggaccaggcctcagtaaggtccacaggccagctttctgcttttttttttttttttttgagatggagtcttgctctgtcgcccaggctggagtgcagtggtgcgatctctgctc

SEQ ID NO: 14722 - DNA, 2300 bp, Homo sapien
cagtgagccactagagggcaggaaacccgaggtgtctctctccacttggtgtctctagctcctagcacagagcctggtacaaggtaggttaaatattgctgcacgttggagtgagtggaggagcgattcaaatacagagcagcataccaggcgcatcctgtactttcctctccctattcaggtatcccaaccattcccttcagaaaaacaaggcaaaatgatgacaaaaaccactccacacctcctaaaccacccttcaagcaagacaaagggaaagattttggcattttgaaaacttgaaataaggatggttagaccccgtgccagccacactgatgggaaactctcctttgacgtctcatccctgcctctaacagacagggagagtgacgtccaacattgttctccacatcagaaaaacctcaccccaagaaaaatacatggtattttcgaagtgcttactgtaaaaggagcagggtgcgctgacttcgccaaggaatgggaaggaaatgaagcgctgaggtgggaattagtacacgcttcctctggggaaaagacatctgctcctggcactcctcaaaggaggtgaggcagagctctcccttgacgctgtgctgcttccctaatccattctccaggctgggtgatgggacctcttcctgcaggggagagcctgccctggctcccagggtcaacaagggcagcagcccccggcttggaagcctccctcctgcccctccttacacacgaaggggcagaagggctctgggcacaagcagtactttggtagaaaatcagaaggccctcttacatccccgggggcgccatgaagggacttggctgctgccagcccctcgccaaactcctctgagtggtccaggggataaggccgacacgcccctcccattcactggggtgtggtttccagcacttaggacattccatgtagcttctccaacaggactcctcctccccacactcaaacccaaaggaccctttcataaaccagatgatcatttctggaaagttacatttcttaatttcaggaattgttccaattcgtgcaaagaaaataaaaggtaattatctaattccagtaaaacttaatggggcccttcccacccctggccaatggttggtgtgaaatgtaatttgacttaaactgtctaaggctgtgaaagtgtacaatattcggaagggtggggggcattaccccttgtgggagccatatttttctagaaggcattttgatcaagacaggcctcccgcggttattgatcttagggtcattgagagtccaagaactggggagatgaaggccacccggcgtcagcaccgcgagggcggagggaaggcgggcgctgagtctcccattggggttctagccgagggttccagccaggactgcgtgatctgggggcagctcggagagctctcccgacccagtatcgggtctataaatggagataaagatcagcacctggagggagtggtttctcgagggctgagagcctcgcccacaaactgtagtcagcatcttcactgaagttggcctgtcttggatatttcttctctcctccccttcccccacctcccctcctaattcatcaactgctgaaacatctgcctggctgaaaccgccttctcgccgcgcgctgggggctgtccccaggtgttggtctttgtgtcgagaaaactttgcgaggaggcgagggagctggacaaagagcgggcgagggagggcgtttgccagcctgaggggtgcgccgggcggtgcgcgcacttccctgggctcagctccgtacccggtcgctcgcggtggccagagcccagtctctctaggccaggagtggcgtccggctgcatccccgcgccctcgggagctgaataaagccaggcgggagaagcaaaggctagcgcctggacgctggagttggtgggaggaggcgagcagaggcgcggagcaaagctgtcaaactgcgcgcggagccgggcgcggggcgggggaagggagaggagggagggaggggcaggcgggagccgggagggagcgagcgggctcgccgcgcctgagcaacccctgcctgtcgctgccgctgccgctgccgctgccgccgccggcccggactcgtccggagcgcagggtgtctgcccagctgcgcgcggcgcgcggaggctccggcgtccgccgctgcgccctccggcccctgctcctcgcgccggcccgcgtgggtcccggcgggcgcgaacccaccatgcagctgcagttccggagctggatgctggccgcgctcacgctg

SEQ ID NO: 14723 - DNA, 2300 bp, Homo sapien
atgccactcctcatggaagcagaaaaaaacaggcttttgttctggtggcaggtcatccacaacaatgggatgtttccatggttaccatctagaagcaatatcttagttgtttggggctttatgatgggggtaatgtaatttctgttcttagcaatccaggtgacagggcaatttccatatatagtccactgagccatccagccccagatcatagtttctctagaatcgtcctagctgtctgcagccaaagcccaatagaaccacccaacaaagagcactaaaggtcccttgtggcctttctcagtcttcctcaccatttcctcagccacctttccctagaacctgggggatgggaaatggggctactgtgggcttccaagaaccatgccaacaaagacctcaagttctccagtcatgacaacatttttaaatatttaaaagcattctccaaaactgacccagaaccagctatgagcggccatcccttaaggaattaatagaaaatgaggatccaatggccaaaaagtggaggactgccatgcaacccacatggaccctagagtgatgggtccaggcagtcatggggggagtgcagccctccattcagcatgctgaggcaagtcaaatggggttggtgcaggaaaacgccctttcaatttgtttccaagtgtctttattttctaaaatgagactgtaatggtggagctgctggacaaagtcaatgaagggatgactggcccgtcagaatcatgaatgcttaacagaagctgtgtgttccagggaagaccactctgaggcaagctgttttactgcattctcattccagtggcctaggtgggcaagaatataactcactgtaataacaacagcgggacaggttgcttggctgtatcttgtgttcacaaatgccccatctctggtcaggagctctggaaggagtaccagatgatctgaaagcctgccactcaagaacctagagggcatgaatgagacttggctctggtatttttccatctgtaaaatggagaagacacctaccgacctcctttatgcagttattgcaaaaatgcaaatacaggacaaggtagatagagaaattgggtagagggagtggggatgctcagtggtataaagcaagtgaaatgtatgcagctgtgagttttcaggattctgcttgtccaacatcagatcacaccattgccctgcttaaaccctcagtggctttccttcatccttgcaagaaaattccaagcatcttaccatggcttacaagaccttgagccctcctccctctggctccctgttattctagtgtcagggcctttgcacttgttgcgccctctgcctggaaatctgcttcccagctccttgccttccctctctgtctcatctttcatgcttcaaattgaatgtcacctcctggggagcctgctccttgtctccctcagctaattactttctattacacgacacattatcctgctaggtggtcttcataaactaaattatctcatttattttgtagttctcaaccccaaggaccctcctaaaagatcccagtgctcaggccacactccacacaagtttaaacatctctggaagctgatcacggacatcttcctggctcacggtcagaactgagaaacaatgacatatctgctcactagtttatggtccacctccacttctaggatgttccaggggtacttgttttccacaggggtcacctatgccctggaaggtggaagtggccctcctccaaagtaattgttgatgactctgcctggggtgctggcaacaggcttgcaatgtgaccatatccctggtgctctcagcaggtacaggccagctttgaatttcccaaggatgacactttaccccctgcagctccagataaatgtccagcatttttacccattagctgagctagtgggtggaatttttccagtccccatttgacccactcagagaatttcatgagccttgccttacccaggaggctctttcctggcttgtgcaggctttagaactccaccccctagccccaccccaaagacctttatgagctcagctggacattggaaccactggaggagctttaaaacctcctgaaacctaggtctggccttcagggaatctgattccttggtctggggtatggcccgggcatctcctgaagctcaccaggtcacacagaggtgtagccccagctgggaaccactgacccagactcagttcctgaatttctgtgaccgcttccatggcagcccctctcaggcccctggtgtgaggtctttctt

SEQ ID NO: 14724 - DNA, 2300 bp, Homo sapien
ttctgatcttgtcaatctgtcttataactctaaatgtgtggtctcacctggctagatacagaaaatacctatcttcttatagaagcaggcaatcctcaaccccattaaaaaagtatggtttcttggacattccatctaataggaatgccagtttgcctcctgatatgttgccagtctggccatttcagcagtcactattcagcactagaggaggacttcagtaaaagttcctttgtcagtaagtcttccacgcaacatatttgtttccaggtcctaatggcaattcctcaggatctggagaaaaaaaaaaaaaaaaaaaaagaaaaggatcaactctcacgtttgagtttgtcccattcatctacataaagactatctatcagtttgaagtgtctttttgagaatcagaaaggggagaggatatagggggcaaaggatgtattctttgagatcctgctcttaagcagtgattcttctctagcactccttatttctagaattttctagccatctctaacaaaagcaaagtgcaaagagcatttaatacaaaccaaaacatgaaatgatcttttgatagttcagtgttgtggctgtgacttggaatttttcactacatttaaaaaaaaaaaagccacatatgcccgggtagtctctgcatcaagtctgataccattgctccgacgttatgaggctgaagcagttgtggctgattgatgtcactcttctagccatctcctatttccacagagagaggccgggttaatccaactccagtctaacttcggaggcatcaaggattctaggcagcatctcccgtgtttctttttccaagtgaattcctggaggaaaacaatgaggtccatgtgtctttgcatccccagggaccagctcagtaatgggcgtataagaacacgctgaaaaaaattgttttgtttttgaacgacagcgatttaagagtagtaaggtcctcgtaaatataggacattgtactcgtgtttttcttccgagcatacaaatatttgcaatgaggttgcaccgcagactccacagccattgtggcacctggggctctgtgacttgggaggcagaggagatggaatgccggtgagaagaaggagattgtggtgtgaatgtgagggatgagggtgaattagcttcctacggcggctgttacaagtttaccacaagataaatgagttaaaacagtacagatttattatctcacagttctggaagacagaagttcaaactactggcaaagttcaaagtgttggcaaggctgtgctcctcaggaggctctagaggagaacctttttcttgccttttcctgtttctaggggccaccggcatccttcggctcatggcctcttcctccatcttaaaagccagcttctgcaaattcgtctctaattctgacactacttctcttgcctccctctctcacttataggggtccctgtgatgacagtaagctcaccctgataatcgaggctaatctccccatcttagggttagcctattagcaacctaaattccaccggcaactttaattccccccttgccatgcaccgtgacatattcacaggttctggggaggagggcatgagcatctttgtcggggcattgttctgtccatcacagagaagcactcagagattccggactccagtatcctcattgtacacttgaggaagcttgggctcagaggctttatgttaattccaacagtttttgcaacaggaggaggagaatatctgtccaggagccctaatcaagactcagcaggaagctggtggcttcctttccttccttcttttgcttccttcctgttcttcctgtgcttcctttcagttcttccttctacatatggggcccatcacattcccactgactcagatgctgaggggccagactgaagggacagtggccattgcatcaagtcagagaacggatctgacccatctagtagaagcttattgttttggcagaagcacaagctcttagaggtgcagctgcagggtgtgacctattggggacattgagctcagtgaccatgggccctgagagtctgaaatcctggaatttctcccaaaacgaagtccatgtagggaagccaaagtgtgagtcttacccggctggtttacaactgactgacatttgctgcctgggcagctgttgtgggtgcctggaaaccctattggactaggactggccccggcaaaaaacaagtgttatagctgcccagtgtcctctgagtggatgctggtgattctggtatggagcccagatgtaaggcagca

SEQ ID NO: 14725 - DNA, 2300 bp, Homo sapien
atatgcaccaccacacccagctaatttttatttttagtagagacggggtttcaccatggtctcgaactcctgacctcaggtgatccacttaccttggcctcccaaagtgctgggattacaggcgtagccaccacgcccagcctatttcagatattaaaaacctggtattcagtggttaaatacttggccaaggccattcagtggtcaaacctttcatcctggctaagaggctcaaagcccaggacctctttgctgtatcgtgcaggaatttctgataagtacaaaaataagaggctgtgatagctgaggtttatgccttggagaacagttctccaaaatcatggaatcagaggtgtttctttaaaaacttacttttatatattctatcatactgatatgatgatgttgactctctactaatgcaacatttttaacataccagaaggtgatatttcagagttagaagagacctaaatcatgtgatctatccatatctcttatcactggggcatatttaacatggaatgcatatttaacatgcatttcagaagtaccttctggatgatgacttctgataatctgattgttgtccatccccccagatcaaaatgaattacactgtaggtggcaggcagcttctaggatggccccaatgatccctgcttcctgatattcatactgttgtgtaattccttctccttgagtgtggataaaacctgtgacttgcttctaactgatagaatatgacaaaggtgtgagaatgtcacttctgtgatgaggtttcataagacagtgacttctgtcttggtaggtgactctttctattgctatcttgacttgcatactttgatgaagcaagttgctatgttggaagggccccatgccaaggaactgagggcaacctctggccaactgccccaaggaaactgaggctccagtccaacagccagtgcagggctgaatctggccaaaaaatgctgattgagcttggaagcagatccttccccagttgagccttcagaggagaccccagccccagctgacaccttgattgcacctttgggagaggctctgaagcagagaacccaggtaacctatggtcagtttcctgacccacagactgtgagatactaaatgcatgttgttttaagcagctaggttttagggcaatttgttatgctgcagtagacaactaatacactgtactatatttgtctctttttccagcaggaccagaaatgggctgtttaaggtccctgggaccttgtcatgtcatgtgtatttaactgtttacccaccaccgaaaagcttcctgccaggacccatctgcagtgtaaaaggggaaccctgaagccctgggaatggctcctagtacttcaggtaggggctctgtgtccccatcagtttccacctttgggcctcccactagaacttccttaattgtctttctccacctaagcatcatttagcttacaaaccagaggcagcaagccaattattccccggagaaacttcagccaggcaggggggcattaaccacaccaactggtgttccacaacaaaggtatgagaggcagagattcacatcccagtccggttcgtaagcagaggcgcatgaaataagaaaccccttttgagaaagagggaaattaggggagatactgaaattatgcgttgcataggacatcaggcaaccacttcactgtcggcttcagtttttgatctgcaagatgggagtctacttctaggtcccatagtttttgattcttagtctgacacaatgtgggttgctgtgagctggctctttgggtgccaagtcagctatcaaatgtgggtaacagaatacctgtcttcaaagggggttgtagaattaaatgaaataaataaaacacgtgaaacgtgtaacacagggccagcccaagtgtcatcgtggcagttgctgcttcaccacggggtctcaagtcccgaggaattggggtcgcgggcgagcggagcgcagccgggacccaggccgggtggcctgccccgcccacgtggggccgcggcccgtcgaatgactccttgcaacgtgttggtggtggcggcggcggtggcgcgggctcttccgggcgccgcagcttcctgccaagcaccgcgcagccgcctccgccgcaggatcccccggtgcaggcctccgtgctggtgcggatcctggagctcagccgcgcgcgccctgcccgatcctgtgccgacccaccgcactatgcgcgccgtgccgctgcccgccccgctcctgccgctgctgctgctcgcgctcctgg

SEQ ID NO: 14726 - DNA, 2300 bp, Homo sapien
gtcaattcctagtctttaaaagttcataatttaattatttttaagaatttatattatcacaagccatgatcgaaaaactttcacaaaagaacattctgacaccaaatctcttcctgaagttactttctcgtaatgtaaatatgaataaagtaggactgctctcggtaatgggcgatgaagaggagccatatttgttgcatttgttgcatgtataaaaatctagatatgcttaaaacggaacagtattttaaaagtacaggtttcataaaatttagtagagttctctgtatagtctctaatcttagaaaaatgttggaagggtaatttttaagtgtagtggtttgaagaacaaaccagaagcgcacaaacctttgtgtattttagaatatatttgtcttcattctgcggagctcttgtgttgtaaaggtgcagaactacgtaaaaatagtgttgggcagacttacatagtacatctgaaatcagatactggtttattcgaccatatttctaagggcatttttccagtaaaattgttttattttttgagtagccttcctatagtggtacatgttacatcagttgcgcatatcttgattttacagaatctgtcttaagtaccaattttggtttttcaaatcaatgtttctgaaatttttgaacactgaaagtggttttaaatgaatattctgaatctagttctttagaatcctctttgaattgtgaaatgcaaaataattgttagcagtttaacctgaaagatctttttacatgataaatgggggaggagaaagactgaaatgaaaatgttgaagaccctgatttgaaattgagtgtaaaggtctagatactgtaagttttagagtagctttagagacaaagctagtatcccacttggtgagatcaagtaacttgtggtttaaaatttaaagtaaccagtggccattttaacttcactaatttctcttggaggagctaatttttaattgctcatgattgtaaaacatacttccggatggtaagggagatgttaagatgatttgtcttgaagaatggtaaactttttctttgtttattgcctgtcataaaaagagggaaagtaaaaaaaaaaaggttcataatcttaaatcagtccaaaaatttgaattttctgtatttctgtttaattcaatgcgttaatctttagcattggtcaatacagccaaaagatgaggaaaacaaagactgatagatactaagataagaaataactgcaaccataaatgtatacaggttatgtgtccatgagccatctcttcagtttgcccatagatttttgtctgtggaatattttcttgtttcatcacactgaatcgttggccaagaaatgcttgaaaatcaaaacattaatatcatctttcttcttttttttaaaggtgacttaagagattaaaattaatttggttgctgttggttctgaacaaataatgagttcttttatttgaggtaagagtgggttaatttttattgttttgacaaaaattagcttattaggcttttgttttatctttaataatttacatttcaattaatgaatgggtatcatttttaaaagttgtgattatgaatatgagtaaactatcaaataatttgacaaaagcctttaagccttttcactgcaggaaagattaaaagtatatacgcatagccattgtaacttaatgtaccctttgaatagtttaaaatactgaaggtcctttaagcctttgtttaattttgggaacaagagaagactgattagattttgaggaaaaccatgaaccaaagatagctttttttttctgtttaactctgtatattgtgcaaacaattttaatcttttaagtatttaaagaaataagcttattggagaatttgaactagtttgctattcatactgatagattttagggaagaacatttaaaaaatcaggttttgagcatagattttagtttcttttttgtaattaaaaagtttaaaaacacttatttttacttgctattgtttgcttcataattaagtttagaatcttatttgttttcaccaaaaggtatgccattttgaagactgagacgttggagttttatcctagaggataaaggaaatctttgggaaagtcagtattttatatagcaagtaagtaaatgtttttacccaacatctgcaattgaatagttaccaacatttaagtagaaaaataccattaaagtttgttaatgaaacaaactgtagactacttatcactgaaaggatgagaaaaccatcaaatttctttgcctgacat

SEQ ID NO: 14727 - DNA, 2300 bp, Homo sapien
tagcacctctgaaatagtttttctaacagcctgaaaaatagttggaaagagttgatgggaaggttgtataaatgaattttggtgaattctcaacatgatttatttatttttattttatttttcgagacagagttccactgtcacccatgctggagtgcagtgtcatgatcttgactcatcgcaacctccgcctctggggctcaagcgattctcctgcttcagcctccagtgtagctgggattacagtcacgcaccaccattcccagctaatttttgtatttttagtagagatggggtttccccatgttggccaggctggtctcgaactcctgacctcaggtgatccacacgcctcagcctcccaaagtgctaggattacaggtgtgagccaccgcacctggccaacatgatttattattgacaacctttttggtaattatatattagctacttcataaaaataatttttttgaatcatatttgggaatctagattttagatgataatttttgcctatggctactttagcttgcgttgtgtaaatggctgctagggcctgcgaaatagattttatttttggagggggatttgtttttcaatacaggatgatgaaagagatgaaaacttttctaatatagtacaataattggctgtggtcattttaaagggatcagttgcatagcatatagtagatgctcaataaatacttagtgtatcaatatggcttctgttaaacattgtttatcagctagtgttttggatttaatttaaaaacagtgacattgactattaaaacatgttttaatgaattaaatataaaattgtaggtatgcctgaaagccaaagttttgaccaagtaaaaattaaaagtgacaagatttcattttttctctgcaattctcaatctcttagtttgcatatatagtcaacttttaaaccattgaggacggtaccggaatatttgatttgattgtaaaccttaaataagatgactccttttcttagttgtcacaattgacattaattttatagttagtttttatgcccataagacccagacttgttaatatatattctactgaagattcaaggtatcttggtaataagtcaacatatgtgaatttacttctcagggcttcctttttttttttttttcccctgagacggagtttcactcttgttgcacaggatggagtgtggtggcgcgatctcagctcactgcaacccctgcctcccgggttcaattgattctcctgcctcagcctccccagtagctgggattacaggcatgtgccaccacgcccagctaatttttgtatttttagtagagatggggtttcaccatgttgaccaggttggtctcgaactcctgacctcaggggatgtgctggccttggcctccctaagtgataggattacaggtgtgagccaccgcacccagcctctcagggctttcttgcataaatatttccacatttaaagacagtagacgaagattgaaatcatcataagcaccaagaatgttaattacatgatgagaaggatgaatttttgctctaggtaattttacacctgtttgtcccatcattgactttgaaataagtgttttaagttttaaaataatttgttgcattaataatagtagctttatgatagccatccattaagacaattaggaatcactaatttctttttccttatactactctctgcccctgccccccgccccatttttctttgctattaaaaatgggaaaagttgctgagaagtagaggaaaggagatggtttattttaggagagcccttgtaaactcaatccagatggtgaatcacttacctgtgtatccaccaacaatgtattttatcatgtcccagtgtttttggaacaaatttactaaagtagaatttaaaaagaataccaggccaggtgcagtggctcaggcctgtagtcccagcactttggggaggctgagggcaggtgcatcacaaggtcaggagttcgagaccagcctggcccacatagtgaaaccccgtctctactaaaattacaaaaattagccaggcatggtgatatgcgcctacagtcccagctacttgggaggctgaggcaggagaatcgcttgacctgggaggtgcaggttgtggtgagccgaggttgcgccactgcactccagcctgaggaacagagagagactccgtctcaaaaaaaaaaaaaaaaaaccttagttgggtgcagaggcatgtacttgtgttctcagctactgggaaagctgaggtgggaggatctcttccacccaga

SEQ ID NO: 14728 - DNA, 2300 bp, Homo sapien
atttctcagtttgggtttttttttttaagtggaagtttaattaaatgtttagttttattttagtaatactttggcctttgtagttgccgagtggtaaagtgtactgaatatgaataaagctggtaaattggaaatggtgtaatcgaaaacattttacttggtttatgaagatttacgtttttcacaaagttgtgctcttagatggtcatttggtttaaatactgttttgtttgtgctttcatgaaacacctttcaaaacaactcaatgggtaataatagaatctgattttaatctgccacaagattttaatgaacttgaaacaaactgcttgttgctcgaaaattcaggatgagtgatacacatatacttctgaattattttgtgttgattgaaatggtttcttaagctttttaatactataaatacatcttgctatagaatattcatctgaatatttaaattaatgtctcctattgtcttactattagaggaagaagtgttggatttatgggttagggtccttggagtattcacaattttttaaatttgaaattatgtgtgtaatccattttatataactttgaagtaggattaatatcttgtatcgtctttattttgtacaattggggatttagaataaatgaattgcaccctgccatagattacttacgtttgatttttaaatgccaggttttcatttattactaatcaactgataccagttttggtaactattacaaaggtggtaggcattattttggtagacaaaatgagttcttgattctgttttcccattttacatgagaagaataaatagttcaggttaaattgttttgtgttaatcatactgtttgtgattcatgtcaaatactgcagcatacacatccatggttaatacacgagcaccatttgttattgactgatgtgaggtggttggtctttgttaaattcaaaaatggaattttggatattgttcttgctacgaaatttatctttgtgtgtagagtatggaattgaaacagtttggattatggattttacctagattggacattgttgattttgtttggtgtaaatctaaagtggatttcttcagtgagggagagacatggttctggcagattatgttgaataaggaaagttgattggatttttttgggtgtgtgaatatgcttgtctgaatggagtgcttggtaggatattgtttctggaattagtaatttgtttctgtggatctcatggttttgatatttaggagaatttgctttgtgacattactttgataatttgcaatcacgtatgtcctattgttaataacattgttgaaatgggtgtatacttacttgatttgaaatataagggaagtgttgggatatgtgttttctgttggatttggacgtggagtttcttgggttactgatttaaaggtgatcgtgtttggaccatactcttgaatttttgcctgaatcagtatgggaagtaaatatattgtgattatgagaagtttctttggggggaggagtgtaatattttcaaggttatataatgggttaaagaattttgtgaaagaacaaagaaaaatggatattcttgaataaaaattggttgcattaacttttgctccagtgcaacttgaacactagggaggcgctcttgagttgtaaaagttacccctttcttccagtggagatggaaaattcccccttaaattttgtctttagattatttttaggcatcataaagaaggaaaaacttgaatttatattatgaaattaaggttttacttttatttagcaatcatttcacccattgggggattaatttttaaaaagattagtacttagctgagctttagattctctaagaattatccctttttcaaaatggcttgataaaacaccacttcctgtccagggaggaagttattttagctcaaggactgaaatatttagcagatctttagacaaaaggaacaaattacatttctctctggcttaaaaagggtgcttgagccagagggggttaagaagccctcccccctccccctgttggggtggtctggaggggcagggaggtgtgggggtgggggtccttaggctccctgggatggaggatctgtctctctctctctctctcctttttttttttttggtggagatgaaggggtgggtctatggtacatcacctgagttgtggggtaaatgtagagagtgtcaatcaaaggcagagctctcagagctgggaaggaggctctagatggcggctgtgccttagagagagcgcgctctgctccctgcct

SEQ ID NO: 14729 - DNA, 2300 bp, Homo sapien
tcattgtggcttgaacatgcatttccctagtgattaatgacatggagcatcttctcatggttttttttggccatttgtatagcttctttggagaaatgtctgttcaaatcctttgcctgtttttgagttgggttgtttttgttgttgagttttagtaattctttttttaatggtatcatgagcagtttaccatggtccaagctaaaaattttaatactcttcacactgagttggtttttaagataattttattaactagtcactcacttgttgcatatttaggttgatggtgttattaataacttacaaaataatttctgtggctctttttctcatgggctgggtccaggaatatggtaatgtttatggatcttaccagatttttcctaaagggagtgagtttgcaaaagccatcagtaatttttcaagtgtgtacttgtgtcactgcacacttgagccttatttcataggatgtattttgctaataagtgtaaaatgactctgttattaatttttttgattcctaataatgtgagcatttgtccttgaatatgagtatatgaggaagagccaagtgggtagtgaagagaagtggatgggaatctggcttcagtctttcgactaatccttgcatctctatttcaggcaccatcatgactccaagcggaggagatccgatgaatttaggcctcaaaattaccaccagcaggatttccgacgaatgtctgatcaccgccccgctatgggctaccatggccagggaccctcagaccattaccgctctttccacacagataaactgggggaatataaacagcctctacccccattgcaccctgcagtctcagatcctcgctcacccccttctcagaaatctcctcacgattccaagtcacccctggatcataggtctcctttggagagatcactagaacagaaaaacaacccagattataactggaatgttcggaaaacataaaggacagctcgtaaaggagagagtaagagtcaccaaacacgtggatatttttggtctgatcctacagtagccggttatctagaccagtaagtggagttttggacatgctgctgctgtcaactcactggctgaaggagcacttcaaggaatgggaggcctttcactgggtccagctctgattcgggtcaccactcctgcactttggcaccccatcccattccagcctagttctggcctcccactttgacgggcacttggaggaggagctgactgtgtgtgtaccagcttcactgggatgtgtttccccagtcaaggaacaggggatcttcagagtcatgaatgttttcttgccagggtcagtgttcccaggaccttagtgcatggtcggggcaggaactggtgcatggaggctgctgggacctggtgaacagtgtgtgatttggttgatttggttcactctgacatgatggatgctgctgatggggagtggcgagttggggcaagcgggtggggacaagcataggacttgaaggggagcaggtacacccctcaaatgtgttcttgggagaagtgatacactcggcctcattatgtgaaacctgtgggtggggttggggtggagaagtagagagagggcaacagcttccacaactgcttcatctctgccaacactaatttttcccacactgtctttgtacatttcagagctttggtctcctgagtgggcctccttttcccactgtgccagggaaggtaggtttctctggctgactgagtactgtgagtgaggcaacactgatgccagcatgggtcttacttgactggggagtaggctgagtgaggggtagggtggggtaggtggggagtagtgtggccagggaactggaatccctggtggatttctgattcctgtggtgagaaggaaagctacaggacctggagaaggggatgcagaggcaggcctgctgaccaacttgttgcaatcacaaaggtgggggtcctggtgcaggcagtgaacaggcttctaatgtggggttcagtagtgccagcaagtgggggaaactttcagtattgcgctaggtcaacacttcctgctgcatttccttccctttgcacagcttgaagaaatagagtagacagaatcacacatcatgtggtgggcagatggaaataagtacctgtggtgaacaagtttctactgtagttggagatcattagaattgaattcagtttctcttagaatataatcaggtataaacctaagttaaactttttcccaaacaaggagcatccaaagacacagtgacttgagctatagata

SEQ ID NO: 14730 - DNA, 2300 bp, Homo sapien
gcacatgtattttatttagttatcctttctttaagaatattggatgacatttcctgacgtgggagggagaaactccttttttttttcctgcttttaaattgtaacatagttgaagatttcttttttctgttctcattgaaaaaaaaaaaaaaagtcctgctgtgaaaagtccattcttgggcaagggcagccccagaagggcgtgatttctgggcttctgcgggctgcatggcctcctctggatcctgagccctggtctccaacctggacatgctgcagcagtgacggtggttaattactgtccaggtgacttggaatgccagtgatcccttctcattggcgagagactctagaactagctcgtgaaaggcagactctagcaaatggtgttaattagtggaaaggccacttggtcacctctgtgcagcctggcacagtgcctgcttagcgtgccccggtggccgctggaatgggctgccgttcggtgatgctgcagaataaattgttgggtcgggccccaggactggccaagcttgaaaggaagagcattttcgatggtgggctttcactgggaaaaccgtagcattttgcagacccgtcctgaaatgaaccctggtttgggggaaaaatatttagagcttgtcgatctgagacctcaatatttcagggaaacacagtgacaccccctcgtaaagaagagttgtgtctggcatttccacctaagggaagagcagcttcgtgttgccctgttgcacagctggctgaggtatggtccccttgtgtacctgttttgtggaagccagattcataagtcttgctgctggggttgtgtcttcacagccatagggccttctcccctcccttcaaacttgctcctctccacactcccgacctggcagccggaaccccaaatgcagctgcagccctgcagccttgcacaagcctgtgtggcctttgcagcaggtaaggactgtgatagtgcttaagagaaacctccaaattggataaaaacccagaggtgtttttccccaaagaaccagatgggcaggcttgggagtgaggtgaggagggtggcgggaggagttggtttgactaagaacacttgctcaggactatttgtgtttcatccaaaagatgtctctcaggggaagttaccagtcccttaaatatcacaacggcagcagaactgcagggcccagggaaccttgggaaggagatgtttctttcccagaaaaataagcgacagagttaggaaaggtcaccatactgaagccctcccaagtgcagccttgcgggcctcgcagagagcgccaaaccatccggccctgcgcgccacgcggaccggcatagccatctctctggagtggcagctgtgccaaggtggcaaggttaggcccgcaggccctcagcacgggggcgcagccggggcaagtcttcaggaagcagcgaggtgcttgaagggggtgctggaggcaggccaaacccagtcaggatgggtggcctggggccacgacgggcgggaacctcgaggtgcgttagtagctgagatgcagagagccatcctgcccagacctagacaactcggaagtgggtttttcagcctcctgcaccggtgtcgcgtctgagtgcgactgatgagccagggggcgtcggtggaagcttggggtcggcagtctggttggaaagtagggctgggatttgcctccaaggacagtttttctacttggattggatattcgtggaggggattaagggggcgtcctgccccgcctcatgccctgcggcctcccaagggtgctgggcctggtttgcaaggacagccgcgggctggagatggcgcgagggtcggggagcgtggcgcgccctctgatctagggccgtggttttccgaggtcctcacggcgagcgctgcggccgggcagcctgggtccccgcccggccgcctccggctacctcgccggcctcgctgaaacccgagcgcgagggggcggtgcgcaggcggctggggcgcggggccgcgtcgacattggcggagaaccgagtgatggatggcgagggaggggcgcgcggggggcggcgcgggaaggggagcgcgccgggcgcccgcggccgaggtggacggagcctcccggctcgctgctcccgccggcggagcgaggctgccctttcttcgcagcgtgatttattttcttctttttttctgaactcttcttccagggagaggctagtggtaacaggccgagctggatggatgggtatggggagaggggcaggacgttcagccctgggattctggccga

SEQ ID NO: 14731 - DNA, 2300 bp, Homo sapien
gcaagactggggtctcctcctaaaaaggcagccagtacccgtctcccggcagggacactggaactcccatggcctggggcctcttccgagttctattcagttgtagtcttggagtgacaatattatcagcccgatccttacagatgaagaaactgaaatgtagaggttaaaagtcctgctgcgagaagaaccaactgaaaaaaaaaaaattctcaggctttacagcaagcaaacttcactatgatttttcacaattctgattctgtattctctgggggttatctcagttgcttctttaggatggggttcattatgttgtacatatatcccaatgtgtctgtatgaatctttgtcttttttggggcagtgtggacgacgggttctttttagatactgttcctaaaaaggaatcagtgcatacacctgtttgtcaaagcacctttgctttttgtgcaactgctttatattaacaatacttaaaatagctttggaaaaaaaaactactgtatgtaatggaattgcagaatatgctgcacatgtattttatttagttatcctttctttaagaatattggatgacatttcctgacgtgggagggagaaactccttttttttttcctgcttttaaattgtaacatagttgaagatttcttttttctgttctcattgaaaaaaaaaaaaaaagtcctgctgtgaaaagtccattcttgggcaagggcagccccagaagggcgtgatttctgggcttctgcgggctgcatggcctcctctggatcctgagccctggtctccaacctggacatgctgcagcagtgacggtggttaattactgtccaggtgacttggaatgccagtgatcccttctcattggcgagagactctagaactagctcgtgaaaggcagactctagcaaatggtgttaattagtggaaaggccacttggtcacctctgtgcagcctggcacagtgcctgcttagcgtgccccggtggccgctggaatgggctgccgttcggtgatgctgcagaataaattgttgggtcgggccccaggactggccaagcttgaaaggaagagcattttcgatggtgggctttcactgggaaaaccgtagcattttgcagacccgtcctgaaatgaaccctggtttgggggaaaaatatttagagcttgtcgatctgagacctcaatatttcagggaaacacagtgacaccccctcgtaaagaagagttgtgtctggcatttccacctaagggaagagcagcttcgtgttgccctgttgcacagctggctgaggtatggtccccttgtgtacctgttttgtggaagccagattcataagtcttgctgctggggttgtgtcttcacagccatagggccttctcccctcccttcaaacttgctcctctccacactcccgacctggcagccggaaccccaaatgcagctgcagccctgcagccttgcacaagcctgtgtggcctttgcagcaggtaaggactgtgatagtgcttaagagaaacctccaaattggataaaaacccagaggtgtttttccccaaagaaccagatgggcaggcttgggagtgaggtgaggagggtggcgggaggagttggtttgactaagaacacttgctcaggactatttgtgtttcatccaaaagatgtctctcaggggaagttaccagtcccttaaatatcacaacggcagcagaactgcagggcccagggaaccttgggaaggagatgtttctttcccagaaaaataagcgacagagttaggaaaggtcaccatactgaagccctcccaagtgcagccttgcgggcctcgcagagagcgccaaaccatccggccctgcgcgccacgcggaccggcatagccatctctctggagtggcagctgtgccaaggtggcaaggttaggcccgcaggccctcagcacgggggcgcagccggggcaagtcttcaggaagcagcgaggtgcttgaagggggtgctggaggcaggccaaacccagtcaggatgggtggcctggggccacgacgggcgggaacctcgaggtgcgttagtagctgagatgcagagagccatcctgcccagacctagacaactcggaagtgggtttttcagcctcctgcaccggtgtcgcgtctgagtgcgactgatgagccagggggcgtcggtggaagcttggggtcggcagtctggttggaaagtagggctgggatttgcctccaaggacagtttttctacttggattggatattcgtggaggggattaagggggcgtcctgcccc

SEQ ID NO: 14732 - DNA, 2300 bp, Homo sapien
ataccctggagctttatattaggaatgtttctagattgttggttgaaagcatgtccatttcttaatttgcaccctaaacacacttcacggcttcatttaaatctgagcactctgtgtattccaactgcctatgcagggttctaacttaaccaagtacttaacgagtagcattaatattcgttgtcttctccacgggtgcctgcactcatcaaggtaaatagttaccggctacctccacggcccttgattgagctgagaattgtctgtccttatctagacagtggattgtttgtcccccaccatgggaaaaccctgctggttactttccaaaggcctcattttaaaaagacacgtttccacttacagaccttttaaaaatgccaggcaatttggaagaacagtaagaaatctactatctgcgtgacagtcattcagagattcttgtagtgtgccaggcaccatattaagtgctaggaatgcaatgatgactccaaggagtcctggttcctgccctcatgatgcttatggtacggtgggagaggccaacatgtagggaaaggtcactctaatgagcgcctaattaccgagtgagctcagtgttaggaaggaaaggcacggatgtgaggactccctagagggtggggaagatgttggagctgagctatgaaagatgaagaaattggttattcactgaatgtcagggcacagaatgtcagggcaggaagaccacacacacacacacacacacacacacacacacacacacacacaccctactattcatagatgaggaaactgaggcccagcagagctagatgacttgccgaaggtcagagctaattctagaaacccatccccaatcccttcctgctaaaccacttaattttatttatatcccagctatagattatacaaatacacttgacaaataaaacggagaatattgagttaaaaccacatctctgaagaccacacgcataaataacgatcgtgttttaatgcggacgataccttttcattttgcaaatccagagttctcatcatatcaaaattcaagacagtttgttctgtaagaaggggaaggtcataaccctgtctagaatgtactggcaaatctctctaaccgtgcagtgctaatttgggcctgagctgtgtaaccagaccgacttcacgctccagctggggtttcagatccacacatggcgattgggtggctctttgctgtttcacagcaagggtccttccctgggctcccggagcctctggggatttactgctcccgacgtggccgtgttcaagccactgtgtgcatgcgcttaatgttgaaaacattcttttgaaaagcccaggagattccactcgcaatctgtgcgtgtgcatgtaaaagcgcagagactggaaagaaccgcggcagagcacaccctgaccgaaggttaccgcgggggagccgcggccgtgggagagccgcggccgtgggagggagtgcgatacggtcttttcactctagacactcctgagttatgtacaattctacgcaagaatgtatgcgtgtgttagcatgtaatacatatgtattagttttttcaggaagattcttaaacaacaacaaaatctctatagaacaaaggtgcgtctccgcagagcgcaacagcatttgtcttggatgtaaccgccttctccagaaatctcagaggaactcccctcgaccaccgcctaactgaaggacaccgtgcgctccaccgcaaccctgcgggcgattcggaaagttggaggcgccccggggagtcgccgcacttgccgcccgcgccccctaacctgagcattcaaggagtcttgacttggccgctggcgcactccgcacccacccagccggtgctgatgcgggagggtggggccgcggcggggcggggcaacgcgagcccgcaccccgctcctccccgcccctccctgccggccccgcccgcgcgcgccccccgcccgcggcccgggcgcccggcccgccccctcccctcggcgcgcaaacgaacctcgcgacgccgcgctcggcggcgggcgggggccgggcgagggagggggctggtcccggccgccccactctgcagttgtctcccgagcgctggctgcgccgcccgagccgctgggccggggaagcactggccgttcgctcccgggccggctccgccaggcgctcgcaggcatgcagcccgggagcaggaggcgctccccgggccgctgctgagccggccggggcggcggggaccagcgccagcggagcccctcccaccttgccccggggcaga

SEQ ID NO: 14733 - DNA, 2300 bp, Homo sapien
actccatcaccttcttttttctgagcataataccttcatttatatagcctgagatagtcactgtggtaggctgaacaatgtcccctccaaaatgtccacgttctaatccctggaacctgtgaatatgatacttttcacatagtaaaagggactttgctgatatgattaagttagaaatcgtatggggaaattatcctggattagctagatgggcccggtgtaatcacagtggtccttataagaaagaaaaaggttctgtgacgatggaagcacagagagagagagagagagagagagagagacagacagacagacagagagagagagacagagagagagagagacagagatagagagagacagagagagagactagaagatgctatgctgttggctttgaagatggaggaaggtgtgtatgataaacgcacctgacggtgataacttgacttgagcatacactaacaatgaccctctgatatggtttggctttgggtccccacccaaatctcttctcggattgtaatccccacatgtggagggagggacctggtgggaggtgattggattgtgggggcagtttcccccatgctgttctcatgatagtgagttctcatgtgatctgatggtttaaaagtgtggcacttctcctttgcggcctctctctcctgctaccatggtagatgtgccttgcttcccctttgctttccaccatgactgtaagtttcctgaggcctctccagccatgcggaactgtgagtcaattcaacctctttcctttataagttacccagtctccggtagtatctttatagcagtgtgaaaatggactaatacactccgtatggcagatgcacctgaatgtgtgttcggagtcccaggctaagaaatccgggagtagcgaccaccctggagatccattccttatttatgaggaacatctgagaccccggcctggcccatggaatgcaggctgtataggggatcaaggccttttattttgggtaaaatgaagtttgccaggtgaagattgtttgggggagggcgctaagtgaaaatgctatatagactgcatgccttttataagtgcttgcagttcttctgcccagcctgctgccactggactcacttccctgtttgtaagctctcgataaaaccccatgtcttatttactggctccaggtctcttctttggccttttgaacatggggtcctccccattggagtctactggggcttggcaccacaaggtgtcacaagccaaggaatgcaggtggcccctagaagctggaaaaggcaagggaacagattgtccccgagagcctccaggaggaacacagccttgttgatgccttgactttagacctctgacctccagaccaatgagaataaataaggggttgttttcatctgggaaacctgtggcaatttgttaagcagcaatcggaaattactaccgtccctttcttgtctcccgttggcttatgttattttctggtaaatccaaggtgtgtggtttgtgtatttgtttgtttctgcgtgttctgctgctgaacgatatcaaccctctcttcagttttgccttcggttctcgggatctcagctggagctttgtctctgcgcttgaagtgaagggcatcagagcaatcccggaagtgtgaggttgcaacaaatagctgcagggagccaggtggtgtgtcttcagggaaatggctcccaaccctctctgcagctggaaggggctctttttttttttttttttttttacaggccctctcaattttttgcctaaaatgtctctttcaaatcctagcttctgaattcctttcccacactttcatctctcctttctgtaatttactactttttccatttgatcatcagaacgtgttaacataataacaatccttgatacttgagggatcttctcttaccaagtgctttcacataaatgatctcattaaatcttcctatcgctgtgcttggtaagtagtgttcggtgtcgaattaatgaccatgcccctttcccacaaagaacatggttttactcccagggtttccttatataaaactctaaggccctggacatcaacatggacacacacacacacactctcactcacaaataaggtacatagcttctcacctgcacacacacacattgtgtggaactcctctgggttcaataagttaggagaggtatcttagcttatgctacaaagacagtcatgatctttatgcaaattctagagccccaagaggtccctagtttcttgatgatctgccaaaggcgctcacct

SEQ ID NO: 14734 - DNA, 2300 bp, Homo sapien
actaatgcgataatccatgaaagtgcttagagcagcgtctgaaacacagcatatggtaaaggtggttcctgattcccaatgtcactgcaactttttttttttttttttctggagctatgcctgacttgtgtctttatcagtcaatagacccaagaatactttctctaaatggatgcaggtagacaaaggctgtgcagctgtattttattttgtaatcccagggaataatttgacaattctattcatttcatcaatatttactttgtcttcaatgcccagtgcactgtgtgaatgacggttttggctggagttaaacgtgaacatacaaatgtctcctcgacaagcctaagaggtcttattcacccatcaaggctgccccggcttacttcttcctccgtagcaccatggacgtgtcctcctggcttgcacagctcacagttagttctacctggccaagaatgtaatcgctcactactgttgcgtggtattttccttttctaagctatacttccagctttcaagaggccaaatatcttctgtattctaaacagtcctgctatccatctttccttttgtccaggatggcctttatcctcgacggcaactatctggtaggctccaatggggacatagggaagccttaggtgaaattatttctaaggttctgcatgaactgtccattattatggaattaattcttttgtttcaggggtctggataagtttctgatgttgttgtctaggatctaggcgtagattcaacagatacctccaggtactcttttttgttattttaggagaaatgaattctgtgtgtaatgcaaacaaatagaagaattgtaagttaaagattttgtttatttggttgctgtatatcagtctcctaatacctcatgcttataattttaatttgtatttctttcggaaatattgtaacaatattaaaatggaaataaaggtcaaaaacatccaatcccactactctaaacaaagtgatagctttcaattttctgtgattcatttcagttccttttaatatgcacatatacgatttttgcaccgtcgtaagacagctgataataattctaataaaaagtaaagccattatttatgagaaaagttttacaggtctttttatataaaacaggcatttattccaaatgtttgtaagatgctggtgtcagtttgacctaccagactccagtgaagagatggagagcttcaggcctgcaggaggcatgcggccagcaagcaccgcactgcaggaccatccttgccctggtcatccaaacacaaacaatcattgtgcggtggatggggtttcaggctgcgttgccaagcgttgggaaatgaaggcacacagaggccgacggagcgtcttggggccaccctgagctcctggcagcagagcaaggctggagctcggcacccaggcaattgtgagctggtgattggtcactctgcctggtgcccccttatgactttagtgttaggcacttattaggtgaattagagcacttatcggtgacggttggttggttggttggatggacagaattgcttctaccaggcggctgtattccctcctgcctgataggcactaaaataagacattctagtggctttcatttcaggtcgaaaatggacagctgagtgtgtgtgatgagtgtgtgtgagagtgtataagtatgtgtgtgagtgtgtgtgaacggatgtggctgcacatgtgtgtgtgattgtgcgggagtgtgtgtgtctgagtgtgggtgtgagcatgcatgcatgagtgtatgaaaacacgtgtgagtgtgtgcagatgtggagggagcggaatgggtgctggagacatgggcaaggacactatcgcttttgcagtgcctgctacattttctcacttcacactcccaacaatgccatgtggtagatgttataatctgtgtttatagatgagaaaattagattctgagaaattaagtaccctgccaagtcattctggtgaatggtagagctgagtgttgactcttggtcagcaaagctgatgaccttcttaccaacaatgctgaaccgcaagattgccagggccctgacattgtttcagggtaaagaagccaggagacaacatcagaggcaggagctgtgctgtattcatcctgaaaagttctggaggaggaagccacctactggtctctgagtgggtggtggggggcagatggaagtggaggggcaaggctaaaaccttaaggaactgcctgtcagtgagcactcctgggagaatcagaacactgggaggaaagaggtcaa

SEQ ID NO: 14735 - DNA, 2300 bp, Homo sapien
cctggccctgaaaacttatttatttgtcccagtgtatgtcttgccttggagggcttgaggaagccacaccccaatggggttctgagagtccagtgattcctgccccctaactgccaccctctactgccactgcctcctgctgcggccatggcctcgagcctacaccgttgcagggctgactgcctctgtgtggtagggcttcattaggagagattccagttgaaggttgtctatgatggatggccaggcacaaaacggcagccatagtaagtgatagaggggctggcctgcccccagctgcggcacactggcccagggggtggtggaggggatctgacagactgcctccatctgctaaggtcgtcttcacttgtggtccacgctgacccttcccagcttctgtcagcctgtgtgtgtctccacggcaccttttctctggacctcttggatgctcagagcagctctgaaaagaccaggatgagcaggctttggagactcccttggagccctcctgcttcgggaacggccatcctgcagccctgaccaggcactacctttccggagctccagtccctcactcctgtcacttgtcctagccttgcctgcctcttacaaagccacctcaacctgcctcaaattcaagttacaattatctccctctgtgtttgctttcacaatgagcagagatccctgacctcacagcctgtcagttttcctcaactgggttacatgtcaaatcctttcacccctccaaggctctccctttcccagtgggccttctgaccaatctccacttttgccttcttctaagttgtgtgccacacggcgcaggtgtcctcacttaaaaggaaaaaaaaaatgtgatcatttatctcctctgcttaagacccttcattcaaaggcttcccaaggcttctaggataaaagctgaaattttgaacctggtctgcaagttcttatagcaagttctcatagcatctcggcctcctttcctggcctcagcttgcactattatctcacacacctcactccagccaactgctctacaaaacttactctcttcatatacaaagtttgtcagggcagaagctctctgagggtgaatgtctgtttctgtttgcctaacactttttgtatccccagtacatagctaatgcctggcacataggtgttcaacaactgttaaatgaatgactggatgactgaatgaataaatgaatgagaaaagtataaagtattccttgttccaggagtaccaagagtgaccagggtaagctgcagagcccaaggccagctctgattagatgggcctctcactcccaggtactaaacacctgtaagtaagacacaatcaaatcagagaggaggcctcaattttcccagtagacacatgaggccagaaagagagctggttaagcatgaggcattgttggggggcatgagtttatatttcttagagctatacacatctgcaacccctgaagaagccaccataagcaatgcttttgcactggctctttgagccactagaatggcctttcctcctcctccatggcctagccccagccctgagagtggaagaacacaagcatttgcagccttggagtgtgagctactttggggtatgcaatgttaggggtgacaggggacagctgccgcttcaggtcaggagtgtcctagggggttgagccaagtaaggtagcaggaagtcctgtggtccccaactttccccagctaggcctgccaatgtatccacagaagtttctcctcaaccaaagcagatgagtgtggtgaaattgtgaagctgcagcagaggggtcacacaagtgaccacgatggccttggaaacttggttaagatttaggcgggaaaatcaagtcgccatgcactgctgtgtggttactgggtgctgaaggctgagaccactcagaagtaaaggctggacccagtcctcggggccttgtagtccacccagccaaagaaccagggcaccaacccctgagaattttgagggtggaacattctgatggcagttgaagccaacagttaaggaaaggttcagggcagggcaggattcacagtccagagacgggtacagatacactggaaagaggggcttggagagggagacagggccaggcaagactgctggggaaagagaagaaaagtgatgtggggcacagaggcctgctaaagatatgaaagaaaagatgaaggcctggggcacccaaggggctaagaacccaaagggaccaaggaaccagaaggcaaactaatcacactatgggtcttttgggggg

SEQ ID NO: 14736 - DNA, 2300 bp, Homo sapien
agaggtagaaggattatgtgtgattacataaaggatcactttttataacttcatgtattacagatttcctactctgaatattatgccttaatttttaaattagaaaagatggcatctatgaaaaataccattaacatccatagataatacccctcctacatcccctcataaaaatttaagattttgttagggatttgctcatatggaaaataacagacaaaaaaagtaggttagctcagggcagtcagtgatggaaagtcaaacatgccaagtggccagcatggagtagagtgtcaggaaaggtggatggaggcagagtgtggccagcacagccatctctactcctttttgtttgtttgtttgtttgtttttgagacagagtctcactgtgtcacccaggatggagtgcaatgccgctatctcggctacctgcaacctccgcctcccgggttcaagcgattctcttgcctccgcctcccaagtagctgggactacaggtacactaccacacccggctgatttttttttttttttagtagagatggggtttcaccgtgttagccaggatggtctcggtgtcctgacctcataatccgcccgtctcgccctcccaaagtgctggggttacaggcgtgagccaccgcgacgggccgccatccctaccgtttacagacagcgtccatctcactggtgggtccctatgcagtccaacttgctccacgtctgaatgtcagtcctagatacaaagcagagaagtttaaagtagggaatggcttcttttttccttttacaaaacataatgatggtaagacacaatattggagctgggatgaaggagaagtagatataaagatatggaggggcatcccttaagggatataaatagtttcacagatgaaatgcctaaaggagagagaggagagacagatgaggagacaattatctcaaaggaggaaaatggtcaaaaggcaaagaataatgtgtgtgaactctccggtgcatggtaagtactataaatatcttagttgtactagtgttagtcaatcaagtatttgtagttgctgttcctacaacgattttaactgctactgtaactactctcactgctattaagacaactattataactattgttataactactacgtctgctagtacaataactactattatgactgctaccacagctactattactgctgtcatgggatccttgaggtgtcgtttcatcagccagaaacctctgttgctggcagcaccttctgcctgagtattgctcgtgcccactgggcttgttccgcccacttggcccggtaggctgtgcttggctcccgccaccagcccagatcccacacctgcccagggagagctaggcgcggagccgcaaggggtgtgtgggtgaacgagcgcagggaccggcaacagccatacataccggctgctgcagtggggctggcagctccaggcgccagcacagttgtggctctgcgtgaggctggaccagatggacggcatgtggattctgctgtgggcacctgtttggatgaagggaacgaaggtggtggcgcctggaagcttgaagatgccaggaaccatagaaccccaaagggagtgtcacagccctggctcagggagaccctaggtctgggatcctcaaaggaacacagctcttttctccttctcgtcacccgcaatgtggcaagcaagggagcgtgtttcagccctgtttgtgttaaagctcttttagtacctccaggcgggtcctgagttcttgtcctgcgtccagggagatgaggtattgcggacaaatggaggcttagcaagatggagaagagctttattgagtggcagaacagctctcagtagacctgaagcaggtagctcctttctgcaggaaggttgtctctcctttccgcaggaaggttgtcccaacaagttgagaagacgcacagtgggcagctccttcccgcagctggtacttccgacttcgcgtgactccggctgcgtccggggagcggggtttttatgggttcagaagggaggaagtgcatgctgattggtccatgggtggccatgggcgggcctggaaaaagaaccattagtgctcactccaggccacagactccgaccggaactgacagcgcggcctccaggattgaagccatccctggcttgaaggtggggcttcactgggacccgtccctttctgtccagtagcctgtcttccttttgctgccatcaacgtgccctccacagcacccaggctgttcgttttgaagggcgcctctaggcctgagccc

SEQ ID NO: 14737 - DNA, 2300 bp, Homo sapien
agggcaataatatttgtggcatattgaagggtatggaagatctacaggcatcatttgttcaataatcacaagaaaacctgaaagatatgttttgattccatttaacaggtaagtatggaagttgagtaaattgtcttttctgctgttttttcaataacctcttcttcagggatgcctatcactgttgcaatttcaaacatcacttctctaaagataactctccaaatccaaatctgcaggtgggagagtgctcatttctactaacagtctgactgttcttgaaaagggaacgtatttaatactaaattcatgggttttcttactaaccaatactttcatattgggggaatatccattgtctattgcactcagatttgaggacttgagttaccttatttttctccttttctgatgaaagattctccacttgaagctgctgctgatattcatgcaagcccttcaatccccatggtccctgtttcatttcaggcttttattagctcatgcctgaactagtatgatagcattgtaataaaattttctatttcactttttttttctgtttttaggctgtactttactgtcagatttagtcttcctcaactagcagtatataagttttcactccctagttacaaatttgatggattcctttaaaatttaaatccaaactccctggcattcaggaccgtaagacaattttctcccaatatatctctacaaccttgtatgtaaatgctaccataaaaataaggttcaaacaatccacttgtaaacacgctacacaggccaggtgtggtatctcacacctgtaattccagcactttgggaggctgaggcaggataattgcttcagcccaagagtcaagaccaggctggacaacatagtgagaacccatctctataaataacaaaaaaaaagtagccaggcatggtgtatcgcacctgtagtcccagctacttgggaggctgaagtgggaggactgcttgagcccaggaggttgaggctgaagtgagccataatcacaccactgcactccagcctgggcaataaagcaacaaagtgagaccctgtatttctcaaacaaacaaaaacaaaaaacaaaaaacaagaaggaagaaagagaagaagaaagaaaagaaaaatacataaataaaaatagacacatagacatgctgtagagttattacgggcatacagtgtgccaagcacatatgtatgagctttacatatagtgactttcataacaaccctataaaatagaatgaccatagttacagaagtagtcacaatagtaattgtagtagcagcagtgatggcaccggccacctgtctggagcggccgctgcaaagacaccggctgcaccaggggaggtgccgccagagctgcgcactcagcaaagccagggtgggtggagggccggggcggggggagctgggaacaggcaggggtcccgccccctaccgagctaaagggtggggaacccgtgctaggggcacagctgcagagctgccgccgcagacccaggcatccctgtgctttcggggggccaggaagcccctgaccccacaggttcagcagtgcctgcttgctcccattcctggcctctgcctgctccctgtgcccacttcaattttggagcaaagtgatggccaagcctgggtgctgctgcaacctggccaggcgtgcgcatgctcagggaggcgctgttacaccagccccctgcctcctcagccccctctggactttgggcactgatgagcacgggagagaggcgaggaggcgctgtgggctgctgggctcaggcctagaggcgcccttcaaaacgaacagcctgggtgctgtggagggcacgttgatggcagcaaaaggaagacaggctactggacagaaagggacgggtcccagtgaagccccaccttcaagccagggatggcttcaatcctggaggccgcgctgtcagttccggtcggagtctgtggcctggagtgagcactaatggttctttttccaggcccgcccatggccacccatggaccaatcagcatgcacttcctcccttctgaacccataaaaaccccgctccccggacgcagccggagtcacgcgaagtcggaagtaccagctgcgggaaggagctgcccactgtgcgtcttctcaacttgttgggacaaccttcctgcggaaaggagagacaaccttcctgcagaaaggagctacctgcttcaggtctactgagagctgttctgccactcaataaagctcttctccatcttgctaagcctccatttgtccgca

SEQ ID NO: 14738 - DNA, 2300 bp, Homo sapien
actagaaatataaatcattaactagtactttgtaacccaataattcacaataattcattcactcaactgatctttaatgagcacctactatatgtcaggttcagtgcaaggggcatgggtagagtgttgaacaaagaagataaagtccattttctcctggagttgggagtctagttggggaggaacaaatacgcagagagccacaagacagagagttaaatgctatgatgcgagaaggactgagtttaccgaggggtacccaacccatcctgtagagtcagagaagtggcagactagtgaactgtttgggtctatgggttgtcaggaggtaaccaagtgaagggaaaatgtttccatgccttatgtactttgcaagggctaaaaccagcctcaccattaagtgagctctgtgaattagtaaaaaggccttctcttagtgaggagcttggtgctgatgcactatggctctgcttttgaccaagaggcttatttagatttaagcaagaagagagggtgcaaagagagatgtagttgggtccccaaatgcctggagttagagggatctgtatcctcaaaggctcctctccaggcatggaaagtaggctgtattccagatgttcatgttcaaaggggcttggagaattctgtctgatttgtaatgagatgatggtaacaaagaagcacatttatcttggcttcagtgaaactcaacaaaaagagtctattgaacaggtgcagccagcaactgggagacgtgaagcattgattgtagggagaaggtagaaagctctagactgtatagaaaggagattatcaagagctgtacaaatacccttgtaacaataaccttacaagggttcagtggattcctctgtctagcccagaaaaagtcagcaaccaaggatcatttaagagcccttgggaatccttagtgggcctggggaaggaagagaagatgggacaaatcagagggaagctgctcaactttgttctgttttagttgtgtttttgcttacgcttcactgagcaaaagctgatttggctttaaaaatttttgaaagcctcagatgcagttgtccagacatatctcttagcttggttatgtagtagctgtgaatcgttggggaatgtaacctctctgtgcttagtgttctcttgtgagaatttagataataatgcctaccttaatgggattgttgtgagcattatatgcacaaagccatgtaaattgtttcacaaaggccaggaacgctaccaggtgtggttgtgtagattgggcaccgtaaaactctgtgagtagtctgtctgaaggtgccttgctgaattctgaagttcaaaatctgcgtatctgtatatgttggctctggcaggcatgtaggaagaaggtgatatctggtacccattgtgaggatgacaggcagaaacctgttataagagtagagtaaacatagagaaaagatagaagacagctataattggatggtaggtagtaaaatgatggccggggcacaacccatccacaccaatactgagctaggcaaaaaattaacccaggcctcatgggttggtgtatctgagcccagctcgagaatgatataggacagagctgttctggcaatgttatatactcagaggcctcagtgcttgcttctaggtaaacttctgctaatcttcccttggggaaaggtgtgacaccttttttgctcttgtttttttgctcttgttgcacaggctggagtgcagtggtgcaatttcatctcactgcaacttctcctgcctcagtctcccaggttcaagcaattcttctgcctcagtctccagattagctgggattacaggtgcctgccaccacatccagttaatttttgtatttttagtagagatgaggtttcaccatgttggccaggctggtcttgaactcctgacctcaggtgatccacctgcctcggcctcccaatgcgctgggattagaggcgtgatccactgcgccctgccaatatgaatgattttcatggagctttgaaaccctaatagacaagggttctatggaattgaaagctggaacagtggcatttttgacgttgtcggggaaacccagacatgaaaggtgacccttctgaatccagtgtcagcagactagcatggctgtccagatcacaggtatcagaaagccactaccatcatgagcactttgtggtttacactggcaggttaccaaggccactggtagcagatgcattaggtctttgcctaatgacctggcttcttttgcaggaatcagcaaactttctcttgcaaag

SEQ ID NO: 14739 - DNA, 2300 bp, Homo sapien
acaaaagtgtgttaaaaatttatcagctacatgtatgagtccagttgccattctaaatgctggtgtggttatgtagtaaagttaaattggtataagcaacaatattattccctggaagggacatttcctgggtggaacatagaaaaggagacaggtaatatgtttgaacaattaaaaacaaaaaacccaggaagctgggcagatgagtgtattgtggtgggaagggcaagttgtgaccttagatttctgtatctttagttgtttcactttctataccatttaatgattgaaaaatgcggttggactgccggaaccacagaacaggaactccactggggcaggagttaaaggcaaaaaagcttttgtgtgggttcacttactattttaattcatttgtattcttagtcagctttaaaggtatgattgcttcgtctgcctactgctctttctcttcttcctttcatgctgttttacccttacctctctctgttctctgctaggggatgtaaccttcggcacggtgggaaaagccaattttgccataggcctcagcttgctctgactcggctactaacttgactcatagcttcaggcaggttatttcatggttctgatgctcattttcctcatcttgaatcagagattttattaactgtctcctggtttgtgaaaattcaatatgatcacgtgttacatgccaatcacagaaactggtgcgaagttgtgttcctcagtggtagctattgttgtaagtcggaattgcatgacagtggcagctgttttctatcacgtcctcatgttttctaaatttttatgccccttcctcccatttcctaccttagtattgttaatagctaacttttattaagtggttaccatggcccaggacactgtaatgaggattttatgtgaattacctaattaatttctcagaaagtatgagatagctattattttaagctatttaagctattttaagctatttaaacaaccagtttgttgaagttaaaatttagagaggttaagtgaactcgtccatttacacaattagttgcccaggcagaatttgatttgaggtctgactccaaagccggagctcttaatcaccagtgacaccaactaaacgcttcatttcagagctcgcctattcccagaggtcccattcccgttttaaggttattttctgtaactctcttgtatctaatttaaaaatgctatttcccagagatgagtccctgatctcccagaaggcatggatcatacatttcttttcctaatccacccaaattcctagagcgcacagacttaggctcgttcatagacgggaaaagaaactgaccaggcagtgaaaccgagcaaacaaagtgcaataagacaattacagcaggaaagcggcgtaaaaaaaagtagaaaaagaaagtaagggaaaggggaaataaatagcaaatattcgctgagtgccaacaatcgcacgggagggtctttagggttctctgccgagtactcgggacggcttgctgagcagtacgccggccttatctcatagatgaggcaccaaggctcaggaaacagttctgtggatctgggcgggcatcttccacccacagtcgcgcacacgtggcataggttaataggctgtctggctcgggtacctcttcccagggtcagggcgttacaaagggaggctgctgtcttcccatgaatctattagggacctacaggagcgaagagaacccttctgagtatcagcgaagacagcttattaagactttacgagtttgcaagccatcctcgtcctatttcctcacttcggactttttggacacaccttccttttcctgtgagccaacccaaacgaatgagttacaagtaatcgccttctctacgcccagccagtgcccagcaccaagcatagcgcctccttgcaacacccggccgagctcccggcggcagcgcgggcgcttgggtcggaggctgctcaaaggtgacgcgcggccgcctcctcccctttaggcggggctcgcaagggcggtgggggggcccgaggaagtccgggggccctcggtgatgcccccgcccccgccgcgtcagggttgctccctgcgcttccgagtggcgactgcagcgggtccggtgcaggtgaggggcgcgcgcctgcccagctttgcagcccccgaacgcggcctcgcacaggtgagggcggtgccgggttcacctggcagcgcgcgtgggccgggcagcacggtcgccgcctgggggtgggcgtcttctctcaaccgaagctgggagttggggagctg

SEQ ID NO: 14740 - DNA, 2300 bp, Homo sapien
gtaatatgtttgaacaattaaaaacaaaaaacccaggaagctgggcagatgagtgtattgtggtgggaagggcaagttgtgaccttagatttctgtatctttagttgtttcactttctataccatttaatgattgaaaaatgcggttggactgccggaaccacagaacaggaactccactggggcaggagttaaaggcaaaaaagcttttgtgtgggttcacttactattttaattcatttgtattcttagtcagctttaaaggtatgattgcttcgtctgcctactgctctttctcttcttcctttcatgctgttttacccttacctctctctgttctctgctaggggatgtaaccttcggcacggtgggaaaagccaattttgccataggcctcagcttgctctgactcggctactaacttgactcatagcttcaggcaggttatttcatggttctgatgctcattttcctcatcttgaatcagagattttattaactgtctcctggtttgtgaaaattcaatatgatcacgtgttacatgccaatcacagaaactggtgcgaagttgtgttcctcagtggtagctattgttgtaagtcggaattgcatgacagtggcagctgttttctatcacgtcctcatgttttctaaatttttatgccccttcctcccatttcctaccttagtattgttaatagctaacttttattaagtggttaccatggcccaggacactgtaatgaggattttatgtgaattacctaattaatttctcagaaagtatgagatagctattattttaagctatttaagctattttaagctatttaaacaaccagtttgttgaagttaaaatttagagaggttaagtgaactcgtccatttacacaattagttgcccaggcagaatttgatttgaggtctgactccaaagccggagctcttaatcaccagtgacaccaactaaacgcttcatttcagagctcgcctattcccagaggtcccattcccgttttaaggttattttctgtaactctcttgtatctaatttaaaaatgctatttcccagagatgagtccctgatctcccagaaggcatggatcatacatttcttttcctaatccacccaaattcctagagcgcacagacttaggctcgttcatagacgggaaaagaaactgaccaggcagtgaaaccgagcaaacaaagtgcaataagacaattacagcaggaaagcggcgtaaaaaaaagtagaaaaagaaagtaagggaaaggggaaataaatagcaaatattcgctgagtgccaacaatcgcacgggagggtctttagggttctctgccgagtactcgggacggcttgctgagcagtacgccggccttatctcatagatgaggcaccaaggctcaggaaacagttctgtggatctgggcgggcatcttccacccacagtcgcgcacacgtggcataggttaataggctgtctggctcgggtacctcttcccagggtcagggcgttacaaagggaggctgctgtcttcccatgaatctattagggacctacaggagcgaagagaacccttctgagtatcagcgaagacagcttattaagactttacgagtttgcaagccatcctcgtcctatttcctcacttcggactttttggacacaccttccttttcctgtgagccaacccaaacgaatgagttacaagtaatcgccttctctacgcccagccagtgcccagcaccaagcatagcgcctccttgcaacacccggccgagctcccggcggcagcgcgggcgcttgggtcggaggctgctcaaaggtgacgcgcggccgcctcctcccctttaggcggggctcgcaagggcggtgggggggcccgaggaagtccgggggccctcggtgatgcccccgcccccgccgcgtcagggttgctccctgcgcttccgagtggcgactgcagcgggtccggtgcaggtgaggggcgcgcgcctgcccagctttgcagcccccgaacgcggcctcgcacaggtgagggcggtgccgggttcacctggcagcgcgcgtgggccgggcagcacggtcgccgcctgggggtgggcgtcttctctcaaccgaagctgggagttggggagctggagggtccaggatgagaattcagtggcgctactaccccggagctgcttgtggttcagagatcagaaaggtgtcctgaggactggaggcagaaatccaggcgtggcgtactggaaggcgcactaggggagggcagcctggcccagaatttctttg

SEQ ID NO: 14741 - DNA, 2300 bp, Homo sapien
cattaaatgctaattgaaggaaaatattgctatatgaaaatagaagcaatgccttttatcgtatttgcaagtcaagttatgagatgtgaattgaatgtacttgcgtattgctaacgtgaaattcaagtttctgtttaggataacgtttttaaaagctgcaaaaaaagttgtaaactattttaaacatttaaagccaaaatgacccaatacaaagtaattgaaacaattttaaaagtcgctaacattgtattaaacatttactccatacctagcactgttctagataccaaagcactttctgtgtattagtccattcagtcctcaccgcagcctcccgaggtacttactgttaaactcatctgtaacatgggaataacagtgagacacagaactcttacataacttgattaagatatccaaacaagaaatgatgagaataatgatagagacacctttctgtgtctgagcactttaaagcatcagacactgtgctttctactttgtgtcatcgtatctgtaaactaggtaatctcgtccccactgggtgggtgaggcaatggaggcttagtgaagtgacttgcacctggtcctacctctaagtagaacagagtaaatcagaattgtaacccatggagtctgttttgagaggccaagctcttaatctttacattgtctgcagaagataccaagttcatcctgggagaagctcttgtcatgcgctggtcattaggcaagggctatagagacaaagtcctgacttttagcaggcaaatggctgcacacaccctgatctctggctctctggaccattcttcacaatgataaactgtcctctccttgaaggagctggggtggggcacaacagccagggtccttgattttagaaaatgtgatttgtggaagctcttggcctcttttggcctcagccaaatgtggcaaaatacaaacaggccaggtctcagtgtctgcccatcctgttctttttcatactgaaaggatttattatgaggcatgtgacacataaaataagggttatttctgcaaatttgattttgatttgatccgtgatgagttcaacctgttatatcccaaatcaccactttcctccacagcatttaccctactctgtaattacgtatttactgtatgtgtgaagcatccttatccctcataaccaactgctagtgagccacactttcattcacattctcaggctacatctcagaagcttgctttgtttaagggcttcattatgggaattttgtcatttcttctgaataagaacaaaactcacatttttataaatgtgttttgctctaatcacctgtatgtgaatataaatttgaaagatactagatggaatcctagtcgatagggccatgtttttgttcttgaaaacgtacacttaattctgggaaggaagttgacatggttaaagcagggatcagcaagccacagtctgctgggtttgcaaagttttattacaacacagccacattctttcatttaggtattctgtctgtctcctttgatgtcgcacagcagagttgagtagtagcgacagacaccatctggcccaccaagtctaaaatatttaataactggccctgcactgagactgtttgttgacctccggtttagagaagtagaaagtccccaccccttgatcatactgaagaacagctgctgttggtgttctcgtgaatgtctttagctccgcttcctctgggaaggaaataagacagttatctcttcatgaagcattttttttttttggtgccaaccttatcatctcattcttcgttttaatgtttctacagttgctctgataaaattcttttaaaaagttctttaaaaatgctttccccaatatttatacaagttaccaatcaaatgttgcagtcttaatcatttattggaaactgtaagatttttgagtcgtgtttctcactttgatgtgccttactgccaccaagaaggttcatgttttttttttttgtttgtttgttttttgttgtttttttctgttttataggagtcattgcagttttcagtagaggtgtacttctgagaagtggcttcttgggtcttcatgcagccatggatctggataaaccatctgtttggggctcattaaaacagcggaccaggccattgttgatcaacttgagcaagaagaaggtgaaaaagaacccaagtaagcccccagatctacgggcaaggcatcacttggaccgccgtctcagcctctctgtgcctgatctcctggaggctgaggccttggccccagagggccggcc

SEQ ID NO: 14742 - DNA, 2300 bp, Homo sapien
agagtagtcaacaaaatagaaaaaagtcaccttcctcatggagtttccactaggaaaggtggcaagctatagatataatcagaacataaagtgtcatggagagaaagaaagcagagtaggtgctgggggggaggtgttatcattttgtacagagtggtcaggaaggacctcttccgagaagataaccttcacacaaagatatggaggaggtgaggaagtgggttgtgtgcatagctagagaaaagccttccagaaaaagagaacagcaagcataaaggccccagggtagcaggagtgtccctgatgtttcaggaagagcaaggaagcagtgaggctggagaggaggcagtgaggcggcaatgggaggagatggcagagaagtgaacagaagccacatcatgtagggcgttcctatcttgtcaggcaactctagctgcttagtgcactgaatgagcgggatgcacaggagccccatgggctcaatgctgcatcactcatagggcagaaggaatcgttggcacacgggcagtgcttgctgtgtctgctgtagacactgggtatagcagtaagtccaagctttgccttggacaaaagatatggagaaatggcgcacaggctgatgggctgtgggcagagggaaaatggcactgtcccgaggcttcgtcagccagtctctgactttgtcctggtcactttcggtggggaatgttggagggagctaagaaagggactcagattgctcaccaccttcatcaagttcttttgatccactcttcccaaacacataggctgttttatgactattactaatataattcataataataataataaatagaatagcaacaccaatctaatgctacttactgagggtttatgtgtaaggaactctgctaatttctacataaatattatcagaccacatctatttggtttcctctgtatgcgaagagtcctcgcacagtgtctgtctgagaaaaggctttcagtaaataccctctgagtgatttaattattctaacaacctataagaatctgttttgatccattgagagatgttcccatgtcttgaattttaggtatatttttcaaggacagaaagctagaaagtagcagaggtgggactcaaatccaggtcttttggactccagagccttgttcactaccatgtacagctgcttcctggtcaggcgaggtgtgctgttttgggattctcctggcgcaggtgtggtacagtgaaaagagcagcgtacccaggtcactcaggggaagcccaacctagagtgctctccagggccgaactctccagctttcctgtgatggccatttagcctcctggctctgctttcctctttgccaattggggagactaatgacagcctgtggacttgttttaagaagttacaaggagcataaattttacattagaaagtgctcagcgatgtacaagcaaccattttttaaagtatctcctgttaataaacatgcaaaaaacttacggcaggtcagtggacaaatattactaaatatgcagagttttagagcatttcaacaggggttgataaactttttttttagaaagggccagagctttgtgggccacaggcctctgtcacaactactcaaggtgaggtcacatgacattggccatagacaacacaagaacaagtagacagcggtgtatttcaatcaaactttgtaaaagcaagcggcgggctggatttgtctcatgggatgtaatttactgactgttttataccatcatatgcttgagcaaggtatatggacacacacacacgattcagattttgctattagattagacagtcaatacagcagggaaatcacttttagagaccagtcttggagatgagagagaattaaatttatacaccttgattgtatgatccataacctcctgaaaagtggtacaaaaaaataagaacagacttggccgtttagtaggcttgattgtcttctgaatacaccttccagttttgacctctcattgccatgtagctcacttttcattctatcactgtgtccagttgctgcttcctggttagtggagccgtctgattccttttgcttattttgtaacttcctttgtcctctatgtatttgtgtttgtgactcctgtattcttaaatatacatattctagatagacaagatacgggttatagattaaatatgcagtatgtatacatttatatactttaatggggcagtttttaaagagaatactattgatttgttcagccaaatttttactcttatttagcttttctggatgtgggt

SEQ ID NO: 14743 - DNA, 2300 bp, Homo sapien
tatagatatatgtgcatatatgcagatacatctatttatatattgtgatggtgtctgtttatgaccaatacaaaaatcacttaatattaactgtttcataaacctttattgagtatatctggaatatgttatttttatatataataataacaataataataatcatatattattccggatggaacatattcaataataaaggtttatgaaatagttaaaatattcctatacatatattcccatatatatatatgaagtaagaaggaattacttatgttcaccagagaagaggatagttctttctttttaaaattctttcctcatttgccccttctgttctgtctcagcacctgcagaacctatgtgtgtgtgtgtgtctgtgtgttttaagagaaaagtcacatggatattgatatggttagactttgtgtccccacccaaatctcatcttgaattgtaatccccataatccccacttgtcaagggaaagaccaggtggaagtaactgaattatgggggtggtttcccccatgctgttctcatgatagattctcatgagttctcttgagatctgatggctttataaggggatctttccacttcactcggcacttctccttcctgccgccttgtgaagaaggtgccttgcttccccttcaccttccatggtgattaagtttcctgaggcctccccagccacgctgcactgagtcaattaaacctctttcctttgtaaattacccgccaggcagttctttatagcagtgtgataacggagtaatacagataggaagtttgggaatatgtgttttcttgaatgtattttgtttaagattgtcataaatgatcaaaatacctagtgtggcattgttgcgtcacttattaagagtggtggagtggcctgggttcgatgaggtaagctgggctataatgactatggtactgacataccatttgttgtgataaattgtgactaactgctgtccgagcaaattggtgtctaaatgatctggaagatatagcgagcgatgacaggaatgaatatatagtgttagaaattcattgctcgacgatgatgctcagcaccatttacattcttcagcccatttatttctccttcaataaagaagcctatgcttgtgttatttcacttactgaacggacaacgtaaatgaactctgctaactaaatgcagcgtgtggatcatgtggggatcccgactcagacaaactagccataaaaaggcatggttgagaccatcagggaaatgtgaatatgcactgtgtatttaatatgctagacaacttatggttaacgccattgagtgtgatcatagcaggatttttatgtaaaaacaaatgtggattttgctttaagatatttcaaccagaaaggaatgaaagcataggtaaaataagatttgccagacagtgaatctggtaattaagtacatggagatttattatactcttctctttacctttgtgtatgtttgaaaatttacatagtggaaattaaaaaatgaagtgtgactactctatttacaacttataacaggacatttgcctttttcctccaaggtatgtatgagtgtgagtaatataatttagcaaaggaaataagagttaagttattgaacccctcctgggtcccaggtgcagtgagatgtgctttatacgcccccttccctcccacccccactccaggtctgcaaagctcatttggccagctaggccactggaggctctatttggactagtgaatcttacatggtatagggcttttggtagtatcccaaggaataaagagaagtggagacagattcaaatgtgaaggataaattcaaagtcattatttctgaatgcccagagatattttgcttccttgcaaggcaatgccttgttctggtataatatctctgttgcccagaatgtctttcttcctctcacactattaaaatagctaaaggcccagttgaaggagtcccaccaaagagcgcatctgggtgggagtaccggccagtgccaagtcaaagtgttgcatatactcatccttcactatattattaccactccaaagcttgagaaggaagtcacataactgtgacagcaggtttgcaaaaccaatgaaaaaaacagttttccccaggcagggaggaattttttttataattaaatactgaaagttggaattcctatgatcatcaaagtcactctcaggaattagaagcaagtttacatgtcatctttattttttgctttagtcctctttgatacgcaacctacggctctctgagtcct

SEQ ID NO: 14744 - DNA, 2300 bp, Homo sapien
taatatatttgattacgtaaaaccactatttcagcccatgtttgcattgatgagcgagtatagtcgtcaaattgcagagcattcatttgaatgggaactatattagttaaaataaatgtacttgatttacgcatacaccgtgaaaagaactataaaacatactattggttaaaatatttgcagaatgataggaacatttttattttgttattactaatatatacctaaggtgccctgaggtggaaaaaattcacatcaaatttaggacaaggttgtctttggaaatgagaggaataggactgaggaaggttgacaaaaagaacacgagcgtctatgcaaaacatctttaagtgttagaaaataaaatacagcaatacgggttcacctcagtgaaggagtttctcccagaaatacaagattgcttcaaattatgaaattacaaatacaatacttcaccatattgatgtctttaaatgaaaaggataaaaccatccttatctcagaagatactgaacgaacggttggttagctaccaaccattcttgatcttaaaaattataccctgttaaaattgctggacaaatttttgtttaaaacatgtttttattaggtttataacagatatgaaagagtatttataaaacatttcaaagatataaagaataatgatcacctatatgtaaattttctggtattaaaaatggtttgtgtgtgttcttaatgtggtatgatttatcactctagaagtattttcattaaagccacgaattaaacagtgatatccttctgaacagtttaacaattttttgtaggagtaatgaaatcaagcaggaaaaaaattacaaatagaaaagaggaaacagaagaggatccttaattgtagattatgtgactatattcttagaagcctcgcaggaatgaaataaactatttgatacaataaagaatattcagtaaggctgctaatgttaaaaatatatatgtaaattatttgcttttatatgtaaataatgacaagtttgaaaaacataatggaagaagtgattttatttacaatgggcaccaaaaaataaaagcaatatatgataatcacaaagagaaaatttttaaatgttagaaaaagtttttagcaatgaaacagtattgcttttggaaaggaagatttcatatttaagatgcagtaatttgccttttctaagttgatatgttatagcagtggtttttttcaagcacttacagacagctgataaccacaaattaccttatttcgtcttctagactaccggtgagtttgaaacgaaagtgagactcaaattttgaagtaatttacccaaaatttcactcctgcctcatgttataattaaaaggtgttctcaccttatttatcctaattagtgtgtttcttggaggtagaaccatctacctgcattcatgtctctaataaccattgtagcataggcagttggactcagtctcaaattctcacttgcctttctatgtgaggagtcacaaatttcagaggttgacagaaattgggcagctaagggcataccttttctgatgtagacaatgctagccaatcattttcttgtgtccatatagtctcgaaattggtagattttaagcactttaacaaaagtttggaaatccaaagtctttctctgaaatatttggatttttcaatattggcagccaactgaaaaagtagtggctctttcctgttcaaataaacctcacttttggcaaaatttggtctctggcctgcgtctttgtgaccttggactttttccatactactttccataaattctggcacactaaaatccatgggcttttcaggtatgaagccactgtatctgtctattccagagcgtgactaatcagctctttctatgctaccagttctaaaaatgagttgatcattgtgtgtgtgcgtacctgtttggaaatgtttctgaatgtgactagaaagagtccaattgaatctccttacatcaatgagtaggaatttgattgctcccctagtgttttatcaagcagtcgtgtattcttatttgtctttcaatcaggtatttttgatcactgtctggaattttgaactatatatgatccccttggcattgttgctgatctttgtctacaatttcatcagacctgtgaaaggcaaggtcagcagcatccaggacagccaggtaagcaaggattcggagttctgacatttgactgccgagaaatgtgttaacaacaaactaccaccaccaccaaatcatggcccaagtccatttcgtttgaggtgtaag

SEQ ID NO: 14745 - DNA, 2300 bp, Homo sapien
ctgcacctttgctcaatttgtgaagaatttttttgctgtaaccattttaaccagggttatcaacctagttcaaaattaacactatgaaagagtgatttgtaaaaatgctatattttatttttatataccaacttcagagctatttcaatgattgaacagaaaccaaaatccaaaagagaggaaagaaatttttaaagaaacaaaaggacttcattaataactaaagaaaatgaatatcaaaaaataattcccacctgctacattaccaaatacttttccaaatagtctcaataacatggagcatacttttttttaaaatgtgatacatttcacaatgtagacatatatcaaaacgtcacattgtgtaccttgaatatatacaatttttatttgtcaatttttcttcaacaaagctgaaaaaaatgtaatacaagattttcctgctggcaggatggggcggtacaatacttttttttgtaagttagcttgaaaatgattgtaaaaaaactacgaaaatgttcctaatgtatggcccatttattccacttcaataaatttctttgaaattaataatttaaaacatggaaatgttgcctcaagatgttccttactgtgttatttactctagtgaaatccaaaagcaacctaaatatccaacatcaggaaaatagttgagcaaaccatatatacaattaatgaaagattatgcagttattaaaattggttaatatggatattctctaataatattaaaaagtcccttcgacataatgctgtgtgaatcactacataatcccacaattcaaatgtactcttttataagtatgtaagcatacatataaacaattctagtaagaagcatgcatacatttaatttacatgggcatttttttggtatatgctgtccctgttagcctgatgggattattatgtttccttttcccatttcttttttctaaagttactgttctgttcatatggtatttgaaagagaaacacttgtacttaagctctctctttccacccactcgcttttcaatcagttatataaaatataccttggtgatatgtttccatctcatttattactattttaaacatggctttcactttcttcgtggtggtagtggacatggcagaggaagatggtgtaattcaaaagcacaattaagcagaaaatcattttcctcctagaaaaaaaaatctggttttttctaaactattttactctcagaagtaaatgaatcagcacctgcaggactgactgcctcctcgacaggagatgctttaccttcagcgtggcggtttgcgcaggaggaatgcttgcagtgaatggacctgtctgtctttcagtcgccaaagaagagcccggatgacacaatagctctctatcagccccatttctatggtggttcacgacttattctctcctgctaaccgtctgcctgcttcgaccctcactctcaacctaaccagtgttaaaaaggacacttcttaaatagaattgcctaaaacaatgcaccgtcatccttttgcaagggcaaacaaaacatattcaaattgctcatgacttttaaacaagtaaaagctagataaattatgaaaatgttgcatatcctaatgtgctatatatatatatatagatatatatatatatatcgggcacatccttctatttttttctttttcgaaaaaaaagtttactagcgtttactagccaattatcttatatttttagcctgtgtagaatatctaaagtgtattgtccacgcccctcctttttaacccattttcaatgggtttaatattgcccgagataaggggatgcaactgttcaggtctgatttcctgttgtttctcagatactgatagggcatcattcacatacatgacaaataagacttctgaactgtttgccatttgggaaggggaggctcgcgggttgttccctggcgaaatgatttgtgaaacatcagtccgaaattattcgggggttcttcgccctccactttcccatagcgcgttttcctttctcccacagagatataatagaaactaatcttcaaaatccaaacattccaagccccatccttttgtgcaggcatctcgctgtctgcgctgggcacggagcggcgcgcgcgcgcccgtctttccctcggcggcccccgcggctcggacccgggccggcagacaggccatccatcatccgccctcctcccgcggagcgccgcagccgccgcggccaatccggcggcaggtggggccgcacctgcgcgacagcccgccgcttccctccgctc

SEQ ID NO: 14746 - DNA, 2300 bp, Homo sapien
tgttcttccacttcagaactaccatgaacatatttttttgtgagaatggatgttcatgagtgatgactacaaactagaacaataacttatatttctaaaatgtacaattatataagcattatttgagaaatgtaaagcatcatttgtgtagaaagagtacctaaagaaaaattatatagaaatgctgagtaaaaattatttatcacaacacagggggcagcatgcagagaaaatggcttcagtcaacccacaggcgaggttacggcctaggatgggcactgtggcaaggtttctgacagaatttattatccaggcttctgctgattacttttcatgtcctgaatacaagtctttttaaaccaccttaaggtggagtggtctcagatctcggctctgaccctgcagattcaccagactctgtttctgctcatcccctcctgtagtcccgtttccccagctctgtttggtccccatagaggctgccttatgtcaccattccctcacctctatctctctccctttggatctccaggtcaacaagagccaagagaaaaataattcataagtaacttaaagaagccaactgtcttaattaatttggcttacagtgtcttcttctgaagaaggttaaagaactttaattagggttttgcaaatcaatctcccaaaattaattcacctcacttaaaataaataaaagtcatatttgttgtgtttgtcttccgattatattgtgcaataatgcataaggacaattattcataattgtgtctccagcacctcacacaagtcatggctaaatactggctaaattaaccaggagaaaaaggagaaggcaagaactttttgataaatcaattataaattaacaacttggacttaaaattgctttagtctgaattctagagcaaataaatcatgtattttaattcaaaacatttcctgatggttttggaagcctatcactcaacttttcacaaaccttttccgatcttggttgaatctctcagtgagttgtcttggctcatatgggaattatcctgtgctctttaaatacaaatctgcaggaattatgtggactgaatactaactggtattctgggatgccaaaatacatttgtctctagaaattttctccttaggggctgccagatgttttcttcctctacaggaatttattttcatccatagaccctgtcagagggggtaacttagtcatccatgtgtgttctcggaaacacaaagcccaattcaaactggttaaatgatcacagaaatgtctagaagtgggtaggcttcaaagttagccagactgaattctccaatgatgttattaagcacttagttttcctcttacctttctgctcagatttctgtagaatcagctctatccatgatttcaaaatggcagtcagcaactctggaagaaacatactttttcttttaccctgagaaaaaggcagagagaatactgcatttgaattgattcaaaagcaagagagaggttaagaagtgaaagagtatgagtaaatcttttgaggagtttgctgtaatgggaaaagagaaacccagtggtaattgcaggaagatatgaggccaaggagaaataaaagagggagttagatattacaattatgatgataatgataataatttttccagtgggttgggaaagaaataaaaacgtgtttgagcatgatttcctatctattcactattagtgtctctttttctgtgaactacctgttctttgcctattttagttagttgtcttcattcactcttgatactaaatattttttatacatattatcatttttttccaaaattgtcacttgtttttagttggtatttttctgaagaaaaagttgaaggatgaaatcaaatggttattctcacagaggatttaaacctcgtctaaacccaataaaatttttaaaaatattctaatgctaaaatttaggattgcaacatgtagtgcaaaataccattctaataatatcttatgtcttggaacacttaaaaatagctacgatttgtcaaggttataactagtgccaggcattgtgcttaaaagctgtatgcattatcttatttaattcttacagtcctgtgaatgaaacattgtgacctcaagtttacagatgaagacaataaacttcagagagttcaagtatatcactcaaggttagtcattaataactaggaataatgaataatcatgaataatcttgaactatccttcttcctatgcctgtacttgccattcagttcattccatttgttcttgccatgtaagg

SEQ ID NO: 14747 - DNA, 2300 bp, Homo sapien
ggtgggaggatagttggagcctgggagattgaggctgcagtgagctgtgatggtgccactgtactctagcctgggtgacagagcgagacttgtctcaaaaaaaaaaaaatctccaaactggactctctctcactagggatttgtctctttctcctctccttctcttccttcctaattatctccttttctttattcacaatatatatatcctcaactatggataagtgtgcttatactcagctatattttctttttttccagctatattgatgtataattgacaaataaaaattagatattgttaaggtgtacaacatagtgcttgacagatatatacattgtgaaataattaccacaaccaagcaagctagttaacatatccatcacctcatgtagttacttttttgggtttttttttttttggtgtggtgagaacactgaaaatcaactctcttagcaaattttgagtattcaatgaagtatacttgaataacactgtatacaaattcaagtataaattcaagtatacaatgctattagctatagtcatcctgctatatattagttctccagaacctactcatcatataagttaacgtttgtaccctttgcccaagaccgccccacttcctcctcccaccagctgctggtaacaaccattctactctctgtttctatgagtttgacttttttaggttttgcatagaagtgacatcatgcagtatttatctttctgtgtctggcttgtttcatttagcataacgtcttgcaggttcattcatgttgtcgcaaatggcaggatttccttatttttaaaggctgaatattccattgtgtgtgaaaatatatgatatcaactgtattttcatatatgtgtctaactggatggcctcttaataaactttaaaggattaaagattgtcattagagaattctaaataaggtggttttaggttcatattatacaatacatgtaatgtgcatgcattatgtcgactcttattaaattctaagtcctactcaatagtgttgagagcattaatgcacccaagaattttgtttttttatttaacttagtgagaaaatataacttaatatatagcaattcacttagattgatatagaagtaattaacaccacattcttattaatagatttctacatatttgcaatgactaataactaaaaatgtaaaaaataaggaagttacattataggcttccgaaaaatatgcctttccacatgtgggatttcaagaaaaaaatatcagcacaaaagtatgtattagaatgcttggaatagtcaaccaaaatttcacacaatataaacaagacaaatcggtacaattaataatagaggactggatgttctgctgtaagtttttgatacatattaagtatttctcaatttttggtacatattaaatttcctcagggtgtttgttagtaatatggattttgggaaccaccctgagagagattctgacccagaaggtttgaggtggagcccaggtattatttgcaagcattgcagtccattcttttttttttttttttgagacggcatttccccatgtcaccctggctggaggtgcagtggcacaatctccgctcactgcaacctccacctcccgggtttcagtgattctcctgcttcagcctcctgagtagctgggactacaagtgcttaccagctaattttttgtatttttaagtagagatggggtttcaccatgttggcccagctggtcttgaactcctgacctcaagtgattcactcctctcagcctcccaaaatgctaggattacaggtgtgaacttctaattacatcttgagaaactggtctaggataattcagatgaatttttttttttttttttttgctttcccatattttagatgtaaccaaagtggtgcactcaatgtttaagtacaaagaaggatgaagaggtagaaatttgaggcagcttttcaacctgtttctgtcactttgttttccatctttgttgcatgctttaaacaaatacaccagttgtcttaattgagccttccggagcatatccccattccacatgtgcccgtgaatctgtggccacatgtacacataatgatttggagttccatttcttagaaaaaatgaagattgaccccgattctttaagtgctgggagtattaccataataaatggtatcactgcatgataagagcaaatgtgtgattttagtcaacatattttctacatgactaatgagagacttgcagcttggatacacagcagtgtctagagtcagtggctaag

SEQ ID NO: 14748 - DNA, 2300 bp, Homo sapien
gccatattctacctcaagaagtcactgcaaaaagaacaacttcatagcctattgccattctgctccatgtgctaaaataattgagacagttgtgtctttgaattccagggtgtctggttttaaacatcaaacatgtagaattgctctcagaacacactatattccaacgcagtaaacttgttgtttatgaccagttagtgaattatcattattccacatttatacaagaaaattgtgtctcctttgtacacactttgcaccaagaaaaaacctcatgccggtaaaccaaccaggtttgtgaacaattaaaatattttacacaaaagacgctgagctccaggaaagaaatgaacacatatgaagagtaaattgatgaccacagaaaacatccttggtagctgaaaaaaaaattgacagggtaaagatattttaaaaataaaccatacatataattgacatgcatagatcacattttacattcaattctctttacacacataggcagaatatgaggtaaggactaaagatctgggcagataggggctggtttttaggaaaggaaaaatcttctttaagcttcattcccgaaacctcagccctcactctttctccgatgaaatcacgtatttcactaaagctgcaggttctcggtttatttgaaagttgttaaaaaaaaaaaaaaaagcccagcaaacctatagtggacactgaactatcataaacctggtgtgtaataagattgccacagaatgaagccaagctgagaatttcaggttaattagagacacaatataactttctcctaaagaggataagaaggatggaaaagaaatcattacacaggagaaggtttttggtagttgttgttgttttcccttccaacctctatgattcaggaattgctaatgttacaaatgtcagcagattcgggacaagctcagctgagatgtgatgagactggggttgagataggaaatctaatgggcattcccatctcaatagaggatgaaaataattgattatagggaaatcttcatctcacctcctgaatgagacttccatagcagattaccttttacaaacatgggaaggaacaatatcgaggaggaagagcttccccagtccacttagagatttttggaatttgaagtatgcgtgatggccttagattaaaatggaataatttcccaaccatatcttaacaaattggagcctgctaggcaaatgatcacagggctgccataaagtcaggggtgtttcactctgtattttaggactcattcagttatgaaatgctgttacaagggagaaaaaaaatcaccgtatgaattatacttaattttaatgcatagaagaagagacaagactacagactgagaagaaaaaagggcaaaaatatttttaaatgtcttctccagagatgctcacttgctgtgcgtctaaggttaaaaagctctgagaagataaaatcaatatattattgttgttttttaaaaatccaactcagtctttttttgcagatgtaaatttattataatgagaagaatggcaagctttaatttgcctagagaaagttgggacaacatttgccctaatctaaaaaagaaaagaaagaaactcaacacccaggaatataattttcttgcagaaagtggcctgatgggctgtatttctttacagattgaatcacaatatgaatacagaccccagcaaatgccgagtttaactctgaactcagtagaaaccagttccgtcctccaggattcattgaattcctcctttccctcaatctagtccgtgtgtgtttttctcttccaccacactggagctccatgaatagggaaaggggcttccattgtgtccctctgaacttccaagtcaatgcaatttttaaccactggcttgtggtactttgaaaatcaccaggggctgtcagagttaggtcctctgaaaaatttacagtgctaaatcagagcatatgctgggagggaaaaaattgcttaagattagagcaagtacagtatctgtctgccccctagtgtaagagtcctcgctgcctaaaattcaactttaaaagaaaaggagctcttaaagggaaacgactttggactcacgtaggcataggagaacgaaacttctgtacattttaatctgaataattcttcaggatttaaaattaattggctctggcttggttggaccgtactcggatctcgccacctctgcgtttcccgagtcactggcgaagaggtgatttttttttttttttgaactgggtttatgtgcgtccccctcacccc

SEQ ID NO: 14749 - DNA, 2300 bp, Homo sapien
tttcttttccatccttcttatcctctttaggagaaagttatattgtgtctctaattaacctgaaattctcagcttggcttcattctgtggcaatcttattacacaccaggtttatgatagttcagtgtccactataggtttgctgggcttttttttttttttttaacaactttcaaataaaccgagaacctgcagctttagtgaaatacgtgatttcatcggagaaagagtgagggctgaggtttcgggaatgaagcttaaagaagatttttcctttcctaaaaaccagcccctatctgcccagatctttagtccttacctcatattctgcctatgtgtgtaaagagaattgaatgtaaaatgtgatctatgcatgtcaattatatgtatggtttatttttaaaatatctttaccctgtcaatttttttttcagctaccaaggatgttttctgtggtcatcaatttactcttcatatgtgttcatttctttcctggagctcagcgtcttttgtgtaaaatattttaattgttcacaaacctggttggtttaccggcatgaggttttttcttggtgcaaagtgtgtacaaaggagacacaattttcttgtataaatgtggaataatgataattcactaactggtcataaacaacaagtttactgcgttggaatatagtgtgttctgagagcaattctacatgtttgatgtttaaaaccagacaccctggaattcaaagacacaactgtctcaattattttagcacatggagcagaatggcaataggctatgaagttgttctttttgcagtgacttcttgaggtagaatatggcttgggtttggttcttgtgacctgtactagtattatttcccatttggggcagaatctctgggtgcgttttaatgactatatgaatgcttaaaaggaacttgaggaacaatgaagtccgtactcaactgttctatgacctagaagcatagtcggtgaagtctttgtctgtgtacattgacaaatgtgcatctgatacatgtgcgcttacatgtgtgtacagagggtgtgcacaggggaggctgggcggctgcctcctcctgtccatcagtgggcagaggtctttcccctctcaccatgactgggtgtgtggcaggatgttggctggagagttagctaaaaccagcgagagagggtaaagttgaggaaaattgattctaattgcatcatgacaatcagatgaagtctatttctgcttctcagcatccgagatgctttatttgggcaattaaaatgtcaggccacatacctgtgaaatgttaaccctacaaggaataaacagaaacagaacggcctttatcctctgaaaagaatatatgtcatatatatatgtcaccaaaccgaacaagtgatcagagttaattaagagaagggtttgccatcacccggatctggccaactctttcgtttggaaaatgcctacaagctcagttcgtggcaccttcccaccctcactccctatccctctgcaaagaaaccagggaacttttctttggcattgtgggtactaagatgcgccaggagtcccgggtggtgcgcgagcggcggaattcgtgacatcgccaagttgcgagaggcaaactccccgattccatccaaagcctctcgcggagcctttaagagacgttgtgtgtgcgcgctgcgctagtctccccgccggggcggaaacctcgggtgcgggatgtggggagagcagaggcagcgctcgcagggccagcacgggcccatccccctctcggcggcggcggcggcggcggcgcggccaccccgtccccgcccccccaacccccggtcccccgcgtgccccgcgccgcgccggcgacgccgctcgcgctaggaccgggctgcgcccgcggccgccatggcggggccgccgcagtccggccaatgacggcgagggggcggcgcgcgcgcgcctggccaggccaaccccggctgctgccttataaggcgcgccgtcgccatggcaacgtgcgctaagttgcagcagtcgtgtcaaagttcactatatagagagctcagtgagctgatcgcggagaagccacttctgccagccccggcgcctataaatcgcattccctcccgcgcccccctttttagcatatttgatcactttgattctctgttcttttctctccgcggtgtgtgtgtgcgtgcgcgcgtgtgtgttttcttcttctcctcctcctctccccgagttgcctcctttctccgggtgccgtactgccttttttcccctctttcattctttc

SEQ ID NO: 14750 - DNA, 2300 bp, Homo sapien
tctgcttctcagcatccgagatgctttatttgggcaattaaaatgtcaggccacatacctgtgaaatgttaaccctacaaggaataaacagaaacagaacggcctttatcctctgaaaagaatatatgtcatatatatatgtcaccaaaccgaacaagtgatcagagttaattaagagaagggtttgccatcacccggatctggccaactctttcgtttggaaaatgcctacaagctcagttcgtggcaccttcccaccctcactccctatccctctgcaaagaaaccagggaacttttctttggcattgtgggtactaagatgcgccaggagtcccgggtggtgcgcgagcggcggaattcgtgacatcgccaagttgcgagaggcaaactccccgattccatccaaagcctctcgcggagcctttaagagacgttgtgtgtgcgcgctgcgctagtctccccgccggggcggaaacctcgggtgcgggatgtggggagagcagaggcagcgctcgcagggccagcacgggcccatccccctctcggcggcggcggcggcggcggcgcggccaccccgtccccgcccccccaacccccggtcccccgcgtgccccgcgccgcgccggcgacgccgctcgcgctaggaccgggctgcgcccgcggccgccatggcggggccgccgcagtccggccaatgacggcgagggggcggcgcgcgcgcgcctggccaggccaaccccggctgctgccttataaggcgcgccgtcgccatggcaacgtgcgctaagttgcagcagtcgtgtcaaagttcactatatagagagctcagtgagctgatcgcggagaagccacttctgccagccccggcgcctataaatcgcattccctcccgcgcccccctttttagcatatttgatcactttgattctctgttcttttctctccgcggtgtgtgtgtgcgtgcgcgcgtgtgtgttttcttcttctcctcctcctctccccgagttgcctcctttctccgggtgccgtactgccttttttcccctctttcattctttctctccgtctttttctcccccctctgcgcacgaaggatgtgcttctaggtggtgatctgccctcctctctctcttttatcatttctcccccgccgccggcgagttgactctttccctatgtgtgtgaggcggcggcggcagcagcagcagcagcggctccggcggcggcagcagcggcagcagcgacttcagcggcggcggcggcgctagacgcagcggctccgggcccgacccggcggcttcggcggcggctccggcggcagcggcggcccgggcggcccgcagggaacggcgagcggcctccacccagcgactgcgggcggcggcggccggagagagcgaggcgcgcgccggacgcccggggcaggcggcggcggcggcggcccagcgccaggacgacgccgcgcagcgcccgacgcggaccactttcatgctgattcccccggacccgggcagcgctccggccactccgcgggccgccggcctccgccccggcctgcctggctccctgggcgcgcccgcacccggcgcctccgatctcctagtcctcctgatttcgatggctttcctgaatggctgactgtgggctgccctggacttggcccccggacagtcgcctctcctcctcctctacctcctccttcaccaccacctcctcttcctcctcctcctcctcctcctcctccgccaactcctcggctgcacaccagctctaagagcgagagtgaacgagagagggagggagagagtgagagcgagcgagatctttggagagatttttttttttgcctcctacttctgtcttgaagccagacaatcgacttcagctctccctcccctccctctttctccacgttctgctcccactcgctctcctgtccccttcccctcccctcccggcggaaagccccccgaaaccaacaaagctgagccgagagaaacaaacaaaacaaacacaccgggccagacaagccatcgacaaaactttgcaaaagcaaaaacaaaaaaggaaaaactaaccaacctcaaccaaccagcccccgagccacccggggcgccctcccgcgccctcttgcaccctcgcacacacaaaaggcggcgcgccggagcccgagacccggggagccgccgccgccccgccgccgcccgcagccaggggagcaggaagtccggacgcagcccccatagatatggcaatggtagtcagcacgtggcgcgacccccaggacgaggtgcccgg

SEQ ID NO: 14751 - DNA, 2300 bp, Homo sapien
cagcagcggctccggcggcggcagcagcggcagcagcgacttcagcggcggcggcggcgctagacgcagcggctccgggcccgacccggcggcttcggcggcggctccggcggcagcggcggcccgggcggcccgcagggaacggcgagcggcctccacccagcgactgcgggcggcggcggccggagagagcgaggcgcgcgccggacgcccggggcaggcggcggcggcggcggcccagcgccaggacgacgccgcgcagcgcccgacgcggaccactttcatgctgattcccccggacccgggcagcgctccggccactccgcgggccgccggcctccgccccggcctgcctggctccctgggcgcgcccgcacccggcgcctccgatctcctagtcctcctgatttcgatggctttcctgaatggctgactgtgggctgccctggacttggcccccggacagtcgcctctcctcctcctctacctcctccttcaccaccacctcctcttcctcctcctcctcctcctcctcctccgccaactcctcggctgcacaccagctctaagagcgagagtgaacgagagagggagggagagagtgagagcgagcgagatctttggagagatttttttttttgcctcctacttctgtcttgaagccagacaatcgacttcagctctccctcccctccctctttctccacgttctgctcccactcgctctcctgtccccttcccctcccctcccggcggaaagccccccgaaaccaacaaagctgagccgagagaaacaaacaaaacaaacacaccgggccagacaagccatcgacaaaactttgcaaaagcaaaaacaaaaaaggaaaaactaaccaacctcaaccaaccagcccccgagccacccggggcgccctcccgcgccctcttgcaccctcgcacacacaaaaggcggcgcgccggagcccgagacccggggagccgccgccgccccgccgccgcccgcagccaggggagcaggaagtccggacgcagcccccatagatatggcaatggtagtcagcacgtggcgcgacccccaggacgaggtgcccggctcacagggcagccaggcctcgcaggcgccgcccgtgcccggcccgccgcccggcgccccgcacacgccacagacgcccggccaagggggcccagccagcacgccagcccagacggcggccggtggccagggcggccctggcggcccgggtagcgacaagcagcagcagcagcaacacatcgagtgcgtggtgtgcggagacaagtcgagcggcaagcactacggccagttcacgtgcgagggctgcaagagcttcttcaagcgcagcgtgcggaggaacctgagctacacgtgccgcgccaaccggaactgtcccatcgaccagcaccatcgcaaccagtgccagtactgccgcctcaaaaagtgcctcaaagtgggcatgagacgggaaggtatcggcctctcatttctccttccctcgtcctgggtcccggggtcctgggtacgtttggctagcctgctctgggtaaggacaagaagccccaagctcttctcttcgtattgcagcggaaaagggttttatactagaagcgagttctgcattggaacccagaccccaaatccgcatgctttggccgactgatttccttctttactctctctttgggctgtttccatttcctttgcattgattgtgagttcactggagtctgcctttctgcaagggatggggtgtttgttgttgttgttttaaagcctagtttacttctctctctctgcccttgtttttcctgcatgttcaacatgtccctccccctcacccctttccccagcccccaccctctcaaaaaaaaaaaaaaaaaaacctgagattgtacttttgtacaggaggttcaaattacaaatggcaattttatgcacttcgccgtattaacgctgccgcccgggcagcgctcatgtgaccctccgtggattaacatcctgctaaaaaaaaaaatacctctgctttcttttttcctttcactttttgaaacgaagagagcgcgataggaagtaggaaagggtgggcgaggggccctgggcggctgctttcgctctgcgcgagttgggtctttgtgatataaaattcgccgagcgccgcgagccgtgctttgccaatggcgcgctcggcgcggggcgcgggctccgggttggggcgagccaacgccggggtttctttgtgtttctgcgagagcgactctcccggtccggagtcagataacagcct

SEQ ID NO: 14752 - DNA, 2300 bp, Homo sapien
tctctcttcattctcagcatgtcagtctgccctttctcactgcccagcaaggtacttgaatgcaggaactttgtctcattcatttttgtatcccctctgcccagcaaagctcaacaaatatttgataaagcaatgagcttacagatgggtgaattcctgaacaaatatcagacgagagtgacaatagggaaatgcaaagggaagtgagtggtgtggtgtcctggccaggatgccaggatgcctggcatttgggtctgttgaactctgatttacctagaaaggttttaatggaccttccccacaaaatccttttctgcaggctctctacatgtgtgaacatgatccaacagcaacaccacagttagatgctccagagccctgcctgaagagaaatcctacatccatctcctgcttagtaggggagcactgagcaacgttgggagccatttatttccttccttgggatcacacttcttccccagatgtctgattctggttttcatctgcagtgatggccttcatcttctcccagggcactgggccctgagatagcagagctggccagcaggaggactatgtgagggcttctctgggtccaaagggagttcccccacccccgggggttggaggaaggaaaagtggaggtgctcctgctagggttttgggagcagcctcacgggggctcttgtggaggtgggcatgccttggcacccccctctcctggctattctgtgctgtacccacaaggcttcaagcacctccccagaggaggcagcccgatcttctccacctgggagccatttctgagtctccctcacacctgagcttccatggacaggagacctcggctagagtctgaggagtctgggaagatctcaagcctgtccccttcccctaggctacagtactggatgctcagccctccaccattatgggggtgtttcctggccattcagctgatcactgttaagctatcatttctctctggaaaggatgcccagaccccatccgtctacttcaccttcctgggttccattcccttgtttctggggcaaggcttttgggagggctggagagagagaggatgaggggacaggagaaggacactttgggctttctgtcctcctcctgtcctgccttagctggcgcccttcactccctgtctcctgcctctgactggaacgagaaaataccttgcacatcccaggtccacccagccaaccctgactggtccagtaagctgtttcttctgcatttcagccctggttcctgattctacctcccccaggtctctaccattccactctcagcttcctcctccttgccacccaattcttcttggcttcccatcacttcccctctcttttacctctctgcccctgtctcgccaaaggctctctcctgtctgtggttctacttgatctccgtaactttttccttccctccattcaccctggacattttgccctcatgatttctcctttcctcttgtgtatttgtctcttgatgacccattttcctttcagagaaactgaggctcagataggtcaggggtgatggcctacatgggacagcaggacttagtagacaaggccttgcatccttgcggccctgctttctgtctcatccctcttcccttttgtcttggtcagccgcccaaaggctccagctctgcatccagcaggggagccccttggggggttccagagtccacaactgcacacccgtcaccttcacccactgccttgttgtagcaaacctgcagccaccctgtatattgtatatgtatatttatctatttgtatatagatatacaatttcaagaacctactaaaggaggaagcctcactgctatgcagcctgacaggttatcaagtgggcctctttgaatccctttttgcttctaggagagttgggaaccatgaggtgcccccctgcagaccccagagctgctgccttccccaggtgtgcaggaggtttgtaggagacggggccccttggctgcccaagctgccacccctcccccacccgcccagtggcagttgcgtccgttggggcttctggggcagcccacagggttccgagcatgtgctggcagttgctctttggagcacccacttcacttctcccatgtagttcctgagtgcaggactctcctgaagaaggggcgtctaaaaggccagcccatgcatcttgttcagaccaggctgctccatctccgctaagcccagggatccacttgtgtgtctttctgggataattgtctttagtggcagcctgggcctcggggaaggaagggc

SEQ ID NO: 14753 - DNA, 2300 bp, Homo sapien
aatgttttgaattaactctgatgacagcataggatttcttctggctgttgctctcttgttaaatcatgtctgaggtatcccttatacaaaggtattctcaaacatttgcaattttaaatcagcttagacataccaatgtgaaaccaacttagaaatgaagtctgtattcatttctctttagatagaagacacataaagtcccagataatatgtgttagccaggtgtaatcgagatcatattttatctttctcattctttgtacctgtgctaaacctggccctggttagctttccccatcttgtaggacttctaacagtatttcaataaaaccaatatgtgatactgatttgctccttgatccctgaacagtggtacatttttaaccatatttcactccaggccatcttgtaattccatcacttgactccatgcctaactctagctctccctgtcttctttgtccatgttccaggtaatgtgattggtactaccactgatgtatggaacccacagtagacaatgtcatgttggattctcaaggcaaagtggaactgggtatacagctgtggtgatttttaagggtcaacctagcagagctggaaatatgatttccagaattgccttcctgttatggtttgaatgaaggttgcctgcagaggaatttgtaaatgactgggcaggtgaagtaaaacagtcgtcctaaggttcagagagttggagtagggctcccagcctcaccagagctggggcatattgtcactgacccactggctcttcttgctgggaagggcagccacttggaccccctctcctccagctcctcctgtctcttcaagtcttaggccaagtcctgttcagaaatgtggcctaaggtgtcactccttcttcagatcacccatgccatcaaacttgcaggcagtgagagacagaaacagtaccaatttgtgctcacaggttcccatttgtctctacgggttccagtatgtcctcacggatttcaacttgtccttgcggtcaccactttctgtccagcttttcttcccagccacaggtcctgctgacctacagtgactggagcctcaccacatcccacaattacataagatgcagcccatcataatccccacagtctgtgtcactcttagtggaactacttccctgactgaatcctaaataacacaagagcaacaacgtttctccattgtttcgtatgtcggctaggtctgagggacgggacggaagcccccggggctggggctcactcactctgttcttcatgtaacgcattcacaccatgtgtatgagcattcagcttggcgggtggagcagttcggcattacttgctggaaataattcagagcacttatgaccaggctttggaacccaagccaagtgttctcgagcacatccgtacggggaacaaaagttttgttttgtccccatcgttccctcacccgcttcggatggggaaatatttgaaaaacggaagtgcctataatattctgcttgtgctaccaaagttctaatggtgtttacctgaaatgtttctatcattcccaaactttcagggtttctgttggtgattggcgaggaacagattgcactttcctgaactgaaatctaatgaatgccacaaagtgaaaataaactggagacacttcaaaaaagaaaaagaaaagaaaactcacttcaagaaaccgaagctttcctaccccccttcttttcccctcacttgcagccaactaagctccccacacattctgatcgtctccctgcacagtgtctgtggtggtgacaactgattcatgtgttcatttgcatatcccccggtgccagcagcagaatacagaacgggcctcctgtgccggcagccaacacagcactggcaaatcagggagctgtcagaaacagctgtccattaacggagtttgtggaaacaaccaggagctgtttgaaaatgctaggtggtagaatttaattggagtagcaactgttcaaaattaagattaaaaggaccagtcagtcaacgtggatttcgtgacaccttaaaaataacgtttcaggtttgattaatgctgcaagaagtttgcacatttctctcctttgctgatagggcctgcgtgctgatagttgattcagtgaatatatgtagcagtgatagctcatgggctccagaggtcagatatcttattctctaggctgaaacccttgttgctttaaggaaacaggattttaataggaatcacatgcagattgactacagggagccaagcggtagtggaagaagcaaagttggcgg

SEQ ID NO: 14754 - DNA, 2300 bp, Homo sapien
cacacacacacacacacacacacacacacacacacacacctggctttgcatcatgtaaaaaaacaaactcaattttaggcagaacatagctattctaatacgtgtaaaatatttgcatgtgattttggaagtttagttcccaggtcaatttatataatttttatgttagggcctaactcgaattaaaaaatttgtagaataaattatattgcatttcccagaagcttgaaaatacaatgttttaaaacacagcccttacccttttagaagaatctcagagtttggtaaaaacttcagatttaatgaccatgtggaaatagagtggcaggatttttattctatcatcatattggagaattcctcatcagagtgattggtggtacaccttgacagagtgagttttcttttttttctttctttctctttctttctttcctttctttctctctccttccttccctccctccctccttccctctctctctccctccctccctcctttctttctttctctttctttctttctttctttctttcttttctttctttctctttctttctttctttctttctttctttctttctttctttctttctttctttctttctttctttccttccttccttctttttttctttctttctttcaagacagaatctcactctgttgtccagtctggagtgtggtggtgctatctcgactcactgcaacctctgcctcttcggttcaagcaattcttcctcctcagcctcccgagtagctgggattataggcctgtgtataggcatataaccatgcctggctaatttttgtgtttttagtagagacggggttttaccatgttggacaggctgatctcgaactcccaaccacaaatgaccctcctgccttggcctcccaaaatgctttacaggtgtgagccaccacacctggccaagagtgaatatttttaaaaatgaaaattatgtcactcttctgaacccacacttcccatggctccccatcacacctggaataaaatcaaagctcctattccaaggccacatacaacctgacacttgcttccgctgaaggtccacatgtttcttcttttgccttgacttagtgcgttcagcctctctggccctctcccatttgcagggattcaccatgctcattctttttttgatgttgtgcttggtcttcccccttcttggagtaggtcctgcaagatactcccattgttctctgacctcataaagttgctggctcaggcagagctgtgaggacagctatgcatgaaaggacagctctgcctgaaacagccccccacctccgctaactcaggagctcctggaactgctttatcatgctgcagtgcacttaccaccatctggaattacattgcacatgcacttatctatgtagttacttattttctctttcttccactagaatgtaagctctttgaggacagggattgttttctgttttatgaggacaggaattattttctgctttttttttttcttcctcctcagatctagaggaatacctgatacaatataggcacccctaataaatattcagtgaatggattgcattgattttcctgttgagtttgttgcatatgaatggagagttcaagagtttaacaattctttttctgatttggtgagctccacttttatcaaatggcatgaaaacctgagattagtgggattgaaaatttagaaaatatctcttgggaattgatgtagtatctagtatctcctcttgggttaagaaaggtggtcccagagaaaaggttctggtagagaaacaagaggtttcataaaaggagtagcgttttatttactatgaaatcaaatctatgtcactactgtttttattccaggcatgtagaaaacaaacaagcaaaacacctaaaataattctacaaaaagaccctcaaagggcgttttattagattaaataagtattcatacatgtgtatgcataatctctctctatatatagatacacatgtacctctctctctatatatatattcttgaatataattaaagacatgttatcacagttcttcgttcccacagtgggataaaatacatttgtttggtccaagtctagtccctgccatttccccattgcttgagcaaattatttaatttcagagagactgagttggctcatctttgaaatagtgatcaagcctaattcactggagtagtgcaaagactaaatgttgtagtcaatgttaagtgcctggtaccatgccttggattgaatgcttacaatgtatgcattccataaaaga

SEQ ID NO: 14755 - DNA, 2300 bp, Homo sapien
tgagaatggcaagcaattttccaggcttttactgctcaccctaatccatcacctatgttccagccacatcaaatcattctctatgccccagataaatacaggcagtggggagccagatgtactatcccagactgattcttcctgtatctgcccattgcaacttctactctattgcaaagagccctaagccccaaataggaggtgaattacctcgtcaccatatctgaacatgggattgctcttctttgaaaggactcagaaaaacatcttagccttagacttgtgcctctaaattactccaagttcctcccagccccagcaagctttctcattctgtttgttgcaacgttctttaggtttcaatggcttacagtaaacctctgtagtcagtccccagagcttctctagggatatgctgaaagatgttccttgggatttagaaatcgtttattaattcaacaaagctaggcttttaatatcatgaacttaaaaacaaagttagtttgaaattctagctgagcaatgacttctttgtcctagatggcatctgaaatcctcctgaaacaattaatgccattgatccagtgagtgagaaacatcagtgcaaaatgattggcaatgaaggaaaaatacattgttttcaatttcacccccctccccatctactttctctctcttccagacctttgcacctttgaagagcacatttgttttcatgaaactgctctccactcctcttcccaggaagtgggttgtcggttttctgtgtggagctgcccccgggaagaaagccttgctcaccctctgagatattgttgagcctcatctaggttgagcagacacccatcttctaatgcagggcagaaataaattatctgaaatgaacaacgagtgtttgtcaagcagagacagcaaaagtagcatggccatagaaatccttcccacctggattgcaggcgtacttactttggaacccattgtgtgtgagtttgtatttgtccacaatgcctttacccataagaatttcagttgtcagatctattcctgttggctataacctgaaaagggaagtgagaattgagaataaaaaggctggggttgggggtgggcagaggcagagaagatggctgaggtgaagccagatatttttgcttttatttttttcaaagaagccttaggcaaaatgatactgagggggtgaaatttaaattttaacaccattgtctcttaagaagggagctgaaacacacatatttattatgagccaaaacaaagtactttgtcataagtttatcatgagtaaaattgagaccatataaccttgcatgttgagttggttaaatactcaagctagttcttgattctgagaccacagtcacacacacacacacacacacacacacacacatacacacccccacatgcaacaggcccaaagtggagagaatgaaactcagaaaacttgttgtacatacttacatactatgggacaaacaaaatttataagtattaaaaatgctaaaagtttaggtcctcaaactatttcaagaaattaatgaagataagtcatattatttgttctaaatatatttattcagacagaattataaaatataacaggcattatgtcgtagactggccagatgttttgttttagttatattttctctgcattcataaatctatatagtcagtctcagagctacggcatgtgcaaaagacaaagtttaacggaacagcctaattaaaaagaaactccttattttactcacagggcatcagaatatgaagtacttagaaacattaaaaaaaaatctcctttttctggctgttcatctttctttgatcccagagttactctagcacgtcttttctcaggtcattacttaccaaattctctccttaactccccaccttcttcctctccacatgattcctctttctctctattcttccccttgaaactgtcattactttatggcttgtagtgctaggtcatttccttgacattcttcagtccctttcttctttgactttcttggtctctaagttctgcgtcataaaaattcaaagaacagaaccttgacaataacgttctgtacttatcaagctgaacatatccttaatcagaccacagtgcttggagcacaatgggcccttaaaaatggggacaagagggaagaagaaaggaaggctggggcaagcaaaaaggagagccagatttctttgtcaagttttaaaagtatcgctgtacggaaattttacagaagaaattttgaacaccacagatttttgccttt

SEQ ID NO: 14756 - DNA, 2300 bp, Homo sapien
tcttccttctggtgggttcgtggtctcgctgactccaggagtgaagctgcagaccttcacggtgagtgttacagttcataaaggtggtgcgtctggagttgttagttcctcccatctggagttgttctttcctgctggtgggttggtgggttggtgggtttgtaatctcgcgggcttcaggaatgaagctgtagacctttgcagtgagtgttacagctcataaaggtggcacggacccaagttgcaagcagcaccaaaacttactatgaagagcaaaagaacaaagcttccacagggcggaagggcacccaagcagattgccccagctggctcgggggtggcctgcttttatttccttatctggccccacccacatcctactgattggtccattttacagagagctgattggtccgttttgacagagcgctgattggtgcatttacaaacctttagctagacacagagggctgattggtgcattgacaatcctttagctacacccaaaagttctccaaggccccaccacattagttagacacagagcgctgattattgtgttcacaaacgtttggctggacacagagtgctgattggtgcgtttacaaaccttagctagacacagagtgctgattggtgcatttacaatcctttagctagacagaaaagttctccaagtccccgcccgacccagaagcccagccggcttcagttctcaatggcactcgcttagggactttgtggcacctagccctggcactccggcacctcagagggagctcgtccccgcatcaagcccagcagatgccggccaaccgcgcggagtgcggggctccccgagcccgcgcccacccggaacccgcgccggctcccgaacaccgcgcgcagccgcggctcccggccgcgcctctccctccacacctcccctccagcagagggagccggctctggcctcggccagccccggagagaggcccccacagcgcagccgcgggctgaagggctcctccagcgcggccagagcggacgcagaggacggggaggcgccgccgagagcgagccagggctgctagcacgttgtcacctttcacttggaggtagggcttctagtaggagaggtggagagagacattgatgaggagggagaacctgagtttaggccaggattccaaccgtccgtttcaagagaaaatgttcctgctgaataacaagggggaaacttgaccaggcagggcctggaaattaagatggaagctcgaggttatgagaggccagcgtttcgggtgctgtccaggtgactaggcctctagaggttcttagaaagagaaagcattctgtgtgggactcagtctgggaaacactgcatactgtgttcttgtggagtttcacaattaatgcaaacacattaaaggctcagagaagtcctgcagtaaagaacatttccaatacaaccctgtattcccagcacagatggccacaaagccacttttgttggaagactcgccaaggcaggacatttattaatattttgtgaaagaagaattattttatttaaaaaaaaatagagacaggatcttgctgtattgcccaggctggtcttgaactcctggactcaagaaatcctcctcggcctctcaaagtccggggattacaggcataagccaccgcaccccgccaagaagaattctttgggaaccactagcactctggaatgctttactgtagatatgaataagtgattttttttaaatacaaaagtcatattagtattaattagttttggtgcattttagaaaatacacgttttagaaagcttaccctaataacggttggaagacatgctggaagaggtagcatgatagcaagtgctgcagagggagaggcgtaactgggttcaaatttgccgcttgctgcctgtgagtcaagcctcacaggtttgcatggtttgattaaaatatggctttaaagatcttagcacaaagcctagcacatggtaagcactcactgtgtggaagctattatattattttcattttattatgataaattggggccgactaggtcaagtcatcaaagtttggcccacccatgggatttgtagacttttgcagggctgtgcctcctttcctccccagacaaaatccatcacgtcagcagtcacagggcaccctggttccctctctgaatgaactgttaaatgactaagctggctcccaacagaggcagagcccagcaatatgcggcctgtaatctgtcagatgatacagcaacaggcccagtgaggggcccgacacaccccc

SEQ ID NO: 14757 - DNA, 2300 bp, Homo sapien
gacattcaaatcaagcagtgcataccaaaatgtaggcaactattcaccctagatttatgagatgcattggccatgtgcacgaacatgggggtgtcacaatacaaatgtatcactccttgactgtcccttctttgccagtcccctgactggacatctgcaaacgaacaggccagtcctcaaatagatgcctgggtatctcggatctggaagcctcctgacctgttctcgctcatgtcctcaccatcttccaccttcccctgttgacctgaacctcttgccacttcttgtcagatatatacatcattttttatagaaaactgaggttctatgtagttagaacaatttcaaataacttattagggcctaaactaaaatctggcttcccagtttcccaatgtgtcgctctatcacatcatcccatccttgctgccacttacgggacatcaacattgcacgtttttccaacctggcaaagcatacaaaagtctttctaatgcctctctatccctaaagtgaatgcgttttgctttagcatcctctgaatctgctaagaatttctaacgaggagggttaaataaataaagcattatggtgaacagcaaacttccagcagattgcaatggctgtataacagtgtcccaaacaaatagaagttcagtcaggggctagaacagagatctgctcaataatattttcaaggacataagctcctccagctcactgtttcatcattcttatggcaggtccatgttccaggcagcagaattcaggaaaagaactagaggaagaacagcaaacagcttacaccaattgcctcctaaaaatggtttgcagaaattgccacacaacactacagtttacatcccactggcaaaaacttatactttgtggctatatccagccaaaaaaaaaaaaaaaagaccaaaaagtttagttttattgtgaggaaccatgtatccaggcaaaatttcaccattatgaaagaagaagagaacaatgtggttgctgatggtgacatgtgcatttgcccagggacattaaaccatttacaagactttttttaacgcactgtttctttcatcagtccaagactctagaactaaagtagcatataggttttaaagccaacactgattaattggcaatgactgcttgagaaagccatttgagacaaagtgtggtctcagggacaaagatctcaacaatctattagtgatgtctgtaatggatacaggaaaagagagtgggggtgaagatgctttcttttatatttctattctcacactgtcatttgacattgactttcaaattaaagtaatggttctacaagtccagcagcataataataatgaatgctgctaacacacctatgacacattacccaaaacaatctatgcatgcaggcactaattccatcctgacagctctatcatgagataataaagtatttttataagccccaatttggagatgaagaggttaagttttgagcagagcaatgtgtttccaccaaggtcacctaatcataagtggcagatccagaatttgaacttagttctttcagcaacatcagatgtgctttccactccctgtataataatactattccaaaaagaaagaattaagttgtcctccttgtagattttcttggatctttaaactattttggtccaatatattgtggaaagaaggcagagcaattgtatattatctactgatactatcccttaaagttttgggtcttctctgctaatgaatttcctgtggtactcaacaagaccaactgaaatagtcacaaaattcaaacaaaaaccttactgaaacaaagcctattaggagctgggcaagagatactcatgaaaaagtagtttctaatggcctttagcccacagatgtgcaaacaattacatgaactgcggtgtgccaagagctgtagtaaaggcaagcacaaggacccatggtggcacaaaggagccaactgctgccattccaggtgtgggcaagcagttggtatgtcagagccacttcacagaaggagagatgggtgggtcccaaagggcgggtgggtaatcaccaagcacacacagggaacagctagccatgcagggagaagcagatgccaggactggatgtgcagaatggcaaggcaagttcagaacagcatggccagtttagaaaagctgggcataatatgtgcatggctggaataaccagaatgaagtggggaccagtaggggaggtggtaaagaggctaaccttgagaggataggggcacctggacgaggctgtgctttatggat

SEQ ID NO: 14758 - DNA, 2300 bp, Homo sapien
tttttaaaggcagaatgtgtgttggtcacacagtctgttgttacctgtagccaaaactattgtttgttgttgttgttttgagatggagtctcgctctcttacccaggctggagtgcagtggcacaatctcggctcactgaaaacctccgcctcccgggttcaagagattctcctgcctcagcctcccgagtagttgcgactacaggtgcgagccaccacacccagctaatttttgtatttttagtagaaacggggtttcaccatgttggccaggatggtctcgatctcttgaccttgtgatctgcccgcctcggcctcccgaaatgctggtattacaggtgtgagccaccatgcctggctggccaaaactgttcttaactgaaatgaaaacagagagtctggtctttcccagtacagaatgcaaaacctgccattttgtcctttcattaccgttaggaccattgtccttttctccctctcccagccacttaatttggagggaaccattgcctggagacagtgaaagtttagtagagtaagaggcagaacactattcatgtattgcagagccaatactactacacggttaggatacatcattcaatcactcaacatttattgagcacttactgtatgctaagatctgtgttaggccctagaggtcaaaaaacgaatgagaacaagttctgtgtttcaaatgagtgggatggataatacatagataaacacgtaaggtcacgttgtgttatataaaaaaaaaagtaggcagagtaagatcatgtagggagctattctagacgaaatggtcagagaatagcaactatttctgaactttacacagagcctaatttgtgacttttccactttctctgagaggtaataaggaaattttgaacttataaaactttactaaatctccacattaataatctaaactcaacgagggtagtagagcaacctttactttgaggttttttttttaggaaaattgctaaatttcattgtgagattaatcaatacataacagctcacaaacgtggcatgtcgataaggggacaacttaaaagttaagaaaatgatgaccagctaatgacagctatgcaagatggtaaaaaacagaacagagaaaaaatggaaggttgaaaaggaaaatgtagcaggacaagccggaggaaacttgggcgtgaggaacaagtcatcaaggcaattggaaatttctgtggatatgacaatgatgtcaggaaactttcgggtggggcagaaacttgagtgacagatgttgttcaaaaacaatgtgattcatgatcttatttacagcaggaagaatcagagttccagctattcctaacagcgacactgcggagcttaggaggagaactccttaggggatgtatcaggtttaaaaccacaaccctcatttttcttatctatggctcttacatgggctgggaattctgaaacctgggagaggcggtgatcaaaaacctggaggttagaagattccaagtcattcattaaagtcccgatgcggccggcccccaagatctcaaaaggaaatattgccgagttccgtttcccagagcatctatttcccctcgagtattgcagatgtaatcataaacacaagccagttacagccacaacttcatgctttagcgagaacccagtggctcctgcaaagtccttacgctgctagaaaccccgcccccgttcgtaactatgggaacggctgacacgctgagagccggagataaccctgttccgccccctccctgacagatactgtttcccactgtctgtccacatgggcgcaccgcctcactattggccagggctccaggactgtgcctggcctcagccagtaaacggcctgtgcacgtgcacgccggagcctcccgattggccaacactccctgatcacgcacggccttcctgcgcccacccacgcgtgggagcgccaatgaaatgactcagtgaccatctacaacaaatcagcaagaagcagggctcgcagctgaccaatggccgcccgccgggggtgggctgtcccggcccttttccaggcccaactgggtttgttaaagcgacaggcctctcggcgagccggtgccccatcgggtaccgcacggctgccgcggcggccttaccctgccgcgagcgcctgtgacagcggcgccgctgtgctcgcgaccccggctccgggcctctgccgacctcaggggcaggaaagagtcgcccggcgggatgggcggggaggctgggtgcgcggcggccgtgggtgccgagggccgcgtgaagag

SEQ ID NO: 14759 - DNA, 2300 bp, Homo sapien
aaagtttttatgaccattgtgggaattgatttaaagggatttgtctttgccaaaaacagacactgttgatcccttacgattctttatataaataaaaaaaaaatattgcaagtaactgggttttacagaaagctttggtgtgtgtaactcgtaaactgaacattgtaaatcttgtagtaacttctcttgccactatagaatagaatactgcagtgagagggtatgtttaataagcttttcagatcggttaacactacacatgttattgcactattacacaaaaccccaaaaccactccaaattaagaacacatgaaatttctgcttgataatgcattttgaagtaagtggtgggaaaaggctgtttgtttattccactttattaaatgccaaaataaatataatgttctgattattttttatttttatatcatttatccttccacctgacttttatatataaagtcttaaaaataattctgtcatgtttataagtcctaatacagcttttgatttttttttaaaaaaatggtatattatttcctggaaacataatgacttcagggtaaaataagatggtgtcatgctaatttttgaatctgaaaattcactgtagttttcctaaaaggggagtcttaacaccctgtgtttttgtgcatatttggcctaatatgttacatgaggataagaaagtttgattcatttttttggtatttccttacaaccattctgtgaagatagatataattttaagttctatgagttctctagagtggcttaattaaggttgttttattgtttgaaattttcaagacccctgtattgaaaactcaagagaaaatggttggctgttggtttttcacttctggtccagtctcgctgagtgccaaaattgaaagaaagggatactgtaatggtaagcaaaatgcttgaaagtccaaatgaaagatttcattcattttcttagctaattttaagtgattttaaatagtgttttttgtaattatatgacgtgtatagtattttaaaacatgaatagtgatacattttttatataaataattgatatttaagtatttttaaaaggaggaattgtttccagtcaaactcctgttttttttctgacttcaatcctgttactttagtaacaaagagtataactagaggaatgagaaaatgccagcatctgattttaatgttgcaaaagaatctccagggttgtattgctaaaaagagaactactggagtatgaaatgctattagacattctgattccatgctggcttgatatatgcaaatgcatgggactggaatgtagtgtattaacaaacttaacaatcagattgttactggaattgccattagtgaagggcccatttccagcagtggatttggcccctgctccaggattctgacttgttagaaaggaattcagtatggaatggtatgatgtgcagccataatgttataaaacttgcctaatccatccgttgattctttctgtgccttaacattattaattccttaaaagcaaaggctttgttctcctgttaggcagattttaatttgataagcactaatgagtttgttagtgatcttttatacttaacatagtcctgaatcatttatttgtatgtcttatcctaatttatatagacactggtcatttacatatctttagaattgctaatgcaatattgctactttagaaaagtcaataatgcaataattagaaaataagatctaccacaacctgcagtgaatttttatttctctggcttgaatttacaatatgttttccatcaaagcttctcaatttgttaaagtgatgttggaacatttcagctatacggccctaatccattgtggtgagaactttttcaagagtctctgaatcctccctggttttgttttctttttaggagaagctattccaatctatgcagaaatagaaaattgttcctctcgtctgattgttccaaaggctgctattttccaaacgcagacatatttggctagtggaaaaacaaagaccattcgacacatggtcgccaatgtgcgaggaaaccacatcgcttctgggagcacagacacatggaatgggaaaacgctaaaaatcccacctgttactccatccatcctggattgctgcattatcagagtggactattccttagctgtaagcaaagctcttttttaaaaaaaaatgtgtatgatggacaataactgatgtcatgttactgtgggtatgtagagttgcctataaaaatgtcattttatttcagcattaacaccaattgg

SEQ ID NO: 14760 - DNA, 2300 bp, Homo sapien
ttctttttctttctttcttttttttttttttgagacagagtctcaccctgttgcccagacttgaggtgcagcatcacgatcttggctcaccgtaacctccaccttctggtctcaagcgattctcctgccttagcctcccaagtagctgggattacaggcatgtggcacaaccgcctggctaatttttgtgtttgtagtagagatggggtttcactatgttgaccaacctggtcttgaactcctgacctcaaatgatccaactgccttgactcctgaagtcctgggattacaggcgtgagccaccgcgcgcccagcctttttttttttttttttttttttttgacatagtcttgctctgtcacccaggctggagtgcaatggtgtgatctcagctcactgcaacctctgcctcccaggcccaagcgactctcctgcctcagcctcccgagtagctgggactatgggtgtgccactacgcctggctaattttttttgtatttttagtagagatggggtttcaccatgttggtcaggctggtcttgaactcctgatctcaaatgatcctgactgccttggcctcccaaagtgctgggattacaggcgtgagccactctgcctggctgatctgatggttttgtaaggggtttccgcttttggttggctctcattctctcttgcctgctgccatataagacaggccttttgccttttaccatgattgtgaggcctcccaagccatgtggaactgtgagtccattaaacctctttttctttataaattagtcagtcttgggtatgtctttatcagcagcatgaaaacggactaatgctattggtccgccctccttcgatgatgtggtatctggtgaaagtttggggttatggatcttttactatatctgcaaatgggggcctccttcagcttccagcttccttagacatagacctttgcctgtcacctgcatgtctgtctgggacctgtactcagaggatgccccgcatagtgcgtgtcacaaagcccaaggtgacatctttggggcaagctattctgcacgtcctcaaggcctctgtgtttgctaaacgtgaaactcaagtgtgcttagccagctgtgtgggagttttcagcatgcaggcaaagcctcctcattgcttcagggctggaggtggctgagatgtgtgtgagagctttctgtcgaggttcagggtgcttcctacctctgtccggtggagctttggctgttgtgaacaggggacctatgagaacctcaggcctttgatattgccttggatttgtgactccaccaccaagtcgctgaaagtaccaagatgtacccacatgaacccttcagtgcacagattgtcaaaaactctaagaatattgtttgcccattttaagaaaatgctcacatatcagctgccccaccacccccttttaggcatttaacaatattctggttataggtctttaactacaatttgcataatgtaaacatatgactgactcttataaatctgtttctcatttgtattggacttaattttttttgttgttttcaagaatgtactataataaatattcataagctccaagacatctcactatggaccattcgttatatataatagcactttaaataacgtttcaaaatgttttcctactgctgtgggctcaattgtgttggctgtgattttgcatggtttcaaaaaaagcactcaggtgttcctggagccccacgctctcgctctttaatccggtatttggaagcagacacgagttctttcccaaacacatcgcacatttccagagcatgtcttgtggcttgaagcatgtggactgtgcagcagccgatgctatcagggaccctcttcacagctttgacaaatgtgtcacctcccctctatgcttagctgtgaccgtggagaatgctatcactagttcctttgccactttcttggagaagttctatttgtgaaggccgtgcgtgtttgtgtgtttgtgtgtttaaatggaagctaaaggagtcagaagctgtttgataagccctgggtatgagttaattattgataaggtggttgaacccatcacagtcacttccgataactccgcaagcaaatgaaaaacatcctggaattgtgaattcccctgtggcaagtggttatcgttcgtggtggcagtctgctgttacgaggtaagtaatgaagctttccacctttcccctttaagaaactgtgactgcactttccatggagcaggggtgagagcaggtgcccttgtccccgtggctcctggcgggctctt

SEQ ID NO: 14761 - DNA, 2300 bp, Homo sapien
ccccccgagcttcggagacccgcagcgtgcacgcgccccggccgctccccgcagccgcccacgtggtggagccctgagctgcgcgaggccgcggagagcgctcagggcgggcggctggtccgggaggccacgccagcgcgacccagccgagtcggcccccagcccgggcccccacatttcctcccccggagggagggaggcgactctccgcgggctgccctccccagcgcccgccgcgccctctggcggccgccgcggggacgcgcccggggcacgcggcgctgcctgtctgggccccccttccggggcgcggggcccgcgaggggcggcggggtcctctctcctcgagccactctgggccgagccacacgggccgcgcccttccccctccgctccccctgagcccccaaactccgggctccacggtcgcaacgccgcgggcaccccagcctggcgtgaaagtgcccggcgtagtagcctggggggggggtcccctttctcccaggtgcgccccttccgccacgttcgggctttccagtacgcagcgaaaaaaatgccgcatgcacgcatttatttattttgcaacagctgcaagaaacaatgaagcttttcaagaaccggggaaacgcgctttccagccgcgctgttgttgttttcaatgaacctctcccagccccgcactccccgcccacccctcccctctcctgcccacccctcccctgcctagcctttccctggctacccacccctgccccgccgagaccggaccggcggcgggggcattgtttttggagtcgggcgggaggggagggcgcgtgcggggtggccggcgcagtgcggtgggggcgggagcgggtgggcacgcgcgcgtgtctctgtgtgcgcgcgggaggcggtggggcgggagatgggggcggcgcctcgcagtctcgcgccccacgcccgggctccgctccgcacgtcttggggaaccgggctccggttttttgcgcgcgccggcctgggccgggccctcggcgcgccgctgctgcggcggtggccgctcgagtgtgcgagcgggcgcgtgtgcgcgggccagggcgcgcgcgcgcgcgcgagcccccagtgtgtggcagcggcggcggcggcgcggcgaggctggggctcttgtttaccagcattaactccgctgagcggaaaaaaaaagggaaaaaacccgaggaggagcgagcgcaccaggcgaactcgagagaggcgggagagcgagagggacgccgccagcgagcctgcccacggccggcgctcgcagaccctcggccccgctccccggatccccccgcgccctccacgcccctcccgcgcgggggcagctccacggcgcgcctcgcctcggctgtgaccttcagcgagccggagcccccgcgcagagcaggcggcggcgggcgggggccgggcgggggccggcgcggggcgggcggcggcgcagagccgggcggcgcggcgggagtgctgagcgcggcgcggccggcccgccgctttgtgtgtgtcctggatttgggaaggagctcgccgcggcggcggcggcgctgagggaggaggcggcggcgagcggagccaggaggaggaggaggagggggagccgctcattcattttgactccgcgtttctgcccctcgccggcctcgcctgtgacccggacttcggggcgatcttgcgaactgcgtcgcgccctcccgcggcggaagctcgggcgtccggccgcctcccgcgcggccagggccgggcttgtttttcctcgcctaggcagatttgggctttgccccctttctttgcagttttccccccttcctgcctctccgggtttgaaaatggaggccgacgacgccgacagcccgccccggcgcgcctcgggttcccgactccgccgagccctgggccgctgctgccggcgctgaggggccgccccgcgccgcccgccccgtccgcgcacccggagggccccggcggcgccgccttcggagtattgtttccttcgcccttgtttttggagggggagcgaagactgagtttgagacttgtttcctttcatttcctttttttcttttcttttcttttttttttttttttttttttttgagaaaggggaatttcatcccaaataaaaggaatgaagtctggctccggaggagggtccccgacctcgctgtgggggctcctgtttctctccgccgcgctctcgctctggccgacgagtggagaaagtgagtatgtgcccgccgcccgcggccactgcgggaacttttcctccgaggggctgcgcc

SEQ ID NO: 14762 - DNA, 2300 bp, Homo sapien
gttgtgacacacatatatatatatttttttaattcttgggtacaacagcagtgttaaccgcagacactaggcatttggattactatttttcttaatggctatttaatccttccatcccacgaaaaacagctgctgagtccaagggagcagcagagcgtggtccggcagggcctgttgtggccctcgccacccccctcaccggaccgactgacctgtctttggaaccagaacatcccaagggaactccttcgcactggcgttgagtgggaccccgggatccaggctggcccagggcggcaccctcagggctgtgcccgctggagtgctaggtggaggcagcacagacgccacggtggcccaagagcccctttgcttcttgctgggggaccagggctgtggtgctggcccactttccctcggccaggaatccaggtccttggggcccaggggtcttgtcttgtttcatttttagcacttctcaccagagagatgacagcacaagagttgcttctgggatagaaatgtttaggagtaagaacaaagctgggatacggtgattgctagttgtgactgaagattcaacacagaaaagaaagtttatacggcttttttgctggtcagcagtttgtcccactgctttctctagtctctatcccatagcgtgttccctttaaaaaaaaaaaaaaggtattatatgtaggagttttcttttaatttattttgtgataaattaccagtttcaatcactgtagaaaagccccattatgaatttaaatttcaaggaaagggtgtgtgtgtgtgtatgtgtggggtgtgtgtgtgtgagagtgatgggacagttcttgattttttgggttttttttcccccaaacatttatctacctcactcttattttttatatgtgtatatagacaaaagaatacatctcacctttctcagcacctgacaataggccgttgatactggtaacctcatccacgccacaggcgccacacccaggtgatgcagggggaagccaggctgtattccggggtcaaagcaacactaactcacctctctgctcatttcagacagcttgcctttttctgagatgtcctgttttgtgttgctttttttgttttgttttctatcttggtttccaccaaggtgttagatttctcctcctcctagccaggtggccctgtgaggccaacgagggcaccagagcacacctgggggagccaccaggctgtccctggctggttgtctttggaacaaactgcttctgtgcagatggaatgaccaacacatttcgtccttaagagagcagtggttcctcaggttctgaggagaggaaggtgtccaggcagcaccatctctgtgcgaatccccagggtaaaggcgtggggcattgggtttgctccccttgctgctgctccatccctgcaggaggctcgcgctgaggcaggaccgtgcggccatggctgctgcattcattgagcacaaaggtgcagctgcagcagcagctggagagcaagagtcacccagcctgtgcgccagaatgcagaggctcctgacctcacagccagtccctgatagaacacacgcaggagcagagtcccctccccctccaggctgccctctcaacttctccctcacctccttccctaggggtagacagagatgtaccaaaccttccggctggaaagcccagtggccggcgccgaggctcgtggcgtcacgccccccccgccagggctgtacctccgtctccctggtcctgctgctcacaggacagacggctcgctcccctcttccagcagctgctcttacaggcactgatgatttcgctgggaagtgtggcgggcagctttgcctaagcgtggatggctcctcggcaattccagcctaagtgaaggcgctcaggagcctcctgctggaacgcgacccatctctcccaggaccccggggatcttaaggtcattgagaaatactgttggatcagggttttgttcttccacactgtaggtgaccccttggaataacggcctctcctctcgtgcacatacctaccggtttccacaactggatttctacagatcattcagctggttataagggttttgtttaaactgtccgagttactgatgtcattttgtttttgttttatgtaggtagcttttaagtagaaaacactaacagtgtagtgcccatcatagcaaatgcttcagaaacacctcaataaaagagaaaacttggcttgtgtgatggtgcagtcactttactggaccaacccacccaccttgactataccaaggca

SEQ ID NO: 14763 - DNA, 2300 bp, Homo sapien
gctgtccctggtgagaacacttgtgtaccgttgcttactttccggttcactaagagggtcgcaccttgccctcttaatcctagagtcaaatctgattacaaacattttcctctcgggaatcccgcttgtaaggaagatcactgtgctctctgttaaataaaacagctccatttagttgccttattcgttctcaggcttactgtatttcatcagcctaaagactgtgtttgacatcaattattagagaccatttgtttttacaatggaaaaagaaataaaagtgcagatgttgaacctcaaaatccatacttctcagagctattttcattccagaaagtaggaatgtgctggggggttcttgtgtggggagaggggaggtgaatgaatacaaaaatagacatatcactgtgactaagtaaaatattttgtgttgttttttctattaatttcaaaattagagaaaactttagaacagaaaaaaataagtgaattatgggaaagtgaaaactgcaggacacattccagtttagttaaaataatagctcctgtcaaatcaaaaaaaaaatgatgaaaatttcagctttgttatcagaaaagtagtatggttaaagatgggcagtctttgcacttaaggagtctccttaaacacaagttcccattcccagacctcataggtgaatgttgatagcagagttggaccctagcagcaaccaactttacaaatgtgggcatttctggacgggcgcggtggctcacgcctgtaatcacagcactttgggaggccgaggcaggtggatcacgaggtcaggagttcaagaccagcctggccaagatggtcaaactctgtctctactaaaaatacaaaaaatagccagggctggtggcaggtgcctgtaatcccagctactccggaggctgagggagagaactgcttgaacctgggaggcggaggctgcagtgagccgagatcgcgccactgcactccagcctgggcaacagagcgagactacatctgaaaaaaaaaaaaaaagaagaagtgggcatttcttaatggtccaatctcttcctttaactgtgcagaggaagccaagcccccactgagaggtgacaacatgctggtaggcctcgcagccgtcactcactctcggctcctctgcctgggctcccactttaacggcacttgaggagcccttcagcccgccgctgcactgtgggagccccttcctgggctggccaaagccagagccggctccctcagcttgcggggaggtgtggagggagagacgcgggcgggaaccggggctgcacgccgcgcttgcgcgccagtgcgagttccgggtgggcgtgggctcggcgggccccgcactccaagcagccagcccgccccgccggccacgggcagtgaggggcttagcacctgggccagcagctgttagtgctcgacttctcgcggggccttagctgcctccgtgcggggcatggctcgggacctgcagcccgccatacctgagcctcctcccccgcgtcatgggctcctgcgcggcctgagcctcccccacgagtgccgccccctgctccacaggacccagtcccatcgaccacccaacggctgaggagtgcaggcgcactgcacaggactggcaggcagctccacctgcggccctggtgcgggatccactgggtgaagccagctgggcttctgagtctggaagggacttggagaacctttatgtttaactaagggattgtaaatacaccaatgggcactctgtatctagctcaaggtttgtaaacacaccaatcagcaccctgtgtctagctcagggtttgtgaatgcaccaatcgacgctctgtatctagctactctggtggggacttggagaacctttgtgtccacactctgtatctagctaatctagtggggacgtggagaacttttgtgtccagctccaggattgtaaacgcacccatcagcaccctgtcaaaacggaccaatcagctctctgtaaaacagaccaatcggctctctgtaaaatggaccaatcagcaggatgtgggtggggccagataagagaataaaagcaggctgccccaggtagcagtagcaacttgctggagtcgccttctgtgctgtggaagttttgttgttttgcttgtttgcaataaccgttgctgctgcttactgtttgggtccgcactgcctttatgagctgtaacgctcaccgtgaaggtctgcagcttcgttcttaaagccagccacatcacggacccaccgggagaaacgaataactccaaacacg

SEQ ID NO: 14764 - DNA, 2300 bp, Homo sapien
tgttaggcaggggctttacaaggcaatgccttcccttcatggtccaccagcacctctctcctggccaccagatctgtatctaacgtcaaacctcagcaagcccagctgggaagtactgggccagctcaggaaggaggggaattatacagcaaaggtgctacacaacctgattcatgcatgtcagcagggactggagcggaaagcctgggaatgggaggataggtggtctgtaaggtgctgggtcaaggtgggcttgtgggtcaaggctatatggctggagtatgagagagttgttggtgtgcgggcagtgtcctgcgacaaggattcactccctggcaagggccttgggcagctgctagtgtgctgctggggtagccctgggaagcctgggaaagggatagtacacattaaatgaatgaagtagagatgccaggacacacaatgcaggagggaaggaacaaatatcagagaagtgggcgtaagaccagaaaacccaccaggctagctacgttccttgggcggcctggaggatcctccatctatcacagtgataaggaagcagctggtgaggggcaccaccccactgagaagctgagtggtacctgtcctctggaggggagggactgacagaagagacgctgttacagagctggcctctctggtgggcatgagaagacgcagcagtggctctcaaactagcatgcattcaaatcaactggaggcttgtcaaaacacacaaggtttcatccgcaggtctgggccggggctagagagtgtacatttctaaaacgttcccaggtgatgctgctgttgctcatccagatactagactttgagagccactggctacaggcctagcagagggcggatggcagcccataagtctcataaaaaaggtgagtataattactgttatgagctgcaaagttggaatggccatgggggtggggagtgaactaagggttctacagactcagggatctgagggatctgtgaatcatagaacacggtgttcctaggggaaagataaatgggctgccggcagaaacatccccaagtatatatataatcaaaaacacttctaagccaagttatgatccagttttctgaccctgagccaccagaacacactggctgaaaggacccgacaacctctatggcaagtgagagccttggtccttccccagagcgactgcagccagttaggacgcgagcactcatttcttttcaggatggttggttcctactgtggcgtccaaattgatgcggatacccagggacccatagcaccaccatggcccccgtgttagagtagggatctatgggggtcatgtcatccacagagccctgcccaagacacagcggggtcagaacagcagtctgggctgcagcgacacatccgaggatcactggcatgttactgtatttaaagccatgagattggattggagcagcagcaggtagatagagaagaggtgagtggctaaacgactggtgggtggcaattagggagaagcaggcacttgtgacagcgttgggggaagagagcaacttccccaagctctctggcctccccaggccccgggtctatgaggaaaacggctgtgtctttctcctttctgtgttcccagggcccagcccagcaccaggcacacagaggggactcaaaaactagctttcgagttaccctatcatgaacaccaccaacaaactccacagaaaatgtgcttctaagggcagggagagcaaatatgctgttctttgacggcaaattattctttttttagttcttcagtggaagtgagaagtcttgtccctgttgggaagattaaacaggggatgtttctttgtcacttggggctcttcccaagttcatttgtaatgattatgacatgactttccaaattaagagagggaagttgtgcagcttagattactgcattttttttatgtgacaaatgctatttttgtaccttttgaaaaggcagcctataccccaacaaacacctgctgtgctcctatgaaacagtgacaaatgatctacccacccaaaatagccagaagagctgtgacagagtggggacactgtgggctctgagcaagagtggctggattcggattttggagtgagacggagcatgaagacgctgtgtcctgaggcctttacattctcatcttacttatcccttgtagcgatcctatgagggaggggttatccttactttacagatgaggaaactgagtctgggaggctcaaggaccagctcgtccctgtcctcctgctccctagacccagctgg

SEQ ID NO: 14765 - DNA, 2300 bp, Homo sapien
tgtgggacagcagaacccgttagcgtggggagtcaaagagctgagaacaaacagctgcagcggagtccaggcaactgtgagagccgcccccccgcaccccaatgtcccagaggggcccaggaccggcagggtctccacataggtttgggcgatgacaccacagcagctctggtgtttgacaagcaaaggccaggtgtcagtgtgcacctgggggaatgggaggatggacaatgatggggtgatgggggtccaaatccccctgtcccacaccaaggtgaatgaacccaagcactgaataaacccactttccacccccacttagttttagcagaaaaggacagggaattattcattgaaagatattaatttctaccacctacagaatgggatctccaacatagggtctctagaaaaaggaagggccactttctgccttgcttgtgattggaggctcatggctgtgacaaggagagcactagaagctttgtcagaggccctggaccagcttgctgagtagtccacctttccatgccatctgtaaaatacactaactgctggccctgccatgaggagccctctggccagtggatgaccgtccaggtctcgccctgggcacttgtgttgccacaagttcaagggcaccccaaccaagggtcagctggtttgtccctgtgagccttaatgacacttatactgagaactgtcattcataaataactgccatgaaaactaatgaaatgcaagtgtacaaaaaagagctgtggtttccatggcaattaaactgaatactttcttagggaaatgctggaaagaaacagctgtcacattaggggtgtgtgtgtgagatttgtaaaagttcggggagatgttagatgtctagaaagttctgtacttggagcactttatggtctctaagttttcactccaaatgaaagaaattcgttttggaaaatgtaatgtactatgagggtagcttgtataagaagggcaactgggactcctgtcaactgacatcaagagaagtattttgcacattaaaatactggtaaatggatatatatttatgttttaagttaaaaagattatttaggctgggcacggtagctcacgccagtaatcccaggactttgggaggccgaggtgggcggatcacctgaggtcgtgagttcgagaccagcctgaccaacatggagaaaccccgtctctcccaaaaatccaaaaaaaaaaaaaaaaaaaaaaaaaaaaaattagccaggcgtggtggcgctggcctgtaatcccggttactcgggaggctgaggcaggagaatcgcttgaacccgggaggcggaggctgtggtgagccgagatcgtgccattgcactccagcctgggcaacaagagcgacactctgtctcaaaaaaaaaaaaaaaaaaattaatgcacatgtatgtgtaatgtatatatatgagatgaggcctctctctgttgcccaggctggagcgcagtgccacaatcaggttcactgcagccctgaactcctgggttcgagtaatcctcccgcctcagcctcccaagcagcgcgtgtgacaccaccacgccaggctccatatatatatatatatatatatatatttttttttttttttttttttttgggagagacagggtctctctatgttgctcaggctggtctcgaactcctgggctcaagcgagcctcccacctcggcttcccaaaatgctgggattataggcctgagccaccgcgcccggcccatatcgtttttttaaaaatagaaaagccaccaatctccagggcctcgggtaagaagtcgctccaaaatcgccagcaccacagcaactcaataggcttctatttccatccaccaaggccaggacactcgtatgctcccggacgccctctccggcgtcccttcgctgagcccggcctggctagcccgccaccccgcccgctgttacccgactgcccgcaccgaccacctgcggccgccaaggtgcggcagggggcgctgtgcggccgcagaggccgcgccgggccgcgctctgattggctggaggccgcggccctcgcccaggccgcccgcccagtctgcccgccccgtccgctaagtgcctgggctctcccgctcgcgtcccagtctgcgggcctccggggcagcggcgaggccggagcgtcgcggcggagaggacgagaccgggacaagaccagggcaggagggagccggccagccgcgagaaccccgcacgcccggcaagatgctgtcctggcggctgcagacgggccccgagaaggccgag

SEQ ID NO: 14766 - DNA, 2300 bp, Homo sapien
gctaagggataaggtgcagagaagcgcaagtctgcacagtctgataggaactggccactccagaaaagggcattcagactgtgtgctacttaatgacctagtgccaaaaaatgaaatggtactgtaagcgattcccaataatcatctaccctaccagtgccagggaacctgtgcaaatagaatgtgaaatatcacaacagactacagctgtcctcgccataaatactatattgtttaaagttctgtacatagaaagcaattcattcaagtcttaagatgaatttagctctatatggcaagtaattttttcctaaagatgaaatcatttagcaagaatttttttaacataaacagtctgcctatttcccatttctttttgaaaagactttttagagtctaaattgtatttatttttcccctaaaatgttagtctgttatttcatattagcacatgcaagcaaaatttactcttaaatatattactttaatctggttaatgttttgacatctataattaattgtagtttcaaacagatgcaagccatgtctgtgaccaggtgcaaaacatagaaattcatctccagaagtggagagaagactccagggaaaaaagtgttttgtaaaagtcccaactcaaaaataaaattgcagtgccttttaaggcatgaattaactggaaacctttacggattaactataaaggaaattgaccatgccgggagtactctttaaaaaagtaaaaaaggggagattttcatagactccctcggcctcttaaaataagttaaggcctttggatgttggcacgtcgccaacaggctgccattaaaacaaaatgtttctgcttattaaaaccaatgcccatcattctcctcctcctcattgtctagatagaggagggcaactttcttttcatctgaaatcaccgacctttggtctaccattctctggagctgcaccttcttatcaaacatggcctgctccttgccctgttctctgtgggcctggtctccttccccagcagaggccttaaagctcacaccaactgcctggtcattcctactgtccgcgtctctccaggaaccacggtcagacacaccgagagctcccgcttcctgtgtccggctgcggatcgcctctacgttactcacatccatctgaaaggtaaacgaagtttctttgggccctggtgcaatgtgccttagcgttctgctgctgtctgctaacttgcctagctcaggggagtccgctgaaccagcaagcacaaatgttctggacacgggtccacggatggcaatgtgttcagaggtttccgtttctgtaggacctagtcgaatgtgcctaaaggatctgctaacacccgatgtcatttctgcccctgatgtgtcctctgcactatcctcctggggagattcagaaacgacactttggaaggtgctcttttcagtcataacggtttgtctacccgaggtatgactgtgagtggcctggtgcacatctgctgagccctctccgtgcacagtgctctctgagtcaccagattcccccagttggggaaccagcccatggtaaactatctgctgggtggtctgatgcctctgaggcccaatgctgatgtgcctgatggatgtgctgctccctggcaacccttccatgtgtacagaatctcctatgacacccaactccaccttgtctgaaagtggagctgtgaactggatttgcccactgaacccttctttagggcctaactggagttgcctgacagaagtctgggtacccactgactcttctgttgcaaaataatcaccaaccttccctgcagcagaaatggggccctgaaaaataatctccttttcagcatgaaattgtctgcagccaaatgtgctgtgcctccctgatccgtccatatctgcagaagactctgctgggccaggttctggcgagccccatgcctctggacaggcaggggcagggcctaggaagatgacttctctggacagtggactttgaccgggacccagcgtgacatgcctcacagaccggctggctccggtcgggctcgctgcctgacttaggtcacctcccgcacttacctccaccacttctgcagtgggtccttcatatgacattcgctcagtcctccagacttcagaggggccgagttttatgtgccttgcagcctggctcacatcctccagcacctgtgactgggcaaagcctgtggggctgctgacctccacagtggccgacactgggccctggggagtgcgctgtcccgagctgtgagaggccccaccagc

SEQ ID NO: 14767 - DNA, 2300 bp, Homo sapien
ggcctccttccagggggctgaagactgctgtgtacacgatagtgtgccaactcaggaagcagctccaggtggcatccaggtttgtcctgcctgcagtggaggccacaggagggatgcgaagcagcagggagtctgcggtcttccccccgcagcctccggctagcctttcttttcactcccttacacctgcctcctgggccccaggccaagtcaggtgtgtcggcctcctgcccctcctactgggctctttctcaaaccccttttcaggctccgaagaactctgaggcaggctgcactttgaaaacacatgctgacagcagcgtgttcaggtttccctttattagcgttttcttctcatgttattctcaatccctattagcctcctataagaaaggacttcctgaagttcactgtccagatctaactccacacctatgcaaggagctgtgtgtacaagcagatgccgggctgactcctgcacagggcgcactgaactgttgaagagaagtttttcagccacagtagtgctgatgggtaaaaattcttgttggcaagaaaaaccacttaggtgatagaaaactgctttatagcatatatcaccctgaagggcatccactgtcaaaatgtggcccacgggaggcttatggtctcactgttgcatgttggggccaacagttggccttggaaatctgtatcctgactgttgaattccattttctaggcggaggtgatttgtacagcaccctaaatgacagtgcccaggaatgtcctaggctttttcagggtgggggcctcagtctgctgttgtgccgggccgggccttccccagcagggtgtcctgagggatgctggtgcagaaggccactttggcttttgatgcctgccttggcttcgaagcaaccttgggggccctgcagacaagcagagggtggggtgagtgtggtgcccctcagccccccacaccgttcccatccagcctttgctgcccagcaggtgcccagacccatttatgagaagacttggtaggggctataaatgagaggagaattgtagcacagagcataaaacatgagatgttttcctcccatcttttatttttttaattttttttttttcagacagagtctcactctgtcacccaggctggagtgcagtggccccatctcggctccctgcaacttccgcctcccaggttcaagcaactctcatgcctcagtctcccgagtagccaggattacaggcacatgccaccacgcccagctaatttttgtatttttagtagagacgaagttttgccatgttggccagtctggtctcaaactcctggcctcaagtgatccaccgcctcggcctcccaaggtgctgggattataggcatgagtcacctcgcctggcccctcccatcttttaaaatcacctgtgaccatcctcactgagctgaggccctcaacccttagctggcttggtgagcaggacatgggtgaggaggatggtcagggttgcactggaggcctccctggctcgccttccctgccctcaaaggggatggcgccctgctggccaggttgtgtctgctccgggctgtggccctgtttccctgagcagactcaggcagccctggggctgctctctgcggaccaggctctgtgaggtaggccctccacggcagagcgctgggcctctgctcgggctgagaaaggacgtaggggccagcctttaaggtcagtcagtgaaccttccggctccagtcctgacgggcatccgagggcagagggaagccggaagcagggctgcaggaggccacagggattcccggggccctccccctgcagcaggtgccttagcctgcaggggctggtctgcaggaagacaacatccagcatatatttctgacttaaaggatgaattatttttaaatacctgggcaaggaagatcttttacaactcgggtttcaaaggaacttgtcctttatgcaagttatgggaagtcagcaaaacattccagagaaggttacacagaaccttctagaaccagctttctcttgagattctgaatggaaagggaatgagatagagaaagtgtgagggacgccaactcacgtggacagcatgcccatggcctgctgggtggccagagtccttttgtcctgcggtccatataagagggtctggatctggagacactgtagaacaccaagcagctatcatgaggctatggaagtgtcgctgagagcaggaaactaaggtctcccttgaatgagagaaagatgacctcattcttaggccctgctgtgatggaa

SEQ ID NO: 14768 - DNA, 2300 bp, Homo sapien
tgaataaagaaaataatagaagtggaaaacaccaaatgccaagcatattctataccaagcgtattcattattgccacccaataaatttggccaaatctgattatagactggtcctacctattagatcaaaggctcttagggaccttggagattatctaatttaaactctgccctcccaccccattttgtagattcagggaaaacaatgagtctgagttagaacagctttccccataccacactgttaataagtagctgatctgagactcagacctaggttttcaatgccagtttgtcctgccatctggggtttcagacgatgcttttcttatacagcctgctgcctctctgcgtgacagtccttctttctcaatttaaagtaaaagtagtatctaccatttattaaagtctcatttggtgccaggcatgttgttttccatgcataaccttattcagtcctcaccacagtcctcaaaggtgggtatttttaatatccctgtttacagctgagaaagctgaggccaacgttttataataagtggtggagcaggggatccatcctgggcagtctgacttcagagccaatgttcttgaacttcaccctatgctgcctccagtaaattgagttcaggttccttcagggactcgacacagttgaaaatacagtccaacatgctttgtgtaacatcacaagcacaggtggcactaatacatgtctgtgctttttaaaaatatgtaataagacaatcttgtgtaagaattcccacatgaaacacatacccttgattttctccattagaaaatatattcttcctgttttatagacataggaacagaattaacttcatattttgacagatttttttagagatctaagatacaattttgtgtaactaagaacataagatgggggctgtgtgtatgtgagtggaagtggttgtcggtgtaggggaggaggatgggaatacagggacgtgcaaagccctgaagccgtgctagcgatctcagtcctcccttcccacagattaacaagcccgtggaggaacactggaacacactggggaattctttcttagtagtgatttttttttgctccactttgtttcatattagtctcttaccacataggaagatgaaattgtcacacattaatctgttacctcactggaattgtgtttgtaagtttttgtagatatcagatatgtattatgttaaaaaaataactctctgacattatgattataggtgggtgagctgaagattcagaatttttagtatttcattaagattgcagttacacagccaggattaaaattcatgaatattttatttcctgctcagaatgctatagttcttgtattcagtttgtttcttataattatatgtaacatattttgcttctgctattggtgaggtttcaaagctgttcaattccagctcattttgtttatttctaaaaaggccatttgggggaaaatttatcttgggtacttggtataaaacacttctttggttgttacagtcatggcagtgtttcatgctgcccagatacgtctccatgtgtcatttgacaatatgtgaaggagaccttgttagattcccagaccataaggaactgtattcctgtccagttgagatgatagagaaactgagacctctttttctttgtccacaggactgtcactgcaagcaaaacaacatgcagaaaaagccagacaaatcctcgccaactccattgtgcctccctatagtgagaatacagatgttttcaagttttccattgagcttttccataccatgggcagagctttactctcccttcaaaagtatccttttgcctctaacttttacaaatagaaatactattcacgtaacacttacacgccaagtaaaaagctgatgctgatggatgacttaggaagtgtgattggaagtatgggagccaaggaagttcaggacatggggtgtagaatctagaaccaagtggaaaatttcctgaacacaattcagatttaaggaagctgcagagaatttgacaaaagcagagagactttcaaaggagctgctacaatgtggaagaattataaaggaagaatggatagaaattgaagcacggatcagattatcatttgcacagtaagtttcaagtttaggattttgcatacatgatggcgggaggctctttgcctgtagaatctgtctcaggtaggaggagcatctccatgaggctgcggccatggcttctctggaggtcactgtgtaaaagtaaaagaggaacacagtcatgtcagagcagcccc

SEQ ID NO: 14769 - DNA, 2300 bp, Homo sapien
tctttatctttattttttatacgtaatgtgtcttttttctctacttttgagatttttgctttatcatagttttaagcaatttgtttatgatgttttgactttatttggtatagttttcttcatgtttcttgcgtttagtgttcattgagcttcttggatctctggctttatgctttttcttaaatttggaaaaatattggccattatttcttcaaatatgttttctgtccctcctctagtctgcttttctttagggactcaaatgacatatatattaggcaacttgaagttgttttacagcccactgattttttttcatttttgataatttttattgctatgtctacaaattcatcttttcatctgcagtatcttatctgccattaatcccacacattttcatcttcacacataatttttctatctagaagttccatttgggtcttttttatttcttccatgtctttatttaactttttaaacatatagaatacaattattgtaattgttttaatgtttttatctgctaatttaacatctgtgtcaattctgggtcagttttgattgattattctcattatgggccatgttttcctgcttctttggatgcttggtaatctttggatgctagactttgtgaattttacctcgttaggtgttggttattttagtattcctatgaacatccttgagtattatcctctagtgcaattaagtcccttgaaaacagtttgatccttttaggtcttacttttttgatctgtgtggtgatctgagcagtgttcagtctagagctaattatcgcctctactgagatgaaaggcttctgagtactctaactatctaatgcctcatgaattagaaattttttcagtctggttggtgggaacaggcgccagccttacgttagcacaaaacactgttccctgtaaccttattgaaggattctttctccagactaaaatacttttcttacacacatgctaatcagtattctgtccctatacttgagggtgtccctctgctaatatcttggttcctctgtctctggagccttctcctcttcagtaatttgtcctgtcagttctagtcaccttggtctccccaaactctcaactctacttcctcaactcaggtagtccactgggataacttctgggtcccctcttccctgtgctgtttcctggaaactctctcaaagcaataaactggggtgatttattttttccatctctcaggaattgctctctcattgcttgtcttgtttcttgaaaccgttgttttatcctttgttctgtgggctgcttatctgtttgttttgggttatttcaggcaagaggataaatgtagttactagacttcatcttggccagaagcaaaagttgtaacaacaattatttattttctacctcagggtcaattgggcttcagctgatttaatctggggtcattgagagctgtttgggctaagctaatttctactggactttagatatatatatatatatgtacatgcaaatacatatgtatgtgctaggctaatttctactggactttatatatatatgtacatacaaatacatatgtatgtgctaggctaatttctactggactttacgtatgtatgtatgtgtgtaatacatacacatatacatgtatgtatgtgtgtttatatacatgtgtatgtatgtgtgtatatgtatgtaggcatatatatatgtatgtctatatacataaagaaagaaggtttaatttagttgaaagtagaaatcagcaggtcagtagtagccaccataatcttttgggatataatgctactaatttcaaagaaattatgggtatagtgttgaaatgtatatttctaaaagtaactatggaaattatcatttaacatctttgttttttattttaaaattagaagacaatgtatataaaaatatgcaagaatcacaggaaacccacatatccaaccacctagatgaagttgttgctgctgttagcatcactcatagaaagaagttccaaaacaagctgcttcagacagcactattccagcctcctcgagagaaactccacctctgtgaagagaaagcaaagtcctattccaacagtcatgaggtaaggagacttttgtttctgtatttctactctgagaattgagctatatggtataatcaagagaagtagaatgttttggattacattcctaatctcagcagtttgatacaagaaagtatataagacagtgcctttgttataacatgaatgaatgcagtacctctaggctccaagcacagcag

SEQ ID NO: 14770 - DNA, 2300 bp, Homo sapien
gtaactctccaatctccaactatgtcgtaaaatcccttgccagtttacccagtctgctggagaggctcaccgtttctttttcgagcgaattacacagttgtcttggcagcgtgatttgccctctggttcctgctttatcagtttggtgattctttgtacagattgataaccatgaaaaagtctaaagtagggcagttccggagcagccttttcccataaagcaagcgggtacctcacaaaactccaggcaaaagaatgaatgatagagcactcaccaatagcgagtggagaagagtattttgtcgaagtttgcaaaccaatctttgggagccagaggtgggaattttaaaatgaggtcttttccttggaattttcttaaagtggtatcgttgcctgttgatattgaagtttgtcaaagaacgtgaaatcaccagcttagaggatttttttcccctttaagagagacaaaacgtgcgaattgattctctacaaattgtgagaacttcaagagtggggtcataaagtattatcaaatataatcacttggtaacttttgtgtcaatgtggggaggaggtgaaggttattttaacatgattcatttttcatgatcaaatatcagatattaatcactgaaaaacagtattccccattaaaaaaaagaaatgaaaactaagaggctaacattgttttcaaaaaactgttctactgttaatcttttttcttttttggggggtgtaactcttcatatattagcagcaagtcttattatttgggctgaccattaaacaccgtatctttgtttttacacaaaatgtggatttcctcattttaagaccagcaaaaaatttctgagtgccacgaattcttaggtattccgaaactatcttagaaatacatgacatataccaaccatgctgtatacctgaatagctcttgaagaccagatttaatagataactgataatttttattataactcataccttgttttaaaaccaatgttttttatttaatataactctgctttctaggttattcgtctctatgaataattaagtcagcaactgtaaaaactacttcattataaagttaaagttccttgacaaggagcctcgcaaactcatagacaggctttccacagaacaaaaaatatcagcggttgtagtagaggattatactttaaaatcttcatttcagaaggaaatttgtcatattaatgagacactttaaaaagtgtcttttaaaaatgtttccgaactatgcttccaagtatttttaacagcataaagccctctttcatgctatttcgctgacataataattttcgtcttgaagaaatacatattgacggcctactcagtcaggctaggaagtgtcattgtatttaactctctaaattgttcctgacctttttagcaatctttactcaaaataaaccttgggtgtttgaagggcagagactaggttacgtcctcctcatctttgttatctaccagttcgtagtgaccccttaaatccggtgcttagactcactacttgctaaataacgttggcttcgttacataaacccactggcctgtttttcaacggtcagactggcgctgttagtccctgtgtcatgggattgctgtcaagggttcaacgagataatctataaacagctcttagaacgaacgctcaacgtgggatcattgttgtaatccctcaacgtgtgctctgaatgagaagccgagtgactgaatgaatgtatgaatgaaggaacaggtcagtaactggcggttcccgaagttggagccgactaaattaccccttcaagacgctaagcaaaagccactccgtcgacatcaaaccccacgccggagccggaagcaagagtagagccgcgggcggggccagcatagaggaagtagcgctctcggccaatacacagatcgcttggcaaacgagcattttcccgcgcctatcgtgaaagcgcgagaacacaggggattatcgcgaggttccgtgctcctctcccgctccctcttccccagctccctctggcgcgggttccgctccacccccggagccccgcccccgacgcccggcgctccgccccgccctcgcctggctccctgccccgccccgcccgccgtcccccgcttggcttccagcgccgcttgcgctccggagcgctggctctgctggcgctgaggtgagtagagctgtccgcctcgtcgggtgattcaagtggcgaggctctctgacccggccccccggcggggacgccccagacgtggtcctgccaaagcgtccgggt

SEQ ID NO: 14771 - DNA, 2300 bp, Homo sapien
ggacggctccgctgtcccactcgccgcgacccggacgctttggcaggaccacgtctggggcgtccccgccggggggccgggtcagagagcctcgccacttgaatcacccgacgaggcggacagctctactcacctcagcgccagcagagccagcgctccggagcgcaagcggcgctggaagccaagcgggggacggcgggcggggcggggcagggagccaggcgagggcggggcggagcgccgggcgtcgggggcggggctccgggggtggagcggaacccgcgccagagggagctggggaagagggagcgggagaggagcacggaacctcgcgataatcccctgtgttctcgcgctttcacgataggcgcgggaaaatgctcgtttgccaagcgatctgtgtattggccgagagcgctacttcctctatgctggccccgcccgcggctctactcttgcttccggctccggcgtggggtttgatgtcgacggagtggcttttgcttagcgtcttgaaggggtaatttagtcggctccaacttcgggaaccgccagttactgacctgttccttcattcatacattcattcagtcactcggcttctcattcagagcacacgttgagggattacaacaatgatcccacgttgagcgttcgttctaagagctgtttatagattatctcgttgaacccttgacagcaatcccatgacacagggactaacagcgccagtctgaccgttgaaaaacaggccagtgggtttatgtaacgaagccaacgttatttagcaagtagtgagtctaagcaccggatttaaggggtcactacgaactggtagataacaaagatgaggaggacgtaacctagtctctgcccttcaaacacccaaggtttattttgagtaaagattgctaaaaaggtcaggaacaatttagagagttaaatacaatgacacttcctagcctgactgagtaggccgtcaatatgtatttcttcaagacgaaaattattatgtcagcgaaatagcatgaaagagggctttatgctgttaaaaatacttggaagcatagttcggaaacatttttaaaagacactttttaaagtgtctcattaatatgacaaatttccttctgaaatgaagattttaaagtataatcctctactacaaccgctgatattttttgttctgtggaaagcctgtctatgagtttgcgaggctccttgtcaaggaactttaactttataatgaagtagtttttacagttgctgacttaattattcatagagacgaataacctagaaagcagagttatattaaataaaaaacattggttttaaaacaaggtatgagttataataaaaattatcagttatctattaaatctggtcttcaagagctattcaggtatacagcatggttggtatatgtcatgtatttctaagatagtttcggaatacctaagaattcgtggcactcagaaattttttgctggtcttaaaatgaggaaatccacattttgtgtaaaaacaaagatacggtgtttaatggtcagcccaaataataagacttgctgctaatatatgaagagttacaccccccaaaaaagaaaaaagattaacagtagaacagttttttgaaaacaatgttagcctcttagttttcatttcttttttttaatggggaatactgtttttcagtgattaatatctgatatttgatcatgaaaaatgaatcatgttaaaataaccttcacctcctccccacattgacacaaaagttaccaagtgattatatttgataatactttatgaccccactcttgaagttctcacaatttgtagagaatcaattcgcacgttttgtctctcttaaaggggaaaaaaatcctctaagctggtgatttcacgttctttgacaaacttcaatatcaacaggcaacgataccactttaagaaaattccaaggaaaagacctcattttaaaattcccacctctggctcccaaagattggtttgcaaacttcgacaaaatactcttctccactcgctattggtgagtgctctatcattcattcttttgcctggagttttgtgaggtacccgcttgctttatgggaaaaggctgctccggaactgccctactttagactttttcatggttatcaatctgtacaaagaatcaccaaactgataaagcaggaaccagagggcaaatcacgctgccaagacaactgtgtaattcgctcgaaaaagaaacggtgagcctctccagcagactgggtaaactggcaagggatttt

SEQ ID NO: 14772 - DNA, 2300 bp, Homo sapien
gaaaccccatctctactaaaaatacaaaaattagctgggtttggtggcgggcgcctgtaatcccagctactcgggagactgaggcaggagaatctcttgaaaccgggaggcggagcttgcagtaaaccgagatcgcaccactgcactccaacctgagcgacagagcgagactcagtcttaaaaaaaaaaaaatcacttccctatcccaaagtaattcccctggtgttctttcagaggaacttggctgtttgttttttcttcgtaggactcctcacaatttgtcacttaaatatttatcgttgcatctgtctattgtcaataaagccaaaaagcctgtaaataaacccttccgaaacttatttagaaatcctgagggcagggactgcgttgttttcttcacgcttgcatacctgcatctagcacagtaactaaaagtaacccttcctaaaacctaggtgatgggttgacaggtgcagcaaatcaccatggcacacgtttacctatgtaacaaaccggcatattctgcacatgtatccagggacttaaaattttaaagtaggccttctaatatctgatgacatgtggaagaacattgcaaggttgatttttcatccaactatgtcaagaccacggatagagcctataagcttgctacatgccacaaggatgtctaatctttacaaccatgcactgcaatagacattatgtagcccgttttgtagaggaggaaactgagtttctcagagggtaacatgccatagttccatcgcaggtggactgactacaaagcgtgtgcaccgccgccctataatgcaaaaccacactcactgaaggaagattcaataagacagtccctgtaacctgacggctttccttctgaatgttctggctgggattggctgcctcaaaaacaccattacactctgttaaaattgctacaaaggctgtttgggagataaaatctaaacaaatgaaatcctaaaactgccaataatagcaataaagcatcaacaatgctcacagttttgcagtatgcattcacgggccatacacagcctttaacaaggtaattttcttaccccatttcacttgactacatcttacctagttaagcaaactacctcttgtatagttatactacctcttatgtagttaaggcaaatagtattacttaatatcagctgtatacagctgcacttacacacgagctttctgacaggtgaacaccaatctatcttattattaaaaacaaaacaaaaaaatcaaaaacctctcaacaaaattccacacatattaaggagtattttgaaaggaaggagtcccttatactgacctccccgtactcaatttagtagaatacgcattccaatttcctaacgctggagattagagaactataagctacatattaaaagcatttgtaaaaggctattttctcagctgtggtaacaaacactggcagagtcttaggcaaaacacacgccgtttcgcccgagttagccagccactgagatcgttacagttgggaagcagcgagcccagcagcagggatttcacggacccggtatcagggttctcgggtcccaggggccgcgggccgcagagtgggaggaggacccggcagctgtggccacccgaggcccggacggctccgctgtcccactcgccgcgacccggacgctttggcaggaccacgtctggggcgtccccgccggggggccgggtcagagagcctcgccacttgaatcacccgacgaggcggacagctctactcacctcagcgccagcagagccagcgctccggagcgcaagcggcgctggaagccaagcgggggacggcgggcggggcggggcagggagccaggcgagggcggggcggagcgccgggcgtcgggggcggggctccgggggtggagcggaacccgcgccagagggagctggggaagagggagcgggagaggagcacggaacctcgcgataatcccctgtgttctcgcgctttcacgataggcgcgggaaaatgctcgtttgccaagcgatctgtgtattggccgagagcgctacttcctctatgctggccccgcccgcggctctactcttgcttccggctccggcgtggggtttgatgtcgacggagtggcttttgcttagcgtcttgaaggggtaatttagtcggctccaacttcgggaaccgccagttactgacctgttccttcattcatacattcattcagtcactcggcttctcattcagagcacacgttgagggattacaacaatgatcccacgttgagcgttcg

SEQ ID NO: 14773 - DNA, 2300 bp, Homo sapien
ggagaatgatttgaaaattaaagcattaagagatgcacttgggaagcttaatgtaacttttcagtgttttgaaagcaaaacctttatgattgccctgtgaaactcaaatgattttgaattgggctagcatacaattttttggaaaaaattttgccacaaaggcaacatttaatttgctctttttatgttctaagaataagcacgtagttttcattataatctgaattgtattacatataagataaactaaaagtttttcaagagaatgtccaaatcaagctttttattcctattatttattgtaaaatttggtctctgtattaaatggatttactttgtatggccttttctggttatcacttaaccttatttgaatcttgtacttgaattctagtgcttactcattttagatgatttatgaaatcttactactttgtgaatttacccattcttcattcccttccctatactggactttgctaaatatctggaaattgtatcttattggcttcaagtatatggcatgttttcctggaaaagttttatttaatctatgtacaatgcctatagtgggtagaaagcattataaaattagtttatctttgctctgtctggaagtaaatagatacgtatgtcttgttcttttgtgattggcatattggcatatatgttgaatgcctacttatatttctgaaattagatttttcagttttccaacttggaaaatctatttgcagttataggaatccttttttgcaaagtcatcatcccgtgctatgaaaccatattagtactttttaaccctttaacgagaagtggtataagaaatattttgacaaggattatagcctagattttcccatgtttgttctttatgtataaagaaaaatttgtgattggattacttattaactatctgccatagcccaatggggtagactttgttcagagaattgacctttgcttataaaagttaaatttgtgggcggaccacgcggctggaggtgtgaggatccaacccgggggtgagagggtggaggtggctcttgcgatcgaaagggacttgagactcaccagccacaagctgtgaaggccctgtgggtgctggggcctctgctgcgtcctgctgaccttcgggtcggtcagagctgttgatgaagttgatgtggaaggtacagtagaagaggatctgggtaaaagtagacaaggctcaaggatggatgatgaagtagtacagagagaggaagaagctattcagttggataaattaaatgcatcacaaataagagaacttagagagaagttggaaaagtttgccttccaagctgaagttaacagaatgatgaaacttatcatcaattcattgtatgaaaataaagagattttccttagagaactgattctgacgctttagttaagataaggctgatatcactgactaatgaaaatgctctttctggaaatgaggaactaacagtcaaaattaagtgtgataaggtgaagaacctactgcatgtcacagacactggtgtaggaatgaccagagaagagttggttaaaaaccttggtaccatagccaaatcttgaacaaacgagtttttaaacaaaatgactgaagcacaggaagatggccagtcaacttctgaattgattggccagtttggtgtcagtttctattccatcttccttgtagcagataaggttattgtcacttcaaaacacaacaacgatacccagtacatctgggagtctgaatccaatgaatattctgtaattgctgacccaagaggaaacactctaggacggggaacgaccattacccttgtcttaaaagaaaaagcatttgattaccttgcattggatacaattaaaaatctcatcaaaaatattcacagttcataaactttcctatttatgtatggagcagcaagactgaaactgttaaggagccatgaaggaagaagcagcagcaaaagaagagaaagaagaatcttatgatgaagctgcagtagaggaagaagaagaaaaacagaaaccaaagactaaaaaagttgaaaaaactgtctgtgaatgggaacttatgaatgatatcaaaccaatatggcagagaccatccaagaagtagaagatgaatacaaagctttctgcaaatcattttcaaaggaaagtgatgaccctgtggcttgtattcactttactgctgaaggagaagttaccttcaaatcaattttatttgtacccacatttgttccacgtggcctatttgatgaatatggatctaaaaagagcgattacattaa

SEQ ID NO: 14774 - DNA, 2300 bp, Homo sapien
gactcaccagccacaagctgtgaaggccctgtgggtgctggggcctctgctgcgtcctgctgaccttcgggtcggtcagagctgttgatgaagttgatgtggaaggtacagtagaagaggatctgggtaaaagtagacaaggctcaaggatggatgatgaagtagtacagagagaggaagaagctattcagttggataaattaaatgcatcacaaataagagaacttagagagaagttggaaaagtttgccttccaagctgaagttaacagaatgatgaaacttatcatcaattcattgtatgaaaataaagagattttccttagagaactgattctgacgctttagttaagataaggctgatatcactgactaatgaaaatgctctttctggaaatgaggaactaacagtcaaaattaagtgtgataaggtgaagaacctactgcatgtcacagacactggtgtaggaatgaccagagaagagttggttaaaaaccttggtaccatagccaaatcttgaacaaacgagtttttaaacaaaatgactgaagcacaggaagatggccagtcaacttctgaattgattggccagtttggtgtcagtttctattccatcttccttgtagcagataaggttattgtcacttcaaaacacaacaacgatacccagtacatctgggagtctgaatccaatgaatattctgtaattgctgacccaagaggaaacactctaggacggggaacgaccattacccttgtcttaaaagaaaaagcatttgattaccttgcattggatacaattaaaaatctcatcaaaaatattcacagttcataaactttcctatttatgtatggagcagcaagactgaaactgttaaggagccatgaaggaagaagcagcagcaaaagaagagaaagaagaatcttatgatgaagctgcagtagaggaagaagaagaaaaacagaaaccaaagactaaaaaagttgaaaaaactgtctgtgaatgggaacttatgaatgatatcaaaccaatatggcagagaccatccaagaagtagaagatgaatacaaagctttctgcaaatcattttcaaaggaaagtgatgaccctgtggcttgtattcactttactgctgaaggagaagttaccttcaaatcaattttatttgtacccacatttgttccacgtggcctatttgatgaatatggatctaaaaagagcgattacattaagctctatgtgcgctgtgtattcatcacagatgacttccgtgatacgatgcctaagaacctgaattttgtcaagggtgtggtggactcaggtggtctgtctttgaatgtttcctgtgagactcttcagcaacataaactgcttaaggtgattaggaagaaacttgttcataaaactctggacatgatcaagaagattgctgatgagaaatacaatgatactttttggaaagaatttggtaccaacattaagcttggtgtaattgaagaccactcgaatcgaacatgtcttgctaaacttcttaggttccagtcttctcatcatccagctgacattactagcctacaccaggatgttgaaagaatgaaggaaaaacaagacaaaatctgcctcatggctgggtccagcagaaaagaggctgaatcttctccatttgtttagcgacttctgaaaaggggctatgaagttatttacctcacagaacctgtggttgaatactgcattcaggcccttcccgaatttgatgggaagaggttccagaatgttgccaaggaaggagtgaagtttgatgacagtgagaaaactaaggagagtcatgaagcagttgagaaagaatttgagcctctgcccaattgggtgaaagataaagccattaaggacaagattgaaaaggctatggtatctcagtgcctgacagaatctctgtgtgctttggtggccagccagtacgggtggtctggcaacatggagagaatcatgaaagcacaagcgtaccaaacgggcaagggcatctctacaaattaccatgcgagtcggaagaaaacatttgaaattaatcccagacatccgctgatcagagacatgcttcgacgaattaaggaagatgaagatgataaaacagttttggatcttgctgtggttttgtttgaaacagcaatgcagcagtgattcggtcaggatgtcttttaccagacactaaagcatatggagatagaatagaaagaatgccttgcctcagtttgaacacatcctgatgcaaaggtggaagaacccgacgaagaacctgagg

SEQ ID NO: 14775 - DNA, 2300 bp, Homo sapien
tcagcctaggatctctttccatatcattgctttctgcatatttgcctgtctagcctttccaaaaaacatcctttcatcctttaagaatcttcgggagatgtcatattctcacaatagcaagtccaggctcctctacccaatatttattatcattcctgtctccaccaagctctctctctctctctctgttgaatttattttctgctcttctcccattggtgtctctgtcatttgctggtccccaaagagcccattgtgcaagctgtatgtagtttttcacctccatgcttttcctcatggttttaaccccccgccatgccctgctgggaatgctttatgcattttctttgtgccttattcaaattcccatctccaaattcagattttggaagagtttctccaagccttcacataaccttctctgagctcctcttgcacctcgtcggttgtgtgtgatatgcttctcaatggcagaggccttgtctcatcattgtcttgacacgggctgtggtatgtctgggattggttactcttctctcccacatagtcattttttgatttttaaatttagttctttttcttttttctttgtatttcttcttatgacttataaaacacgatgattcttcctcatattttatccccacacccctgaaatcagaagcatttttgttttgtgaaagagatagacaggcttagcaaggtggagtactatgccagtggagccaagcgtgaaattgactctcctatgcaccagttaagttcaagtagaaaactccctttcagagtcacaggctgtatactgaatcctacctgcccgctccactgcagatgtatattttgttcagtattgaggaaattgagcagtaacgtatgaacttcctagcacaaattcgtaaatattagaaaaataactacaagttagggtattttggacttgtattacttttataaagtaaaataattattttaaatcctcctactaacaaaaagtctatagcaaagatcagcaaaccttttctgtaaatggccagatagtaaatatttttaggtgttgcaggccacatatgttctctgtcacatgttctttgtctttattgttgtttaccatcctttaaaaatgtaaaaaaccagtttcagcttgcaggcaggacaagagcaggccatgggctagatttggcctgtgagccatagtttaccaccagctggtctgtagcaatgagaaaaactaatctgtttaattgagcatccaagacggcagaagactcttacccagtagagaagacattgctaatactaatccaagtgttgtacaaactggaatgtgcacagaggggtactgtcaagtggtagagcttgggaaaccttaacctaggaggaatgactcgggaacagggacaggatgagagaaggggaaaccttaacctaggaggaatgactcgggaacagggacaggatgagagaaggcaagagatagtatcacagtggtcttcaacgtctcagtctccatgatgtgaaagtaggcttgtcctgcacagtgctgactgtaggtcttcagtgtaatgtgctgacctgggaaacagtaaatgtccttcccctaaaatggtgattttccctgagaaggactaagttccttgtaaggaacttcctaatcttcactcaagtcttaagtgatttgatgtatgaaaaggacctaattgtactctccatggaagagatgacaactgtagacatcaatgatgagggaattttggagtaaatggaagtatttaatttgggaattaaagtaagtctttatagggtatgtatactttgggttttttaaaaggtgccgcatgcctaaacggtatctaaaaatgttagttaactgtatctcattttattgttacaatctttaccatggtgaaaatttccaaaagacattctaatttctactccagaaatctgtttagctcatatgaacaagttgcacttacttcattgctattattcataaatctcctattttcttcttagatggatggtaaaatcacacaagtggcaaaaaccaggttccttgaaatgactgtaattgttcttttctcaccctggcaacaaacttgactcatcaagatgcagaagccatagtgacagacttctggttcagactcaccactttgtgtctctttttttctccatgctacccagcccttttctccatttaagaaatgttggcagggtaatttaaaaacactcacctagcttggattatttgcattttcaccaaaaatcctgcacttcagcattcatgtttatgggaa

SEQ ID NO: 14776 - DNA, 2300 bp, Homo sapien
gtgctctttaaggtgatgcaaacactcttttcatttctgctgtggctggactcatagttgagttctctgcttgacattttgagggtaacaatagcattggaatgggtaagggctgggcagtctgagctgagtcttctgtgcctcaggaggctcaatttctggaagggtgggagccggagtggagcaataagggtgaaaacatcttttggaacagtctgttttcattgcctcttcttccagggtgacagcaggtggcaaggagagggccactgatcactgtgcccccactccagaccctaagttttaaaggataagtattaaactcttctcgtcctcttggagcagaagagccaaatccagccggctctgcagcttctggcaggttaaaaagcatgcatttccacatgacttgctgatttacaccacattttgacatgttttaaaaacctccctgcagttccttttgctggctcccctgaacactggtgttgtggagctctgagcagagctccaggtttattttctggcgtctgctgtctatgtgccgcctttgttttgggctctccccagcacattgccccgttgtccttgagggaggaagccagccagtctctggcttcctttgtaacttcccagttcctccactcacagcctctgctcatctgctcacccaccccaaccactttgttttaagtgctgcgggattgaatttctcatcttcaaatgcaaacaaccatttggcttcgtgtccattacacaggcacctctgggggcacatgcaggcactgtggccccgaaaaactcttcagaggtgagcggctttcaggatgagagggccaacaatggctcatctcctaaagacctcgataaacataatcagtagccccagaaaacacaacagctgtcccaagcctatcccctttgcacctatctcagaaaaggcaacatgcagagtggtcaggagttcaagtcctcagggccctactctgaagctgtgaccctgacaggtcactttagcgctcagcttccctttcctcatctgtaaaatgggaatagaaactgaatctgcttcatggggccttgtaagtattacataagctgtcatatgcaaaatgtccatcacatagttcaccgccccaggcatcctagaaactattaagtcacgataaggaggttgctactgtcctgggacctggggagctcggctgtccagtccgaaagggccttctcgccctcgagaccccttcaagtccctttctctccgggcccgggtcccagagtccccttgtgcttgctcctgagggtgacctgcccgtgccccggggcgagcacaggtgcggccctggccacaatgcgggcgtggcgagccgacacccggggaggccaagggcgcctcgagggagggagggaggaggctgacccgggcgtcccgaaggacccgcccggccccggactccgggcggcagccggcctcgcgccccgcccccgccccgggagccccgcccagtcccgtcgcgccgcgccgccccaccgcccgggttggctgccctggaggccacgcgcggcgatttgccacgcgccgcgtcaccgggccgctcccggcctgggctcccgggggctggtcagggaggtggcggcggctgagcggcggagcgggggcggcagggcgcgacgccgccgggccgccccgccctgggaggcgcccgggccctcatcaagtgaccagtatcccttccaggggaacacggtccttcagaggaaagcgagctccaacccgcggccccggcgccaagccgccgtcatcttcttcctgtgccaggtgatcgtctcctcacccacccggaaaaacatagtccgcccccacgtccttgtggaatagcgcccgcttccaagcaccgtgactctctttgccctacccttgtctttcccattccaattactctagaacccaccgagaggataattcagtcctgaaaagaaactgatggggagaagcgaggaagggaacccaggagggaggggaggcagggctgcggagggacaccgaggcggcggaggtagtgcgcacgcgcagcacagaacgagttccggtctggccgaggcttgtctcctaaaaatagccccggtgtggggatccgtgcgcggatgtcccggcgagtcccgggctgaaagaggcggctccgggcggcgcgaagcgctggtggcgggcccgggctgcggcgtgtgcgcgcccgccagctgctccggagatacggtgagggccgcgggcagcggggctcagtccgcgacgccggtagtgc

SEQ ID NO: 14777 - DNA, 2300 bp, Homo sapien
ctgaaattggtgttttaaagtaagctccttttacctttgcaaaaaaaaaaaacttgtttatgtgtttttatgtcttttacagtttgggtttttaatacttaatttgttagtataaaaagaatacttggcagtttgtgtttttcccgcccccagaggaggtgtccgtttccaaatagaaacaaaatcagggtcataataattaatactgctgaatcagattcaaaagattggtgtttctgtggataaattaccattttcatttgatgaaatggatttacttggggattggttgaatcaccggatcatgcaattctaaattattgtgttagcattataattgatcctggccaataggagcgaggagagagatagctttcctttttctacctgaatgtcctgctctatcttcaagcaagaatgtagcagggctggattattgtttgtgcacctaatccattgagcagtgttcactagttgttgcgagaagtcagggaccccaaacggagggactggctgaagccatggcagaagaacgtggattgtgaagatttcatggacatttgttagttccccaaattaatacttttgtaatttcttatgcctgtctttacttcagtctcttaatcctgtcagctgaggaggattatatcatctcaggaccctgtaataattgcattaactgcacaaattatacagcatgtgtgtttgagcagtatgaaatgtgggcaccttgaaaaaaagaacaggataacagcaatgtttaggcagcaagagagataaccttaaactctgactgccggtgagccgggtggaacagagccatatttctcttctttcaaaagcaaatgggagaaatatcgctgaattctttttctcagcatggaacatccctgagaaagagaatgcgcacctgggggtgggtctctgaactggccccccgggtgtggtcgtctcttatggtcaagactgcagaggtgaaatagactccagtctcccatagcgctcccaggctcattaggaagaggaaattcccgcctaataaattttggtcagagaccagttgatctcaaaaccctgtctcctgataagatgttatcagtgacaatggtgcccgaaacttcattagcaattttaatttcacctcggtcctgtggtcctgtggtcctgtgatctcgtgatctcgccctgcctccacttgccttgtcatattctattaccttgtaaagtacttgatgtctgtgacccacacctattcgcacactccctccccttttgaaactccctaataaaaacttgctggtttttgtggcttggggggcatcacggaacctaccgacatgtgatgtctcccctggacgcccagctttaaaatttctctcttttgtactctgtccctttatttctcaagctggccgacgcttaaggaaaatagaaaagaacctacatgaatattggggcagattccccgataactagtgttcctttattaatgtgaatcatagacagccatcagtcttctattcatttttgtagttttgtgttaatttcattgttccctttaaaatatagctagctagtgaaaattacaaatatacacattgtattgaaatacaggtatattttatggtgataacaattatttcacaattttcttgatgaaaacaatatggtgaacattttaaactatttaaaacaagtttagtttattgaaactagtaagttcaataggctatacgcacagtacagataaatataaagcataacatgatacagaggataggaaaatgggacctaggaaaccaatttttgaatctcgcgatgcaaagaatattactgaacatttgagtaatacttcctgaagaaaaaggattcgtaatagtagagatactcagttggctgacgttttgttttattccaaataaatgactttttaaaatttaattttcatttaacagtatttgtggagctttctgctaggaatggtgttgagtgctagaattttgtataatgtatatttaattcagctttggagtcaagaacaataatgcatctcaaatttttttcttttttaaggaattgcattttgtgaaaaaagaacaagaattttctgcaaggatcatatctaagtgcactttttgctgatacttcatttctagtaagacattttttcttttctatgttaagtagatacaatggaaatgtattttaaaaatcaggctgttcttgtgagattgaatggcagttattttagaggttttcttgggggcgaggggggcttaatttagacccagttgaggaaa

SEQ ID NO: 14778 - DNA, 2300 bp, Homo sapien
tctcttgaaagctctgttaactttctcagtctctcgggcagtagttttggaatctacaggcagatgagtccagagactggtctcacctatttcttccagatctccgccctgcagattctctagttttgaaagttctctagtgtataaaacagattatcttgtgtttttcttttctagttgttctcaaaggaaggttggtttgaagcaaactactccaccattgtcaaaagcaaaaaatgcccaaatatgttctggaattaagaattttttaggtgatataaggtagtacactgtatccatcttacagccattaaaatatcttgcatgccttagcgatactgtctctgtagtaaaatgtattaatatttctcttgcctactacagtacaagtgtttatattgggaattggatacaatgtgatctgttaaaagaaatattctacaacacagcctgtttgattgggccccacgagtgactagccatctttcagttcctctaatgtttcctgttcccttttgtcatggggcttttgtacatgttgttctccctgcctaatatgtatatctcatactcgagtttgagtatgagacacatcctcaggggagcctttcctgaaccataaatttaattcagataaatgaactttctagtttggaattatgcaaactcatttgcattatggtttgattaatgtctttttcttctactagactctgaactctgctagattaggaatcatatccttttttttttttctgaccatgttatcctctgtgcatagttcagtgtttggaagtacatttattagaagtaggtgaacaattaataggttatcagttaatagatgatcaactactgtttgtatcaatgaagaaataaaataatgagggaagataaataagaaatgctgtgctgatgttagtgctggaaatgataagaaacgaaaggcttatagcttttgagcaaaagccagatttaatcacacactggatttgcacagtacaattgaagttttattgatacacatgtacagtattgaaaatacttgcataaaattcccatgggaatgtattattatgactgttgtattatagcattcatgcccccatctcctcgtatttttattatgtaagtctgaaagcactaggtttttaaaatgacacagccatcattcagaacatgacaaactatatcatttccagtcatcctactacacagaataaatggaataaaaaacgcttgaaagattttttaagtcttgaaggaaagcagacttaaaatttatacacacacacacgaaggtgctgtggtttattctaccaagggaaattgattttcacttcatctggaagtgcaaactgaatcttgactgataaggaggtgttcattaaatggccaaaggaatgtttcatttaaatgcatatttttacgaaagtatatagtggctttgtgaattgacaaatagtgatttggctggaggctagggcaatttgcaagaatttgaaaagacagattggggctatccagattagttcattgtttggtatggaggtcatcagaagtttttaaggatattctgtgttgtgaagaacagaagtgctggaaccagattccctgagtttataaccccaagctctgccccttactacgtgaccttgggcgtattgcttaatttttctgtgtctcagtgtctctatttataaaatggaggtaataattatagattgctattaggattgaatgagttaagacatgtccatgcttaggaaaatgtctagtacatagaagaatctcagtaaggcttggctcttgttgctattattgtatacattgagaaaacctcaaacattattgttgcattagtttaaccagaactagagacacaaagagattcaagaggtattttaggggtaaagttaacaagacttcaacttatttactaattttgtataaccagaaatttcaactaataatgctgtgtgcagtgtaaaagcaaatttgaaatttgtataacacttacatgatttgtaaacttacagattttaaatcttctaatttgtgttttcttttagatcttgtagaaaatttcagctgtagcccttggactagaagctgaaataacagaagctgtgtacgatgcattagggtattgaagaaaattaacttttgaattaaatatttggaatataaggaaataaggaaagttgactgaaaatggggcggaagaaaatacaaatcacacgcataatggatgaaaggaaccgacaggtaaatgaaaattttaatttatttaattgata

SEQ ID NO: 14779 - DNA, 2300 bp, Homo sapien
tctatctatctatctacctacctacctaccaataggagatatctgtctatctatctatatatctatttctacctatagagagagacacaaagtgagtgagtgagagagaggagattagacttggctcacacaattaaggagactgaaagtcccgggacaggtgggtctgcaagctggagaccctgggatgcagataatatggttcagtgcaggtccaaaaacatcagaaccagggaagctgatgatgtcactctcattccaaggccagagtcttgagaaccctgggggttaggggagggtaagtcctggagtccagaccattttgggctttgtccacgaagattaacaatttgacttttagtttaagtgggtgtattagtccgttttcatcctgctgataaacacatacccgagactgggcaaaagaaagaggtttaatggactcacagttccacctggctggggaggcctcacaataatggctgaaggtgaaaggtgcatctcacatggcagcagatagaagaaaagaacttgtgcagggcaacttccctttataaaaccatcaaatctagtgagactcattcgctatctggagaacagcacagaaaacacctgctcccatgattcaatcacctcccaccaggtccctcccacaacaggtggaaactgtgggagctacaattcaagatgagttttgggtgtggacacagtcaaatcctattagtgggaaaaggtttgtgagatcttgttttaatgtttgctttgttgtttaatctgattgcaagtgagggttaaaaacattttcaacctgttgaccatttgcattgtttgctgaattatctgctcctgtctctctgaggtctccctcagacctgctgaggtcttagcatctttcctattcatatgaagtctctctcagcgaaggattttaatcctttgttgtgttcagtttattttccctaggttatctgctttttaattttggttttcctttttaagtagaagctctgaactttgtgccttagtgtgtgaggtttttgtttttgtttttttttgagatggagtctccctctgttgcccaggctggagtgcagtggcacgatctcggctcactgcaacctccgcctccgggttcaagcaatcctctgtctcagcctcctgagtagctgggattacaggcgcccgccaccatgcccggctaacttttttatttttttttatttttatttttttagtagagacggggtttcaccatcttggccaggctggtctcgaactcctgacctcgtgatccaccagcctcggcctcccaaagtgctgggattacgggcgtgagccaccgcgcccggccagtgtgtgagaattcttccaccacttttcatcttaagaaatcctcggccacctgacatttgataaacacgacttaagttttcttggtccctgttgtccgcatccatgttttacactcgtggatttctgttttcttctcggggtggggcaatgcctcccctggtgcggccctcaaaggcccaggagcgcagatcccgccgcagaaagacccctcgcccatctgcgcccagcccttccccgcaggagggctcaggggaccccacgctactggaatccaccccgagtcacagctacagatcattacccacaagtggggtcaaaggcctctttacgggcgagaaagctgcggctcagcagaaagccaagcactttgggagggaggagctgaggtgccttattactccgaacagacgcgaaaacaagccagggcccgcgcgggtagacctggtaggcgggtgggcggggcgagggccacttccggggtgtggaaccctgtcgagccccgccccgagccccgccccgagccccgccccgggccctgtggtcccgggatgagctctccgcgcagccaggctcgctccagtgcccgcccagcgctgacttcattggctgcctccccagtcccgcccccaggggggccctgctgatgttcgtagccaatccgcaggcgcggtggcagctgcgggtcgcgggtcgcgggtcgcgagtcgccggtcgccggtcgcggcggagcctgggcgctgaggtaccggggcctggacgagggggccgcggtctggctagggagccgcgcgggctcatggcggtacggcgacctggcctcgctcgagggttcgcgggcgggccgcccctccccgggctcctagggggacgctccagctggaggggcggtgaccgcgactgtcgtgggctggccccaggtggctagggttgggggtcagaggtcagag

SEQ ID NO: 14780 - DNA, 2300 bp, Homo sapien
ccgataggagatatctacctatctacagatacagagtcaagtcctccagagagacagaactgataggagctatctaatctatctatctatctatctatctatctatctatctatctatctacctacctacctaccaataggagatatctgtctatctatctatatatctatttctacctatagagagagacacaaagtgagtgagtgagagagaggagattagacttggctcacacaattaaggagactgaaagtcccgggacaggtgggtctgcaagctggagaccctgggatgcagataatatggttcagtgcaggtccaaaaacatcagaaccagggaagctgatgatgtcactctcattccaaggccagagtcttgagaaccctgggggttaggggagggtaagtcctggagtccagaccattttgggctttgtccacgaagattaacaatttgacttttagtttaagtgggtgtattagtccgttttcatcctgctgataaacacatacccgagactgggcaaaagaaagaggtttaatggactcacagttccacctggctggggaggcctcacaataatggctgaaggtgaaaggtgcatctcacatggcagcagatagaagaaaagaacttgtgcagggcaacttccctttataaaaccatcaaatctagtgagactcattcgctatctggagaacagcacagaaaacacctgctcccatgattcaatcacctcccaccaggtccctcccacaacaggtggaaactgtgggagctacaattcaagatgagttttgggtgtggacacagtcaaatcctattagtgggaaaaggtttgtgagatcttgttttaatgtttgctttgttgtttaatctgattgcaagtgagggttaaaaacattttcaacctgttgaccatttgcattgtttgctgaattatctgctcctgtctctctgaggtctccctcagacctgctgaggtcttagcatctttcctattcatatgaagtctctctcagcgaaggattttaatcctttgttgtgttcagtttattttccctaggttatctgctttttaattttggttttcctttttaagtagaagctctgaactttgtgccttagtgtgtgaggtttttgtttttgtttttttttgagatggagtctccctctgttgcccaggctggagtgcagtggcacgatctcggctcactgcaacctccgcctccgggttcaagcaatcctctgtctcagcctcctgagtagctgggattacaggcgcccgccaccatgcccggctaacttttttatttttttttatttttatttttttagtagagacggggtttcaccatcttggccaggctggtctcgaactcctgacctcgtgatccaccagcctcggcctcccaaagtgctgggattacgggcgtgagccaccgcgcccggccagtgtgtgagaattcttccaccacttttcatcttaagaaatcctcggccacctgacatttgataaacacgacttaagttttcttggtccctgttgtccgcatccatgttttacactcgtggatttctgttttcttctcggggtggggcaatgcctcccctggtgcggccctcaaaggcccaggagcgcagatcccgccgcagaaagacccctcgcccatctgcgcccagcccttccccgcaggagggctcaggggaccccacgctactggaatccaccccgagtcacagctacagatcattacccacaagtggggtcaaaggcctctttacgggcgagaaagctgcggctcagcagaaagccaagcactttgggagggaggagctgaggtgccttattactccgaacagacgcgaaaacaagccagggcccgcgcgggtagacctggtaggcgggtgggcggggcgagggccacttccggggtgtggaaccctgtcgagccccgccccgagccccgccccgagccccgccccgggccctgtggtcccgggatgagctctccgcgcagccaggctcgctccagtgcccgcccagcgctgacttcattggctgcctccccagtcccgcccccaggggggccctgctgatgttcgtagccaatccgcaggcgcggtggcagctgcgggtcgcgggtcgcgggtcgcgagtcgccggtcgccggtcgcggcggagcctgggcgctgaggtaccggggcctggacgagggggccgcggtctggctagggagccgcgcgggctcatggcggtacggcgacctggcctcgctcgagggttcgcgggcgggc

SEQ ID NO: 14781 - DNA, 2300 bp, Homo sapien
ctatgaaaatgtttttttaaaaaattagctggacttggtggcttaggcctacagtccagctactcgagaggctgaggtgagaccacttgagcccaggagcttgaggctgcagtgagctgtgattgcaccactgcactcccgcccaggaaacagagagagaccctatctcaaataaatgaataagtaaataaataaaataataaaataatgcatgcaattagtacactagtacgtgatcaggcacatgataactgctcgataaatggtagcctcagtaaactttataatgttttaaaggagaatgtcctttggactcagcccagtgacagagcatttgaaaagactgatttgtatgatggctatttcctacagatacaagactgtacctccagggactcaaggcattggctcaatggggcaccttgttctgtttactcttgttttggtcagcaccgattgccctagggctaagcaggactgccaccacagactcagttgccaagagtatccccctccccaagctagccatgggaaagccacttgcatcgtaagactacaggaaatcaaagggaataaaaagcacaatttagtcacctactctccagttgatgggcaataggtttttgctattttgaacagagctgttaggaacattccttgtccacatcacctgttttatataggcaagaatttctcttccatgtagagtagaattactgggctgggaggagtgtgaatattgaaccttatgagatggagccaaactgttttccaaagtggtcataccagtgtatactcccagcagcagttcttaagagatctcaggatgtctatcttctggtgatttcacaagcagtcaaaaagaatgaaggccagcaataaacaacaataagaactttagcaatataatattgtgagaaaaacaaattccaggaggatgcatacagaatactttatataacatggaaaagaaaatgtatatatagacccagcatggtggctcatgcctgtaatcctggcactttgggaggccaaggcaggaggattgcttgaggccaggagttcaagaccagcctgggcaacatagcaaaaccctttctctacaaaaactagaaaaattagccaggtgtggtggtgcaggcatgtagtcctagctactcatgaggctgagatgggaggatctcttgagtttaggtgttcaaggttacagtgagcccatgattgcaccactgcactccagcctgggcaacagaatgagaccctgtttgcaaaagaaaaaaacaagtaaattaagtaaaatttaaaaacaaaatgtgggctgggcacggattctcaagcctgtaaccccagcactttgcagggccgaagtgggtaccttatgaggtcaggagttcaataccagcctgatcaacatggtgaaaccatgtctctactaaaaatagaaaaattacccagggtggtggtacgcacctgtaatcccagctactcaggaggctgaggcaggagaatcacttgaacctgggaggcagaggttgcagtgagccaggattgtgccattgcactccagcctgggtgacaaagcaagattccatctcaaaaaaaaaaattatttttttaaaaagataaacaacattgacaaacaaaaggaaacatgacaactgataccacaaaaactcaaaggatcactagtggctattatcagcaactatatgcaaacaaataggaaaacctactaaaaatggatgaatttccagacacatccagactaccaagactgaaccaggatgaaatccaaaaccagaacagaccaataacaaataatgggatcgaagtggtaatgaaaagtctctcagcaaagaaaagcctgggacctgatgattcactgctgaattctagcaaacatttaaagaagaactaataccaaccttacccaaacgattccaaaaatagagaaggagagaatacttccaaactcattctacaaggctaatattaccctgataccaaaactaaagatacatccaaaaaagaaaactacaggccagtatcactgatgaatattgatgcaaaaatcctcaacaaaatattagctaattgaattcaacaacacattaaagttggggtgcagtgtcccaggttcactcaacccttcccgttttcttgtctgtgtgtgtctactttgctctgttccctggtggcagcggcggtggcagtgttggtgcatgggcctcccaggacaaggggaaagtgagtatgccctttttttgcctcctgccaggcatctgcagcctggcgcaagc

SEQ ID NO: 14782 - DNA, 2300 bp, Homo sapien
gaatctgctgagttttccaactagtttatctgctgtttgcaatgaaagacgccctgaaaagaaggggtgtgggtgggaagagttctgatttgaggtgccctgatccggcacgatctccttccccagtcacaggaatcagaggactccatctgtaaacacagcctcaagctctgtcccccaaccccctctttcaaccaggtgccaccctctgcttctcttccatagacagcctaggctgccagcattcccttaggatctgtgccctcgggcctagcttaattttttcctctccaaagagccatctgtagggccagaagccagcaaagcctaactcattactggacggcagttcctctgcctttcactgattcctaccttaccctggggttttacgtttcttgtctcaacactaacatttctcactcctccacaagttgaattgctcactccagccaactgaagcatgctcttcttgacacagttagctctcggcacatggtcggtgctaaaaaaaaaatgatcattatgtcaatttcattgatcaacaaaagtgatgcctccactgcaaagtcaagttgatagtgcctgggcctctgagttcaagagccttctagacaaagcgctctgagctgaaacatgagcatgcacacatatgcatctctctcggtctcatgagataatctggatacttggttgttatccttgagcattttcctacctcattaatgcacgtgtagccaacacaataattatcatagctaataacggctaaagctgaggactttcctgagccaggcagtggctttaaaaactttaatgttttcacatagactctcattgaataatttctgtttttcagatcaagaaactgagacttactatcacatttgggattaagtttaaaaaaaaaaaaaagaaactgaggcttaaagttgtctagtatttcacagccagcaaatggcaaagttggaaattgaaccaggcagtagagccccaggatcctgtgcctttacccattacctagtgttggctacacaaaactagtgtgtacacaacttcaactatagtttaagctatagtttaagtgggtgacatatttttcactacattttatgtaggtgactttcagtttgggggtattctacttatgcaatctattgaggtggatattaactgagaacaaatagaaactaatgaactctgaaaaacataaaacatgagcaacatgatgtcaccgcaaaacacaaaacagcccacagccttcttgtgactgcattttgctgacagtccacgacctaataatcaacctgaactcagcagtgctctgttcccttgggagacacacacacacacactcgggagaaacacacacactacagttggtggttgtgccgccctgagcctccagtaggcgagtgtgaggaatgtagggactagatgggtcgggcagaaaggtgctgggtcaaggggaggagggggcagccgggagcgcgcgcacgctctggactcgtgcaaccgccaaaacgggtgcgcgccgggttgaggggtgacagggaaggtggcagggttggggcagccctttcccaggcggtagcggggacggtggtgctgttgtcctttttctttttcttttttttttttttttgagacggagtctcgctctgtcccccaggctggagtgcggtggcgcgatctcggctcactgcaagctccgcctcccgggttcacgccattctcctgcctcagcctcccgagtagctgggaccacaggcgcccgccaccgcgcccggctcattttttgtatttttagtagagatggggtttccccgtgttagccgggatggtctcgatctcctgacctcgtgatccgcccgcctcggcctcccaaagtgctgggatgacaggcgggagcccccgcgcccggctaattttttgtatttttagtggggacggggtttccccgtgttagccgggatggtctcgatctcctgacctcgtgatccgcccgcctcggcctcccaaagtgctgggatgacaggcgggagcccccgcgcccggccgctgttgcccttttaagctgaggcttgacaggagccgcccctcctatcggtggcgtcggtcgcaaagggagcagcccccgaggccgccgcgcagctccccgccgaggcctcggtgccccttcccattttccatccgcgctcccacgaaggttgaggcggcggggagaggcgaagccgcgagcgctcggccgggcggtcccgccgggtggtcgcagccatgacagcggctccccttccgcg

SEQ ID NO: 14783 - DNA, 2300 bp, Homo sapien
agagaaaacaacggtgctgatgaggaattgaaccacctaacctgcagaaacccactggatggtttcctaggttccgagttggcattatctttcagagtgatttctaaaagagatcacataatactgttacaaaggatctggagaaagggacccttgctttatctctctggctctccagtcatgctttacattttcacttcttacgctctctttcatatgaaatcaatttacagacttccttcaagcccttagagacctttttgtactatccatgacaagttcttgatgtagctctgcacttttgacaaattcttagcagttaactttcaaggcagttaagatttctgttcaagcacgatatagctagaatagggtcatatactcaataaaacaaatatttaccaagcatttactgactggaagataaaaagcacaaagcataattataaaatattttcccctgccaccataaaaaaaaaattaaaaaggcctacagaatatagcataacatgaccaaagcaaaaacagtgaggaccaaagaggggaggaagggaaaatatcagcatgaactgaatacgacccaggagagccttgatggtcagacatgtaaagacaaattgggtagggtgaaggggtggaggtcagggacgcatcctacaggggaaaaacagctcacacagaagcctgaaaggaaaagcgcgaagacacctgtacgggactcttacctgccgccttgactgtacaatgagcccttccagaacacagcagcgcgcggccaggccccggggagagggatcgctcaaacagcaccagaggctgcattccaacttttcctccgtcaacgaggccgttttcattgttagtttctccttaaacacaaacttaaaaacaactggcttaaatctactatcgcatcttgcgtgatcatgtttgtgccttacagtgacaggctgcaaacgatagaaattcaacccaaactgtcacaagaaaagaaggaaaggcttgtaactacttaaacatattgctaattaaagatgtctggaaaattgactcaaaaacaaaaacaaaaacaaaacaacaacaacaaaaaattggccgaacacgcgggaacagggaaaacctgactgaagaatgaggccttaaaacttaagggccttgggtcccggcgcggtggctcacgcctggaatcccagcactttgggaggcagaggtgggtcatttgaggtcaggagttcgagaccagcctggccaacacggtgaaaccccctctctactaaaaacacaaaagttagccagccttggtggcggggcctgtaatccagctactggggaggctgaggcaggagaatctctttaacccgtggactgtcaagggacataggctgcagtgagccgagatcccgccactgcactccagcctgggcgacagagtgagactgtctcaaaaaaaaaaaaaaaagaaaagaaaaaaaaactttttttttttttttgagagaagtctcgctcttgtcccccaggtttgagtgcaatggcttaatctgggctcactgcaacctccgcctcccgggttcaaacgattctcctgcctctgcctcccaagtagctgggactaaggcgcctgccaccacgcccggctaatttttgtagtttttagtagaaacgcggtttgaccatgttggccacgctggtctcgaactcctgacctcaggagatccgcccgcctcggcctcccaaagtgctgggattacaggcgtgcgccaccgcgcccaggcaaaacacgcgagcatctcagaggccttttcccttccgcgcctgggctcaaacaacgctggagcgccccgccccgccccgtcgcggtcccgggagcagtcccgctgactgagggcgaccatgggtcccaagagggctccggccgccgcgggctcccacctcggtgcgtggcgacggcggccaagaggggccagcggcccccgagtcagccccgcgccaggagccggagagacgcgccctccgcctcctcccacccaagcctcgcgcagtcccgggggcggggcggggccagctgagggaggaaggggcggggacccggggcctctacccgttaggctgccgttggtcccgagactcccccatctgcgcccccgccctgccctgcgaggccgccgccgcgcgccccaccgtctgttgcagtggagcgtgagccgcggctgcggctcctggttcttgtggaaggtagacgccagcaacttcagcttggccttaaccctgacagggacatcttccctcatctccggcgggag

SEQ ID NO: 14784 - DNA, 2300 bp, Homo sapien
agcgacccttgggactgcgtgtcacgagttcggcggtggctggcgcatcttgtttgcatagaagtccctgcaggtctggcagcagcgctggtaccaccgcatgtcctggcagaggttcttttctcggatgacccggcaatataccgtccactggtctcgtgtgcatttgtaggtcagagcagctaaggggataggagagagaatacccagggtcagggatggcctaggcatgtcctgatgcaggcacagggagggcttgtggtctgaccgtctgggctccctcaccctcgtgcacacgtcaaccctttgcactgattaggccatgcctcctgccagggcactgggggtgccactttctgtcacagggatgcacctttgcatccaaacccaaccacatgacagagtgtggtggtctggctgcctcttcagggaagagggcacaggccaccttgcttccgagctaagtggcacttactattttgtggccaagggtaccattactgtaggcatttataaaacaggacaacatggaacagtggacatcaaaggaccccaaaaagcatgaggtccaagtacatacaagtggcccaaatatccttcagggtcttgattgtacagagagaaggccctgctcaagggaggtcctgaagttcccaagcaggccggtgcttgaaaagacacaactatacttctgccagctcaaaggcctcccccggaacaaagatactagaaatccccttcattttggtgagtttccagcctcaggtaggaaaatatttctcagggacttgtatttagcaaagcagaaactctgttaaaaggaatcatcatatcattgttttttgttgagatggagtcttactctgttgcccaggctggagtgcagtggcacgatctcggctcactacaacctctgcctcctgggttcaagcgattctcctgcctcagtcacctgaggcgtggggactacaggcacacgccaccacgcccggctgatttttgtatttttagtagagaaggggtttcaccatgttggtcaggctggtctcgaactcctgacctcaggtgatccacccatctcggcctcccaaagtgctgggatttacaggcatgagccaccacaaccagccagatctttaagtgctcttcttctccttgtatcaccactgacctggggcatgaactggtaagaggccaggttccgagcacccagggccaaaccactcacacagtctgcagcccctccaaccacgcctgtctgctgctcaagcatcagcctggggtgtgccccatgtgtgcatcctcatggcatcatgaaggatgcccctggagctttcatttctagaaagaagcacttcccttcacattcctcatgcacaggaaacctacagtgtctgtggaacattctcctgtgttgggcaaaggggtgagggagacgctcaggtgcctgtgttggagacagcagtaagcaaacaccacttccataacaaggaatggaatccatctctgaaacctcttctacagaactgacaaatgtcagccttatgtgacaagtgaggcccaagaaggggctttctggctgaaagaacctcaccgtcagggaggacttactgggcaggagacacagcagccccctgggaaccggggccagtgaagacactcaccaaggcggggggaggtgatggtgttggcgttgatcctgtcgttgcagacctcctggtagcactgtctgtagggggcaggcttcgagagggcggggcactcgctgccgtggcgccctgtgaccttgtgcatgcactgcaccacccgggactgcaggcccttcccgcaggtcgacgagcactgcagagacaggacagcctgagtggggctgacatgaggtcaagggactgggatgatggcctcacaatgtggcactgcggagacaggacagcctgagtgggggcctacacgaggtcagggggctgggatgatggcctcacaatgtggcactgcggagacaggacagcctgagtggggcctacacgaggtcagggggctgggacgatggcctcacaatgtggctgcccctgggctgggcactgtgtgtcatgcccaggcacttgcaatcattcagggcaaaaacagcagctgcctgatagaagactgtttcaagatgttatggaatacatgtttgtgtctctgcaaaatgcagatgttggagccgtggaggtgggtggctttgggaggtgagtagggttagatgtcatgagggtggagcctccatgctgggaatagtgtgagaagggaaagagacccga

SEQ ID NO: 14785 - DNA, 2300 bp, Homo sapien
tgaaaaaagcagtgcccctttagagcaacattccctctgaatgtttatcactctaaagtgaaaaaagacacacaaaacctgaacctgcttgtcaggcaaggaagctgaggaatccacctggcttgcagaagcccccctgggagcagacagccctcccaggcacagatgggacaccaccgcctcccacgcagcctgtgtctggagactccgcatgacccccaggaaggtcctttctccagcaaggccagggtcaggaccaagagtgaggacacgggaagcacaggatctgcggggcacctgcctccctcaccacgtgtggcattcagagaacaaggctgcgcccaaaccctccacgccctgctcccctctctccaccccaggtgccattcctagctccagctcggctgctgtaccggttttgctgactgctctcagaaccctgtaaatcaggggttgtgtgggctctggtggacaccaaagtatactcatggacctggctgtcttcctgggaagaggccaatgtaagggagaagagaccattccaagggctcctgggagaaagcaggggccgaaaagctcaagagcagaatctgagtagaggactcagatacctggccagttcctacctgggaaatgctttaaggagtgtgaagagacaccaggcacggtggctcactcctgtaatcccagcactttgggaggccaaggcgggcagattgcctgaggtcaggagttcaagaccagtctggccaatatgatgaagccctgtctctactaaaaatacaaaaaaattagccagatgtggtggcaggtgcctataatcccagctactcagaaggctgaggcaggggaatcacttcaaccagggaggtggaggttgcacagtgagccgagattgcgccactgcactccagcctgggtgataaagcgagactccatctcaaaaaaaaaaaaaaaaaaaaaaaaaaaattatatatatatatatatatatatatatatatatatatatatatatatatatgaagaggagggacggagaacagaaccacgaagtcttaaccgggtccactccttgggaatttgggggcctctgctcaactatgttgaccaggttttagcaaacacggcacctcctcatgctggggctggagatgccagcagccagggatgtctaaatcaacaccgtcagccacatgttagtgcgtgactctggtatgcaagaaaggttgtactttgttttcttttacttaattctaagccccaatcctccaggcttgtgggaaattcaaccccagtcattactgggctcttctccatgcccaagactgggcaaaggccccggagcctcaggcagcagacagtgcttgggagacctctgtggtcatcaggcccggtccttcctgggggccaccaagccatgctgctcaccatctcaaaaacgtcagagcctggagcagaggcgagcggtggaatgcagctagcatgagttaatatttcagctgttgtcttaacatcttagtctcccctggctgctgtcaccaagtaccgaagcctggtggcttaaacatttattccttacagttctggaggtggaggatcagaatcaaggtgctaacaaatccagtgcctggtgaagaccctccccgatttacagaccacggtatcctctcacggtggagagccagcaagctcgggtctctttcccttctcacactattcccagcatggaggctccaccctcatgacatctaaccctactcacctcccaaagccacccacctccacggctccaacatctgcattttgcagagacacaaacatgtattccataacatcttgaaacagtcttctatcaggcagctgctgtttttgccctgaatgattgcaagtgcctgggcatgacacacagtgcccagcccaggggcagccacattgtgaggccatcgtcccagccccctgacctcgtgtaggccccactcaggctgtcctgtctccgcagtgccacattgtgaggccatcatcccagccccctgacctcgtgtaggcccccactcaggctgtcctgtctccgcagtgccacattgtgaggccatcatcccagtcccttgacctcatgtcagccccactcaggctgtcctgtctctgcagtgctcgtcgacctgcgggaagggcctgcagtcccgggtggtgcagtgcatgcacaaggtcacagggcgccacggcagcgagtgccccgccctctcgaagcctgccccctacagacagtgctaccaggaggtctgcaacgacaggatcaacg

SEQ ID NO: 14786 - DNA, 2300 bp, Homo sapien
caatcagaagtagatttggtcttttcacatagtcccatatttcttggaggctttgttcatttctttttattcttttttctctaaacttctcttctcgcttcattttattcatttcatcttccattgctgataccctttcttccagttgaccgaatcagctactgaggcttctgcattcgtcacgtagttctcatggcttggttttcagctccctcaggtcctttaaggacttctctgcattggttattctagttagccattcatgtaatcttttttcaaggtttttaacttctatgccataggtttcaacttcctcctttagctcggagtagtttgatcatctgaagccttcttctctcagcttatcattctctgtccctttgttcccttgctggtgaggagctgcgttcctttggaggaggagaggtgctctgatttttagagtttccagtttttctgctctgtttttccccatgtttgtggttttatctacctttggtctttgatgatggtgacatacagatggggttttggtgtggatatcctttctgtttgttagttttccttctaacagtcaggaccctcagctacaggtctgttggattttgctggaggtccactccagaccctgttggcctgggtatcagcagcagaggctgcagaacaacggatattggtgaacagcagatgttgctgcctgatcgttcctctggaagttttgtctcagagggatacccagctgtgtgaggtgtcagtctgcccctactggggggtgcctcccaattaggctactcaggggtcagggacccacttgaggaggcagtctctctgttcgcagatgtccagctgtgtgctgggagaaccactactctcttcaaggctgtcagaaagggacatttaagtctgcagaggttactgctgccttttgtttggctatgccctgccctgagaggtggagtctacagaggaaggcaggcctccttgagctgcggtgggctccacccagttcgagcttcccggtggctttgtttacctactcaagcctggacaatggcgggcgcccctcccccagcctcactgccgccttgcagtttgatctcagactgctgtgctagcaatgagcgaggctccgtgggtgtaggaccctccgagacatgcgcaggatataatctcctggcgtgccgtttgctaagaccgttggaaaagcacagtattagggtgggagtgacccgattttccaggtgccatctgtcacccctttctttgactaggaaagggaattccctgaccccttgcgcttcccgggtgatgggatgcctcgccctgcttcagctcacgctcagtgcactgcacccactgtcctgcacccactttccgacactccccagtgagatgaacccggtacctcagttggaaatgcagaaatcacctgtcttctgtgtcactcacactgggagctgtagactggagctgttcctattcggccatcttggctcttttttttccagttgcattttttgtacaaattaataaacggttaaaagataaaaggtaggaaacaatccaagggattgatctgatctgacctgggaagcacaaagtcatccaagcagggtaaataaaagataagtgctgcagaagacaaaagagataaacatatgtactctgatgttcaaaagaaaaccaaatagatcagaaaaaaaaaatgtgtactaataatatagctttgtgtcccaagaaaggttgacacaaaactatgagtagtctaatagttcttagacgttaaaggtaaaatgtgactggaaaaatttgacaactggtatttccctgttatccgtgcttagaaatgtcatggtgaaactgcagaacaccaaggaatattgctgagacagataggctacttagaaaggaacgacacttagaatgatggctgccttctcaatatcataagggaagacagtggaaaagtgtatttcaagtgttgaaggaatattgctgagacagatgggccacttagaaaggaacgacacttagaatgatggctgccttctcaatatcataagggaagacagtggaaaagtgtatttcaagtgttgaaggaatattgctgagacagatgggccacttagaaaggaacgacacttagaaggatggctgccttctcaatatcataagggaagacagcggaaaagtgtatttcaagcgttgaaggaatactgctgagacagaaaggaacgacacttagaaggatggctgccctctcaatatcataagggaagacagcggaaaagtgtatttca

SEQ ID NO: 14787 - DNA, 2300 bp, Homo sapien
caggctggagtgcagtggtaagatctcggctcactataacctctgcctcctgggttcaggtgattcttgtgggtcagcctcctgagtagctaagattacaggtgtgcgccaccatgcccggctaatttttttgtatttttagtagagatggggtctcatcatgctggccaggctagtcatgaactcctggcctcaggtgatccatccgccttggcctcccaaagcgctgggattataggcatgagccactctgccaggcctgttctaggactcctaaacgtgaataaaatagaagcttagatacaaaaccaaacggcttgcatggctacttcacaagaaaaggatatccaaatggcaaataaggaaacagaagttcggcctcactgttgatgaggaaagtaccaattccccagccagatactgctacacacgcatccgaacggccaaaaccagagagaattactgacaacaccggtgtcagtgaggacatggggcaagtagaaagccaccccagccacggcaatggagatggcacggccattctgcaaagctggcagctgttatgtggtcacacatgcgcgccccaggggccagcaactgccctcctactgtactgacatatacctgcacgtgcgccccaacacacatgctcgaccgtgatgagcaatactgtgcacggagctgtgcttctttgtatattctaccttcataagtttgtttaaaaataagcaaaagagtaaggtagagaggctttggtgagaaaccgaaagcgtggagagaaaggtgagctctaccccaaaatttcccaagcgcctgcagaacaaggaccgtctcctgctgaagtggagtcctcagggccttgatagacacaagcccagagcagagaagcagcaaaggtttgctgagaccaacaggatcatatggcagaacatctgcccctttctttgagagtggatggacaggtagaatcaagagaggctggaagagaaagatgccactttttattttcaggtttgctgtattaaatgaagacagaccagaagataaagtcacaacagcagttcggaccagcttcaccatccagagacacaggacgctcagtacaaacctggcagttctggtccctgccctggcggcccctggctctgtgagctctgagaagagagcagggcaaagccatagggtttcagaagtgctgcgagctgctaacgcaccctcagggcagcagacatcccaggtttaaggcctcctctgaaaggtgtccaagtaacacatgtaacttatgcttcagtgtagaatacttaaatttttaaaaattatccatatgaatgccagatcgctggcacatggaaagcacatagatggggtttcactgtggaagcaaaaaccagttacaggcacataaccttacaccagccgtcctcccgccgtcttagcaggctagccgccttcctctccctttctggtgcatgtgggcggcacctcatgatgaccctgctgtgtcccagctctgcactccactctcctgcccctgctgcacctgctgggatgcagctggcttttcatacaagtgcatctgagccttcctctcccctccctccccagctcttccccacacacaaactgtcgaggggtaacagaaggtaaattagagatgcattttctaccctgcagtcttctgacgtaactcccaccaacagcaacataaattatagcaggaaaggacgggcctagggagtcgctttggaaacaccgatggtccctaaggcctccacgtcagctagcaaaaaataaaaattccaagagctgtgaagaccaagactaaaaaaaataattgtgtgtggggggactctcttgccagtatttttggacagtgaataaaccagctgcagaagacagggagcagagccaggaatataaagtgaagggggtgagaagggggtcgtgggagcgttccaagcctgagacctacatagcagtgaatttgggacaaccttgtgaaatctctaggcagcaggcctggtgatttaaggagtgagacggggagaggacgttgttttcgtcagagcttggctctgaggccctggtcagctgcgctttgtaaccatcactaccatcagggcatcctgcagaagcaggctggaggctgcagcctggacttcataaaacacgccacatcctgcgtctctttgggaagccccggagatggctggtaatccacccacccaaggcctgtcccgcctcttcccattcacctgggctggatccatggaggcaagaaactccatagaaaactacat

SEQ ID NO: 14788 - DNA, 2300 bp, Homo sapien
cgccgcgacctgcgcttcctgtcccgaggcttcgaggtggaggaggcgggcgcggcccggcgccgcggccgccccgccgagctgtgcttctactcgggccgtgtgctcggccaccccggctccctcgtctcgctcagcgcctgcggcgccgccggcggcctggtactgcccgcgccacctccgggtcggcccgtccggtctgttgcgacgcagagtggtcgccgtggagggtgggggtggggcgcctctgctggaagtccagcctccaggggaaccggagggaaccccctgcctttccacctctccccatcccccaccccggccttcggtaccctctataggcaaagggggtgggaggggcagcatcccagtccagcgcctctgcagcccgtggaacccgcgcggagctggggttgcgtggggtatacgccgcccgctctagggagcgcagatctggcagggatgaaactgtcagggccctggacagaggcgccttggccccaatgtagagaacactgcatctgcaccgccgtgtcaaagtgtatgtcacgggagtacctgtgtacgtgtaggtgttatgttcttggacttggaggtgggggagtgggcattcacctcccttccttttgagtcttctctctgtacctggaacaggaagtttggagaggtacccagacaggccacggctcaccccactcttcctagctgaaacgtaagaaacaggagagaaagggtgtttgtctttgcttccttatactattagtaggcatttatctggtgcccacccccaaccaggcctgaggggtgtttacattggtgataaaccctattcctgcccccaggagctcccttgctgtggcagtaacttccctgccccgaagttcctggcctgttgcatttgaggcacccggaacaggtgctcccagggggagggggggttcttgtgtgcacttgccctgcctgcgcgcacacttgatcatgtggctacactggcgcccagacgagcactcagcttctccatcgtgccccgaaagccgcacacatggccggcagatgggctgcccccagcgaagcttggtatggacccagagcatgaaccgcaggggttctctgtcttctgtcatgactggcctctggggaggcagtttctgatattagtttgtgtctgtccttcccaggcacaagaaactgctccccacacctccaccttttcttgtgccaccatctagaattctccagcccttactcacagagtctgtggcgagtcctcgagaatctacgaagctagaaggctgggggtgcaaggtcttatgtgagacctctctttcttcccagtcctgcgggtatctctgtgtgtagtttcctagatcagtctggctctcctttcaggaattttctgagttctgattagggtatgatagacttttgctcagctgggaaaaataggcaactttggtgaaacaaggaaagtgatatagacccttggagggggcctggtaggaaggagctaatgtggacctggggcggggaatgtggacctggggcggggaatgtggacctggggcggggaatgtggacctggggcggggaatgtggacctggggcggggaatgtggacctggggcggggaatgtgggttgtaggcaaggaggcttaagtaggagtgagaaaggctcagatcactgtagggctcgggtcaaggctgtatcatgttctgggagggactggaagggccacatcatttttcctgtttttgccaaagtgtttaaagtctaagtcacatcattgtactgtacatggaaacatctgaatcccatttgctgcggtttagtgagtttctgtagaggtcagagtttatacttcttggtgtaaagtttccagcaaggagctatctgtgaaggcgccgaggtggaaagctggataacattgatttaaaatccttgcagaatgagggctgggccctgtcatagatggcatctcagccagcttctcggcaagactgtccttccctttagcaccatgtgagggtgctgtgctttagataaaggaacctggccaacaggctgagttcagtgtgtgccagtggcggttgtacctctaagacttcagcttttaaattcctgccggagcagacacttctgttgtttagtctgccttgttcatcccgttcgtgtgagctggacattggacacttccccctctgtacgtactgaaggccggagggaagagacagtggggtgacttggaggtggaccctttgtttgcaaggtggtcctgaaagcgtaaagaaaagaaagcaa

SEQ ID NO: 14789 - DNA, 2300 bp, Homo sapien
ccaatttatactctccacccctaggtaggagagtgtcctctctaattcttgatttttctaagctctttaattttggttagttgggagataaaatagtatctttctgttttagttttcatgtccctatggactaattttagcatttgagcatcttggataggttcttgataggttggtgatggctacttcaggctgacttgcgcttgtgaggtggtgtggcccatactccatggttttcagtggcaggccttagaaatggctctttttgacaaaaagattcactaagaaacttactgtgatatctttaaaaaaattaatattttgtgagtacgtagtaggtgtatatgtttacaaaatgtatatacatgaaattttttgatatggccatacaatgagtaataatcccatcagggtaaatgaggtgtccatcacctcaatcaccaaggtttcttgtgctgccagaaaatgctactgagctgtcagtcatctgaggttgttgacctggacagaggcaagggggagaaacacagccccaggcctggccaagagcaggacctgtgcagatgcccccagaactgtaggtgccaagcagtgagggcagccccttttgtggcaagcctctgtggagggtcactgttcagccttggggttcattatatttcggggaaggtggccagtgttatagattccttcagatgatatgtaatcctgtgatgaatttagattccgaggcttcaagcagcatccagcggggaactataacctttctgctatgataaaatggaaaagagcaggacagggaagggacgggaaacctgagattggttatggttacacttaattgttttttttgttttgtttggttttgttttgtttttttgagatggagtcttgctctgttgcccaggctggagtgcagtggcacaatctcggctcactgcaacctccaccccccgggttcaagcgattcttctgccttagcctcccgagtagctgggactacaggtgtgcgccatcacgcctggctaatttttgtatttttagtagagacagggtttcaccatattggccaggctagtctggaacccctgacttcgtgacccgcccgccttggcctcccaaagtgctgggattacaggcatgagcctctacaagatgctattcagcaagctaatggagtcaccttccctgcagacctcagttatattgtggcaggaaaggatcaactcattctgtttctgggagactcacgttcaaggctaggctttgggactttgtgcctccgtttcctaacctgtaacactgagtcctgcttccctcggggcggggggatcctgctgttaataagaagcaccaagccagaaatcaggatcacaaattctagcctctgctccaacaggaactctctgggtaacttcagcgtttttccttaagctctctctcttcctcagtttttcagtctgtaagagggtgtgagcatgcgtgttgcactggctcctgtgggattaaagaagacaggaggtgtgaagagtttggataaacgccgcggatatagccttcaggtgctaactcaggtgtgcgggaaagtggactgggagtctttgcggccacaaacaactaaaacctaacttcagatgtaaagattatatgcagttttggatgaaaccgcttggccggggcgatttccgccctaccttcccgggaaactgggcagcaggctgagagagttccaaaatgaggacaagctctgaagaccagccccgcatcctccagctcttccagggtcccacggctccggtcggctcccgcgcgccacctggtgccgtgtccccgccactgcccagaaaccacgtgtaagaaagcgctgacaacctaactacgcactgtggtttcgacccatcccaaccagtagggaaggaggaggcggggcggaggaaagcgagggcccaatcccctcccgccttccgaggggaaggcggggcttggggtttaccacgttgggtttgtccgcagcgctaattactttttccaaaggctggagggcttcactccggctggcgccgccgcctagcgcgctcctgcttcgccgccacggtccgggggggctgccggtcccgggtaccatgtgtgacggcgccctgctgcctccgctcgtcctgcccgtgctgctgctgctggtttggggactggacccgggcacaggtagcgccccctcccacagccctcttcaccccgcgtcctgcggctaccttccctctgcgttctcgcggcgtcctggcggcccgggggcggcggcggga

SEQ ID NO: 14790 - DNA, 2300 bp, Homo sapien
cactctcaatacgccctattcatcagaagccaggcagtaattccagcacactttctaggcagaggaattaggtacacctgttgaagggaagcaggtcataattagaggatatatttttgaaccaccacagaatctaacttaggttcgtacaaatatataaacagctgtccaataccacatattgaatagtctatcattactatatcagtctgagccatgactatttgcatttactaagaatgtgtgttattaccattgaagaccttccagtgggacaagatgtgaaagcagaagacagtggtattgatgatcctgaccctgtataggcctaggctaatgtgtgtttgtgtcttaatatttgacaaaaagtttaaaatgtaaaaaataaacaacttcaaaagtaggaaaaaagcttatagaataaggatatgaagaatgaaaatatttttgtatagctgtacaatgtgtttgtgtattcaagctgttattaaaagagtcaaaaaatttaaaaattcttaaggtagaaaagttacagtaagctaaagtgaatatattattgaaggaaagaaaatttttaaaaataaattgagtgtgggcctagtgtacagggttttaaagtctacagtagtgtacagtaatgtcctaggccttcgtatttactcaccactcacttactgactcacccagagcaactttcagtcccgtaagctccaagcttacggtaggtgccctaggcaggtgcaccagtttcaatctttcataccatatttttactgtatcttttctatgtttagatacacaaatacttaccattgtgttacagttgcctacagtgttcagtaccacactgtacaggtttgtagtctagaagcacagcctacagcctgggtgtgtagtaggctgtgctgtttaggtttgggtaagtacactctatattgtttgcacaatgatgcaattgcctgacgatgcatttctcagaacgtctgctcactgttacgcaacggaggactgtgaattgggagtttattttgtttttcagtctgtactggcagcgaatcatacatagcttagtttatcagacaagctgcttttcttgagcaaagaaagaactaggagagaaacggggctttggaaccctgatgcggcaatgctgaaagaggagaaatatcccaaggaagggaaaggtgtgttgcagaacgatgaaaaataggcggcttctcacagctgttctcaggggacgagacggggtgggatgcagctccgccggtgcctaacactaagggccctcatcctgccgattcagttgtgtcgggaccgccagtgctgtctcctcgtcagatgctgcttctggtctccccgcagaagatgccactggagttgccttttcaaggatggggacatttgaaggccctggacgctcagctctgaggctggctgggatctcactagcaccccctggtggaggccggagccaggctgacgcgggaaagtggggcacggaagcgctgcggattggaccggcggcagctaggccgaaacgcctgtatttaaagggatagtaactcggactcgttctgcaatatccccacaagggcctgactgagcgagcgagcatggacggccgcggggctttctggacagtggccattcccagagccaggcaggaaggcctcgggaggctggggctcccgttcccggtgaagcggacgccgccagcgccccagaacccaggaggaagcacacaggccccacagagagtggttggcaagagtcactcggggattaggatgccggccaaatcgcggaatttgaggctggaatccaagctcaacaggaaagtagtgaaatacaaatggggaaaacagggctctggagcggggagggagctggtgccggcatttcccaccaacgccggtttaggaagacgggaccgatgccggccgccccctgctggaggggatgtggcatctcacgggctgccagggagcggggttggctactcctgcaaccagcgtgaagagggtctcaggggaggctgtggtgggatcccccacgtgcccttgttcctctcaccgttacctctggatgcctcggggcaaaggccttcttccacctatagacagagtctacgcaggggtcttggaacccgggcacaccagtccccagctaacgaaatccccgagttgggggatttgagagggtcacgtttggcccaagaacccgcagtcctctttggtcttcggccctctatttctaagcgtgggcttctggcacggcggctctgggcacagcccatgctg

SEQ ID NO: 14791 - DNA, 2300 bp, Homo sapien
tacgtttctttgtttctttttaacttccatctcttctcctttgttatctactcttttactttgacattgttatggatgacaacttttacaattgattctgcagccgggatgatatattctgctatttctttttggttgattctaaaagttgaaaatcattgcacagtgtttacattatgattttgatataattattatataagtcttttctgaagttaagcatgtatcatgactatatttccctttgttgtgggatattttggccctttttttctttccttctgtcttttgtgtgtgtgtgtttctgtttagcttctggacactgggacttccatttcctctctgatggtgtcagcaacacaatgcaagcaccacattcattgtttcctagggaagctaaacagttccattcctggacctataccatgggtgggtagagaggctgcacacagggaccaactagccatctggctgctcttgcagatgtacttaccctgctcagcctacaggttgcttttgggtgccctaaattttttatagccacttcttgcacacctccattagatgaatgctttcatataaatctttaacatgccttagaattaattttagtttgtgttatgactctgtagttgttagctattgctgcataacaaattagtccaaaacttagtgactcaaaacactaataataatttattttctcttgtttttttaacggtctggaattcagccagggtggacacagtgggaagggcttgtctctactcatggtgtttggggcagactcaaaggctgggggctgaaatcatcggaaggcctgactgagggtagaggatctgcttccaaaatgactcactcacatgacaaattagttggttctggcaagttggcctcctttccaagaagtgcctctccacacatgtgcttctctgcagggttgcttgagtgtcctcatgacatggctggtggttcccaaaaaagcaagtgatccaagagcaacattcaggaataagttcaatcctttctatgacctagcctcagaactcacaaagcatcactctcaatacgccctattcatcagaagccaggcagtaattccagcacactttctaggcagaggaattaggtacacctgttgaagggaagcaggtcataattagaggatatatttttgaaccaccacagaatctaacttaggttcgtacaaatatataaacagctgtccaataccacatattgaatagtctatcattactatatcagtctgagccatgactatttgcatttactaagaatgtgtgttattaccattgaagaccttccagtgggacaagatgtgaaagcagaagacagtggtattgatgatcctgaccctgtataggcctaggctaatgtgtgtttgtgtcttaatatttgacaaaaagtttaaaatgtaaaaaataaacaacttcaaaagtaggaaaaaagcttatagaataaggatatgaagaatgaaaatatttttgtatagctgtacaatgtgtttgtgtattcaagctgttattaaaagagtcaaaaaatttaaaaattcttaaggtagaaaagttacagtaagctaaagtgaatatattattgaaggaaagaaaatttttaaaaataaattgagtgtgggcctagtgtacagggttttaaagtctacagtagtgtacagtaatgtcctaggccttcgtatttactcaccactcacttactgactcacccagagcaactttcagtcccgtaagctccaagcttacggtaggtgccctaggcaggtgcaccagtttcaatctttcataccatatttttactgtatcttttctatgtttagatacacaaatacttaccattgtgttacagttgcctacagtgttcagtaccacactgtacaggtttgtagtctagaagcacagcctacagcctgggtgtgtagtaggctgtgctgtttaggtttgggtaagtacactctatattgtttgcacaatgatgcaattgcctgacgatgcatttctcagaacgtctgctcactgttacgcaacggaggactgtgaattgggagtttattttgtttttcagtctgtactggcagcgaatcatacatagcttagtttatcagacaagctgcttttcttgagcaaagaaagaactaggagagaaacggggctttggaaccctgatgcggcaatgctgaaagaggagaaatatcccaaggaagggaaaggtgtgttgcagaacgatgaaaaataggcggcttctcacagctgttctcaggggacgag

SEQ ID NO: 14792 - DNA, 2300 bp, Homo sapien
tggagtgcaatggcagaatcttggctcactgcaaactctgcctcccaaatctcagcctcccaggtagctgggattgtaggcatgcaccaccatacccagctaattttgtatttttagtagagatggggtttcaccatgttagtcaggctggtcttgaacccctgacctcaggtgatccacctgcctcggcctcccaaagtgctgggattataggcatgagccaccacgcctggtcctctttacttcttcatacccgatttgatcttcttccgtgtcaattcaattcattacatccaaaacaggttttactcatgagggaattagtgtgtcaaaaggctattaaaaagcactaacaaggctgggtgtggaggctcacatctgtaatcctagcactttgggaggccaaggtgggcagattgcttgagcccaggagttggagatcagcctgggcaacatggtgaaaccccatctctacaaaaaaatacaaaaattagtcgggtatagtggttcacgcctgtcgttagttactcaggaggctggggcgagaggatcacctgagctcagcaagttaaggctgcggtaagctgtgattgtgccactgcactctagcctgggtgagagtgagactctgtctccaaaaaaacaacaacaacaaaaaaagaggttgggcgcagtggctcacttctgtaatcccagcactttgtgaggccaaggcaggtggatcaccaggtcaagatattgagaccatcttggccaacatggtgaaatcctgtctctactaaaaatacaaaaattagctgggcgtggtgccgcgtggctatagtcccagctattcgggaggctgggggggagaatcgcttgaacccaggaggcagaggttgcagtgagccacagcaccccagcctggtgacagtgtgagacgccatcttaaaaaaaataataataaataaaataaaataaaatagaaaaaaaaagcactaaaaagcctgaagtcacacatcccaaagttagtgaatgagtggagtttaaacccagggctgtatggctatcatgcctgttttcccctactctgctacactgtctcctctgtaaatgttttgttttgtcttttggagacagggtctcactctgtcacccatgctgaagtgcagtggtgccagcacagctcactgcatgtaaatggttttcctagatttgtattttaatcaaatattcagagaaacaatgctccctgttctctctcgctggggatggtttcattgccttatcttatctattttctatttttccgtgtctgttaattcagcctcataatgggaaatggctgcagacctgggcttgctggctgagataatccatgggtgcttatggacttactccagaagggcttccccttcctatcaacagcctgtagacccttcgtgttttcaccttctgaagaggttgtgtaaggcgctgggttcggaatcacggaaggcccaggtgcaaacctcagcagtcccgggtaccagctgtgcagcgcaggtgagccgcttagcccctctcacccagtcacgagtgatggtgtctcgcgaggccggtgtaggacgagtgtggtccaggcgcagtacctgaaaagggcgcccagggagggagccggcggtcgttgggcgctctctcggcccgcacccgggcatccctcgacccgggctggaggggcagtgtcccgggatgcaccgctgcggggaccccccgcccggcctcgcggacccgcctcggcccaggacggaggaggaggcaggtgcggggcccggggcgggtgcggggacggcaggtggagggaagagggcatcgggccctgctcaccgcggtgtgtggggctgcccgaccgcgccccccgcaggtgccgcccagaccccggccgagggtcctcgtccccgcgcaggcccaggtcgaggccgagagagggcccgtgtccccgcgcagacctaggccgagagagggcccgtgaccccgcgcaggtcaaggccgagagagggcccgtgtccccgcggaggtcaaggccgagagagggcccgtgtccccgcgcaggtcaaggcccagagtccccgtgctcgcacagatggtgtcctggggcccagtcgcgctccccgctcgcggcagcccccgtgtactgggccttgcaaagtccgttaggagcgctccagggcgacagtgcccagcggttaacaagtttgtaattactttcgtgggtttctacgttgcaaattgagaagagggttgctgggttgggcccccctcctctggacgctaaccccacc

SEQ ID NO: 14793 - DNA, 2300 bp, Homo sapien
attgttaatttcacttgaatttataaaccaaattgctattcccaatgattttttacactatacatcttctccttaaattttattcttgacttttacactacatcttgttatcaccattatatttattatttagtctttactctatttcatgatgtgtctaatgaaaaaatcttaatttgtgttcctttctttggtaatgtttccaggaaaaatggctgggttatgtaagcatcccaacaatttcctaagaagaaagatatattttctgagactttgtatatcagagtatgtcttttggttgccattcttttggttaatggcaatatgatgtcttttataaacccatcccacattttttttttttttgagacggagttgctcttgttacccaggctggagtgcaatggcagaatcttggctcactgcaaactctgcctcccaaatctcagcctcccaggtagctgggattgtaggcatgcaccaccatacccagctaattttgtatttttagtagagatggggtttcaccatgttagtcaggctggtcttgaacccctgacctcaggtgatccacctgcctcggcctcccaaagtgctgggattataggcatgagccaccacgcctggtcctctttacttcttcatacccgatttgatcttcttccgtgtcaattcaattcattacatccaaaacaggttttactcatgagggaattagtgtgtcaaaaggctattaaaaagcactaacaaggctgggtgtggaggctcacatctgtaatcctagcactttgggaggccaaggtgggcagattgcttgagcccaggagttggagatcagcctgggcaacatggtgaaaccccatctctacaaaaaaatacaaaaattagtcgggtatagtggttcacgcctgtcgttagttactcaggaggctggggcgagaggatcacctgagctcagcaagttaaggctgcggtaagctgtgattgtgccactgcactctagcctgggtgagagtgagactctgtctccaaaaaaacaacaacaacaaaaaaagaggttgggcgcagtggctcacttctgtaatcccagcactttgtgaggccaaggcaggtggatcaccaggtcaagatattgagaccatcttggccaacatggtgaaatcctgtctctactaaaaatacaaaaattagctgggcgtggtgccgcgtggctatagtcccagctattcgggaggctgggggggagaatcgcttgaacccaggaggcagaggttgcagtgagccacagcaccccagcctggtgacagtgtgagacgccatcttaaaaaaaataataataaataaaataaaataaaatagaaaaaaaaagcactaaaaagcctgaagtcacacatcccaaagttagtgaatgagtggagtttaaacccagggctgtatggctatcatgcctgttttcccctactctgctacactgtctcctctgtaaatgttttgttttgtcttttggagacagggtctcactctgtcacccatgctgaagtgcagtggtgccagcacagctcactgcatgtaaatggttttcctagatttgtattttaatcaaatattcagagaaacaatgctccctgttctctctcgctggggatggtttcattgccttatcttatctattttctatttttccgtgtctgttaattcagcctcataatgggaaatggctgcagacctgggcttgctggctgagataatccatgggtgcttatggacttactccagaagggcttccccttcctatcaacagcctgtagacccttcgtgttttcaccttctgaagaggttgtgtaaggcgctgggttcggaatcacggaaggcccaggtgcaaacctcagcagtcccgggtaccagctgtgcagcgcaggtgagccgcttagcccctctcacccagtcacgagtgatggtgtctcgcgaggccggtgtaggacgagtgtggtccaggcgcagtacctgaaaagggcgcccagggagggagccggcggtcgttgggcgctctctcggcccgcacccgggcatccctcgacccgggctggaggggcagtgtcccgggatgcaccgctgcggggaccccccgcccggcctcgcggacccgcctcggcccaggacggaggaggaggcaggtgcggggcccggggcgggtgcggggacggcaggtggagggaagagggcatcgggccctgctcaccgcggtgtgtggggctgcccgaccgcgccccccgcaggtgccgcccagaccccggccgagg

SEQ ID NO: 14794 - DNA, 2300 bp, Homo sapien
aaaaggaaaaaaatgttaaaacacagtgaaactgcagaaacagaacatagccaccctttttcattaatgaccttttcttcacgtggtggtcaactcagcaggtgagaataattagtaggttcagtagaataaagtctttacaattaataacttagtggaaaatgatgttcagatgatgaaatgtggaaatgttttagacagctgtattttcagcctgtgtgtctcagtcaccatcctgttgggattaacagttgagggccatcattttctaaacatttcacatgcagtttcccataatttttaccgtgaatgtgaaaaggtgaaactggtgctgacttcagcggcaggtatactaaaattagaatgacacagaggagattagcatggccccctgtgcaaggaagatccagattcatgccgcattccatatttttttttaaaaaaggttacactgtgcaccgagatgtgcagctagaaggaagagcatgaagtctcgtgtttgctgactataaaaataaatcatagtaataatattgttgaaaattctgctttaaaaattattaataaaaccataaatgaaacactattcttgagcacactttaaaaagtacatagacccataagtccatgtactaaaaaatgcctatttttaggttgcctgttttgtaatccaggatttcatactgagatgaaaattagcatcaggaaaagcctgaaatgccttgccttaattgtgaacagatactggggaacctgccccgatattcacgtaggttcttttctgttttccttaagcatcggccagcttgagaaataaagggacagagtacaaaagagagaaattttaaagctgagcgtccgggggagacatcacatgtcggtaggttccgtgatgccccacaagccacaaaaaccagcaagtttttattagggattttcaaaaggggagggagtgtgcgaataggtgtgggtcacagacatcaagtacttcagaaggtaatagaatatcacaaggcaagtggaggcagggtgagatcacaggaccacaggaccgaggcgaaattaaaattgctaatgaagtttcgggcaccattgtcattgataacatcttatcaggagacagggtttttgagatcaaccggtctgaccaaaatttattaggcgggaatttcctcttcctaataagcctgggagcgctatgggagactgaggtctatttcacccctgcagtcttgaccataagagatgaccacgcccaggggggccagttcagagacccacccccaggcgcacattctctttctcagggatgttccttgctgagaaaaataattcagcgatatttctcccatttgcttttgaaagaagagaaatatggctctgttccgcctggctcaccggcagtcagagtttaaggctatctctcttattccctgaacaattgctgttatcctgttcttttttcaaggtacccagatttcatactgctcaaacacacatgctgtacaatttgtgcagttaatgcaattattacagggtcctgaggtgacatacatcttcgtcagctgacaggattaagagattaaagacaggcataggaaatcacaagagtattgattggggaagtgataagtgtccatgaaatctttacaatttatgtttagagattgcagtaaagacaggcataagaaattacaaaagtattaatttggggaactaataaacgtccatgaaatcttcacaatccacgttcttctgccatggcttcagccggtccctccgtttggggtccctgacttcccgcaacaaacagatatgcatgaaaatgaaatatgcaaagcacattgatgaccttgttctttacggacattgtaatcagcctctagccatacagaacaaatgagaaattagaagcacttccaagaacgtgtgatggtgtgaaacccacttttgaccatcatgcacatttcaacatttgaagtgagacaggctacctggtaactgccccatggcggggtcatagtttaaatggcccaatgtcctgtagaggttaatttaatcaaaatgagctataaacatagaacaatcactatgtataattttaaaatagtttacctggcccgtcatggtggctcacgcctgtgatcccagcactttgggaggccgaggtgggcagatcacccacggttgggagttcgagaccagcctggcccgcatggcgaaacccccatctctactaaaactacaaaaattaggcatgctggtgggtgcctgtggccccagctgctcaggaggctgag

SEQ ID NO: 14795 - DNA, 2300 bp, Homo sapien
tctgcgtccggaaggaatcatccgcccgtccctcatctgcgtctggaaggaagtcatccgcccgtccctcatctgcgtctggaaggaagtcatccgcccgtccctcatctgcgtcctgaaggaatcatccgcccgtccctcatctgcgtctggaaggaagtcatccgcccgtccctcatctgcgtctggaaggaagtcatccgcccgtccctcatctgcgtctggaaggaagtcatccacccgtccctcatctgcgtcctgaaggaatcatccacccgttcctcatcggcgtcccgaaggaagtcatccgcccgttcctcatctgcgtcctgaaggaatcatccacccgttcctcatcggcgtcccgaaggaagtcatccacccgttcctcatctgcgtctggaaggaagtcatccacccgtccctcatctgcgtcctgaaggaatcatccgcccgtccctcatctgcgtctggaaggaagtcatccgcccgtccctcatctgcgtctggaaggaagtcatccgcccgtccctcatctgcgtcctgaaggaatcatccgcccgtccctcatctgcgtctggaaggaagtcatccgcccgtccctcatctgcgtctggaaggaagtcatccgcccgtccctcatctgcgtctggaaggaagtcatccacccgtccctcatctgcgtcctgaaggaatcatccacccgttcctcatcggcgtcccgaaggaagtcatccgcccgttcctcatctgcgtcctgaaggaatcatccacccgttcctcatcggcgtcccgaaggaagtcattcgcccgttcctcatctgcgtcctgaaggaatcatccacccgttcctcatcggcgtcccgaaggaagtcatccgcccgttcctcatctgcgtctggaaggaagtcatccacccgtccctcatctgcgtcctgaaggaatcatccgcccgtccctcatctgcgtctggaaggaagtcatccacccgtccctcatctgcgtctggaaggaagtcatccgcccgtccctcatctgcgtccggaaggaagtcatccacccgtccctcatctgcgtccggaaggaggtcatccgcccgttcctcatctgcgtctggaaggaatcatccacccgtccctcatctgcgtccgaaggaagtcatccgcccgtccctcatctgcgtccggaaggaggtcatccgcccgttcctcatctgcgtcctgaaggaggtcatccgcccgttcctcatctgcgtctggaaggaaatcatccgcccgttcctcatctgcgtccgaaggaagtcatccacccgtccctcatctgcgtccggaaggaagtcatccgcccgtccctcatctgcgtcctgaaggaagtcatccgcccgttcctcatctgcgtctggaaggaagtcatccgcccgtccctcatctgcgtcctgaaggaatcatccacccgtccctcatctgcgtccggaaggaatcatccacccctccctcatctgcgtccggaaggaggtcatccgcccgttcctcatctgcgtccagaaggaatcatccacccgtccctcatctgcgtccagaaggaagtcatccacccgtccctcatctgcgtccggaaggaagtcatccacccgtccctcatctgcgtcctgaaggaagtcatccgcccgttcctcatctgcgtctggaaggaagtcatccgcccgtccctcatctgcgtccggaaggaatcatccgcccgtccctcatctgcgtctggaacgaagtcatccgcccgtccctcatctgcgtcctgaaggaatcatccacccctccctcatctgcgtctggaaggaagtcatccgcccgtccctcatctgcgtcctgaaggaatcatccacccgttcctcatcggcgtcccgaaggaagtcatccgcccgtccctcatctgcgtctggaaggaagtcatccgcccgtccctcatcggcatcctgaaggaatcatccacccgttcctcatcggcgtcccgaaggaagtcatccgcccgtccctcatctgcgtctggaaggaagtcatccgcccgtccctcatctgcgtccggaaggaagtcatccgcccgtccctcatctgcgtcctgaaggaagtcatccgcccgtccctcatctgcgtctggaaggaatcatccacccgtccctcatctgcgtctggaaggaagtcatccacccgtccctcatctgcgtcctgaaggaatcatccacccgtccctcatctgcgtctggaaggaagtcatccgcccgtccctcatctgcgtctggaaggaag

SEQ ID NO: 14796 - DNA, 2300 bp, Homo sapien
tgacctccttcaggacgcagatgaggaacgggcggatgacctccttccggacgcagatgagggacgggcggatgacttccttcggacgcagatgagggacgggtggatgattccttccagacgcagatgaggaacgggcggatgacctccttccggacgcagatgagggacgggtggatgacttccttccggacgcagatgagggacgggcggatgacttccttccagacgcagatgagggacgggtggatgacttccttccagacgcagatgagggacgggcggatgattccttcaggacgcagatgagggacgggtggatgacttccttccagacgcagatgaggaacgggcggatgacttccttcgggacgccgatgaggaacgggtggatgattccttcaggacgcagatgaggaacgggcgaatgacttccttcgggacgccgatgaggaacgggtggatgattccttcaggacgcagatgaggaacgggcggatgacttccttcgggacgccgatgaggaacgggtggatgattccttcaggacgcagatgagggacgggtggatgacttccttccagacgcagatgagggacgggcggatgacttccttccagacgcagatgagggacgggcggatgacttccttccagacgcagatgagggacgggcggatgattccttcaggacgcagatgagggacgggcggatgacttccttccagacgcagatgagggacgggcggatgacttccttccagacgcagatgagggacgggcggatgattccttcaggacgcagatgagggacgggtggatgacttccttccagacgcagatgaggaacgggtggatgacttccttcgggacgccgatgaggaacgggtggatgattccttcaggacgcagatgaggaacgggcggatgacttccttcgggacgccgatgaggaacgggtggatgattccttcaggacgcagatgagggacgggtggatgacttccttccagacgcagatgagggacgggcggatgacttccttccagacgcagatgagggacgggcggatgacttccttccagacgcagatgagggacgggcggatgattccttcaggacgcagatgagggacgggcggatgacttccttccagacgcagatgagggacgggcggatgacttccttccagacgcagatgagggacgggcggatgattccttccggacgcagatgagggacgggcggatgacttccttcgggacgccgatgaggaacgggtggatgattccttcaggacgcagatgaggaacgggcggatgacttccttccagacgcagatgaggaaagggcggatgacttccttcaggacgcagatgagggacgggcggatgacttccttccagacgcagatgagggacgggcggatgattccttccggacgcagatgagggacgggcggatgacttccttccggacgcagatgagcgacgggtggatgacttccttccagacgcagatgagggatgggcggatgacttccttccggacgcagatgaggaacgagcagatgacttccttccggacgcagatgaggaacgagcagatgacttccttccagacgcagatgagggacgggcggatgacttccttccggacgcagatgagggacgggcggatgacttccttccggacgcagatgagggacgggctgatgacttccttccggacacagatgagggacgggcggatgacttccttccggacgcagatgagggacgggcggatgattccttcgggacgcagatgagggacgggcggatgacttccttccggacgcagatgagggacgggcggatgacttccttccggacgcagatgagcgacgggcggatgacttccttccggacgcagatgagggacgggcggatgacttccttccggacgcagatgagggacgggcggatgacttccttccggacgcagatgagcgacgggcggatgacttccttccggacgcagatgaggaagggattccttccggacgcagatgagggacgggcggatgattccttccggacacacctctcaatgtgcacgtgctgctcctgccaggcggatgacatcaggaatgctcatcaacttgagggcgaagaaatgcttggcggtcttctccttcaccgggtgcacccgcccgaacgtcccagtgcccacggtggccagtgtgtcgaagtcctgcaggcggtgggcaggcggctccggcgaccaggccttggggctggggcagaatgcgggtgccca

SEQ ID NO: 14797 - DNA, 2300 bp, Homo sapien
tatttggctaacactggtacttcgctgttattttaatcggcaaccttctatttagctccactgatttttccatgtctacctgaattaagtactaaactgtttcgaataccatagccttaatatatattttaatgtgcggtaggtttagtctttgttctgtttctctgcaaagagatcattaaaaaaaaatgtacaggcaatattttagactgccttaatgccagacttcgcagcacaatatagctattgctcctattacacaaacatattacaatggaatttacggcttcccctcaagaatatggaacataattattcatgtcacaattttaaataggaaaattagtgattaaatttttttttagaaagaatcatgttcatacagtaggccaggtataatcacttctcaaagaaacggctaagattttacatttgtaatatatcgctttctgtgtaaataccccagaaggaaatagtaactgtatttggttagtgactctcctggattcaagtccatcaaggacacatgaaagtggccatatctgggattagggtctttgcagctgtcatcaagttgagatcatactggatgagggtaggtcctagtccaatgaccgatgtccttgtaggagggaaactggacacagacacaggaaaatgccatgtgaggcaggaactggagtgacgccactacaagacaagggacaccatggctggctggctgccaccagaagccagaaaggggcagggtgggattcttctccagaccctgagggcattgccctgctgaagcctgagtttggattctggcctccaaaactatgaggataattccaggtgtctgaagctgcggcacacgtggcaagttgttacggcagccctagctgaggaacgcaatcaccacccccgattttgtgtcacttagaactgccataaatctccagtggtatatagctataatgagtgacttgtcacttgatgtctctttttcagtcactaggttgcttccaataaggcaaaaagtaagaacttgtctagaaaacccagccgggcacagtggctcatgcctgtaatcccagcacttcgggagggcggacaggcggatcacttgaggtcaggagtttgagaccagcctggcaacatggtgaaacccccgtctctactaaaaatacaaaaattagctgggcgtggtggcgggcacctgtaattccagctactcgggagactgaggcaggagaattgcttgaacccaggaggtggaggttgcagtgagtcgagtcacgccactgcactccggcctgagcgacagaatgagattctgtctcaaaaaaaaaaaaaaaaaagaaaacccttttatggtgatgattttatactattacctcattgagacataatttatattaaggaaaaacaatacctggaaaataaaatgtcaatgttttacaaagtgttcatagttttattacttatcacctctatgtattttaacaacttcaaaagtgcagttggattatatgggaaaagatttttcttttgcaaacggcagatggcatcttgtagttcctggaagcattttactattctgtaaaatattcccacttcagagacgacatcatttggggctacttcacaatcaaaggagaaggcagtatcaaattctttcagaaccagaggccttgatggaggctcaaggctaaattcttttttatccctgcttgtcccagctgcatcctgaatctccttagttgcttgctggtgtaaagatgtctgtttactgttagctaaacactgctctgtggattccacgtcagaatcgtcagagctgtcgtaatctaccagactttgagaggcccggggggaagacagactagaagcacacatggtgtgagcccccttggacatcacagctttcagtggttcagagggagcatcggaagcccaggagtgccgagcacacacatctctgtgactatgaggagcagtcaaacgatggggtattgtttggttggagctttggtcttggacaagtgaggggacacagccacaaatacttatgtcatatttagattcagttgcatcaaagttattgcaaatggtgaaaaaattatcccagtccttttgcagtaattttaaatatctaacaaaatattcaagaaaacaggtttctgatgaaatcaaaaagtcaagaagaactgtggaatcaaatcctatatttttcaagaagaacaagaaaatacagtgaggattatagccattttcatgtgtgtgatggtcccacatttcttttccctgagtcaagc

SEQ ID NO: 14798 - DNA, 2300 bp, Homo sapien
gcagagctgaattcaattcctggatatccttgttaactttctgtctcgttgttctgtctaatgttgacagtggggtgttaaagtctcccattattattgtgtgggagtctaagtctctttgtaggtctctaaggagttgctttatgaatctgggtgctcttgtattgggtgcatatatatttaggatagttagctcttcttgttgaattgatccctgtaccattatgtaatggtcttctttgtctcttttgatgtttgttggtttaaagtctgttttatcagagactaggattgcaacccctgcctttttttgttttccatttgcttggtagatcttcctccatccctttattttatttctgtggcatattcgatttttttacttaaataatattaggatacttctgttccttctcggtgtgccacatattatcatacttcttttggccaaatgtataaacaatgttgtatacagttgtattatgtaaagaaaatattgtattttaactgcttgctttattttctcacttgtagataaccttaagtaattcctggattgctttttgccagaaaaatctttctgaatactctgagagtaataaagcaatatactgcctctggactcttacagcaataataaaagaaatctttaaagattcatgttcacagaaaacaggtatggattacatggccccataaacaatcatcatcttgctcctgggagcgttgcatttataatgagaaacaaaacttaatttggaacatctgatctgtcttaaagtaatgaaaaagtcagtctcttccaatatattttgattgaggataacctgttttaaaagaaaaaaaagtataaggaaaaaagtaaagcttttcatgagcacaaatcccttgcattgtttgatgttactgatattcgtaaaatgaatattttttgttttgttttgttttatttttttgagacaagtcttgctttgttgcccaggctggagtgcaatggcatgatcttggctcactgcaacccctgccttgcgagttcaagtgattcttctgcctcagcctcccgagtagctgggattacaggcgctcaccaccacacccagctaatttctgtatttttagtagacacagggttttaccatgttggccaggctggtctcaaactcctgacctcaagtgatccacccgcatcggcctcccgaagtgctgggattacagttgtgagccaccacacccagccataaaatgaattttaaccgtggttcttacccattaatctgtgtaacctcatttgttaatgttagaggtaaacattccaaatctgttttttcatcttaaaaagtgatatttataaaaagtgaattgtaaaattgtttgaagaagactgtttttcctgtttataattcctatttttataattgcagaaattctaaagcagttcctgactcatttcgacaccatttttgaagtgttttacaattccttattctctcagcattttgaaaactgccgggatacttctaaaatagtaaacatcctgatgtgtttcctggatttgcttgagcttctcatcgcctccagaatccacctgaagttacatttcacttgccagaggattttatttttgaaaccatcttgcatgctagaagttattacctggcctattcaggcttttgttaaaaggaaggtcatcatattcctcaaaaagtgccttctctgtaaagtgggtgaagacctctgtcgtggatctgtgcctgccttaatgccgccagaccatcatgtagcggtggacatgctggctttagctaatgctgttttgcaagctgtgaattcggggttgttgaagacactgtctgtttatgaaaaacattccttttttggaggtgatgaagttcaacctgaatgtgaacttatcactagtccagatcatgtgatccttagagcagcaagcttagttataatgaaatccttagaaatcaagtttcaaaattattcttcagcaagtgaagtgaaaggtaattctccaaactccttttgtatgcagtgtgtaattatttacttaagtacagtaattcataattatcaaatctcaggactagtttaaattccagtaatttaagctgtatgttatcctatttgtaacttattacattttcaaaaaaaaaaaaaagaactggatttacctttaagaaacatgtcagctttttgtgcctacaatgaatttgtaaagcataaggaatgatttaggtttaaaaaagttgctgttgagtcatctcaaagtaagtgatggaaatcaattcata

SEQ ID NO: 14799 - DNA, 2300 bp, Homo sapien
gctggtgggccgtagtgtagacagaagacccagtgtaagagcaagactaggctagtgggccgtagtgtagatggaagacccagtgtaagaccaagactaggctagtgggccatagtgtagatggaagacccagtataagaccaagactaggctagtgggccgtagtgtagatggaagacccagtgtaagaccaagactaggctagtgggccatgttaagaccaagactaggctagtgggccgtagtgtagatggaagacccagtgtaagaccaagactaggctagtgggccatgttgtagatggaagacccagtataagaccaagactaggctagtgggccatagtgtagatggaagacccagtataagaccaagactaggctagtgggccatagtgtagatggaagacccagtgtaagaccaagactaggctagtgggccatgttgtagatggaagacccagtataagaccaagactaggctagtgggccatagtgtagacggaagacccagtgtaagaccaagactaggctggtgggccatagtgtagacagaagacccaatgtaagaccaagactaggctagtggccatagtgtagatggaagacccagtataagaccaagactaggctagtgggccatagtgtagatggaagacccagtgtaagaccaagactaggctagtgggccatgttgtagatggaagaaccagtataagaccaagactaggctagtgggccatagtgtagacggaagacccagtgtaagaccaagacttggctggtgggccatagtgtagacagaagacccagtgtaagaccaagactaggctagtggccatagtgtagacggaagacccagtgtaagaccaagactaggctggtgggccgtagtgtagacagaagacccagtgtaagaccaagactaggctagtggccatattgtagatggaagacccagtgtaagtggtagacttccgaagtcttttggaagttgaagatgggaagtgtgtctataaacgggtcagggcagagaagtctgtaattttgttaaagggtaaatttcaagagtgtgaaatcacaacccatataaaatgaccaagtatcaaagattttatttaccttattactaagggaaccaggcacaacctgtttaaaggagcagtaagaaaaccatgaactatgtagggtgaaggaatgttaaaatgagtttacaggtggaagcaaaactgatttttcccactggggagagggttgcctctttatcagacagttcttcacagatctgtggacaagaattatttgaggtgtgaaatatttcaaaggcaatgaaaggagcaaaacccccctccttcccagggtcagattgttcccagaggctccagcattccattgtcatgatattcagtaatctcttttgcctatgccaaagtcctaagtttttccttgccatactccctctatagtaactacttgctgcttctgatgttgatccattttaagttggaatttcattggcaatagccataatctagtttgaccatatagcagtctaactttaaatttttatctataaattggaggtgaaggttaatgaatttgaattagctcagtggttctcaactggagtgattttgtcccccaggggacatttgacaatgtctgcagacattttttggttgtcaaaatctggcaggtcaggtgggaagtgctttgggcatgtagaaggtagaggtcaggaatgctgccaaacatcttataatacacaaaacagctccccactacaaagttatctggctccaaatattaatagtgccaaagttaagaaaccctgatagccattgaaaactgttagaggaaagctcaagtttctgctgcgttaaaattaaacctaattttatgctctcaaatctgtgtggaaagcatacatttcattgttacggtcttgaaataatgttcctgttacaattttccattttagaaattaagcagtcagcatcccctttaacttgagagacttagtgattaagtggaaacagttgctttctcttgtaataagcatatagcagttagaatttttaaattatttttcctattttaggtttcactgaagaaacttcttagagattcattgcacttctgagatttaatgtttacaacttggagttgtcgaccttcttataagatacattttggaagtcaaaatgaaagttttctgtgaagttttagaagagttatacaagaaggtacttcttggagccacacttgaaaatgacagccatgattacatcttttatctca

SEQ ID NO: 14800 - DNA, 2300 bp, Homo sapien
cgcttttattttatttgtttacattggagtcctgctgttaagcaaaaaaaaaaaaaaaaaaaacagggagaaatcatggtagaatcgaaagaccgaaagctactaaaaattgatagcatttaatagtcctgaataagttgtttctaattataattcagctactaatttcaagaagaaatggaaatttagaaagttgaaattatgaaatatgattgctgggaagtataatgggacaaaaattaaaaagctgaatctatcttcactgccactactgcacttctactctggacaactgcaaccgatcccttccaaagtggttgtatccaggcccaccctacacccacttccttctgaaaaaccaatccactttccttaggatacagtccaaactcctaaacaaggcttaccaaggcccttcaagatctgactctcggcgtcttctcatctctatgccccactccccagtctcattaccagtcattttcctaccactctgcttcagctaccctagccttctttctggcagttcctgtaaacagcaaagcatattctagcatcagaggctttgcatttctaattctctctgctggcaaaattctctccctagatcttggcatggctggctctttgtcattcagatccctgctcaaatgtcacttcctcagagacctttcctatctgtcttagtccgtttcctgttgcttataaaataattcctaaaactcggtaatttataaagaaaagtaatttattgtctagttttggaggctgggaagtctaagactgacggaccacgagacagcaccgcaaagtatcacgtggccagggggctgagcaggctcacgagttgtcaagtctctccttaaaaagccaccagttctacctccgtgataacccattaatccatgaatagatcaatccactcgtgaagacagaaccctcacggtccaaccacctcttaaagactctacctctcagtactgccacattggggattaaatttcaacatgagttttgaaggggacagatattcacaccatagcactacctatctaatacagcccatcacgtcctggtcaaaatcgattccaccattctgcttgattttcctcatataacccatccctatctgataattttgtgtttgtttccccgaaatcactatcttgttcactgttgtctccccagggactagaacagtggccagtaaacacttgctaatgaataaagtgcttaacaaacgtgtcttgatcagtctatctcgcgttttccccacgacccctctccattcattcacaggaacccgccaacgttgctatcctttcaggaaggtccttggatcgtcatcgctatcccaaagagagtccgttctcccacttcaggcgaggcattgccagcctggaagctaacggggtctcaaggaccgacagccgcgccaagaccgggcacttgcgtctgacaagcgctgaacaggggcggagaaacaaggcacccctctactcgcttcctggagcctgccgccctcccaaccttaagccctgaaccaggctctcatttggccgcactcgtgcctcccctgctgccagcacggcggccggtcccggttacctgcctgggatctggctcaggcgaactctcttcacaccgccatttgagggaacacaaatgcccgctctgggccaccgtagttcacagaaagtacaagctggcacctcctcccgcatgcgcagagaccgccttcggcgaatagtgtctcttagcaacggctttgagtccctccgccaggggcggagcctcggaagccaccacggggaagctgtaaggggaagtgagtgagaccaatcggagacgaatctctgccccgttcggcacgcctcccttaactgtcgcgaatgcaaaggcaactttacggcaggcagagggtgggggctgccgggggtaaggaggagagaaggaagcaaccaaccaaccaagtcgtccctactccctccacccccacccatcccggacctggtttacggctccaggctcaggctccactgcgggcgctgattggttgttgaaggcttggtcccatcccagtgaccccaaagtgctgaagggagggggcgggggtggcccagtgcaaagtgcatcccgaaagccccctgtccggagaccccacggctggcacttcgggccccgtatgacctgggacctcgccgtcccgagacctcctgggtccctccgtagctggaagcctccggcccggagcgcggcagccccctgctccgagccctggaccgggactgcccccccac

SEQ ID NO: 14801 - DNA, 2300 bp, Homo sapien
ttcagagcattttcagaagcagcaacaaaatatggcagcagaaatgtgatcacatgaattagatgcttaaatttcaatccagcaaactctacgtaaaagttttaaaatgagaaatcttttttatagagtgctaaaattaagacccagatatgtaaacacaccaaaaggttcctttgtttttaaattcctgagtcaaacgattaataagatattgtgcaaatttttaaaagttctcctagaaaatctgaggtgtaagaaacattgtatctttataagtttcaaagcccatccacatttgtcacacacaaacacacagaaagcccaaagagttaattatgcctaagtgcttcagggtaataatgttgtcttcataccattcacactcttaaggtacacaggttggctttctagtaggaaataaaatcaaactattttctgaaactcataaatctcaggccaataatttacctttctctaccaaatcgttgtcagttagataactcaaaagatttttctgatgcaggtagaagaaaggtgataggaaagagtaagggggaaaacagtaaattgtggtttaattaaaaaggaaagtcattcagaattaacaagcaattaacaaggaattgaggaattcctatgagagtaaggaagggagggtagctacaaaaaggtctcaaagcctcagagcagagtaaatggcacagtgtaccaaaagataatgaaaaacacagaaacacactgtacagaaagaaagtgggaaaatactgtcctgggtagagaagttataaaatgttaagtatcaggcacgggtaatgtttttgtttttcctgggaaactgggggtgggggtggggggggtaggaaaggttgcattcccaggcaaccaccctgaaaataaaccactgcttaatgaggtaggggccaggaataaacaacgggggaggggagggctggctcattacctttacagacgatgctggtcagaggcactgtgccttctgcttctctgataggtgggcagacctcttcctgctttcgcgtcttcttcagccagctcaaacctagaaaaacagaaaccagtgagtggtgtagtgtctcagaggtggggaggggggagctcaggaaaggggctggagagtggcaagggcaggcaagaaaaagcagagattttcctccctcctaccctcccagccagcactcttcccctcgggggaagtaaaggactttacctgtctcctcagctgctgcttctcttcctcctttcagcctcctctacactcaccaacttctccattgaagaaataccccaggcagggccggaccctggtgttcctgatcctcctcggtgcctcacggccccagcccggcgaacatccgaacagccgagaaggcaggaggtggcgatcccggccgccgggcagccttggggcagaggtgcagggaggcagggaggaagtcctggctcgggtgggggggcagtcccggtccagggctcggagcagggggctgccgcgctccgggccggaggcttccagctacggagggacccaggaggtctcgggacggcgaggtcccaggtcatacggggcccgaagtgccagccgtggggtctccggacagggggctttcgggatgcactttgcactgggccacccccgccccctcccttcagcactttggggtcactgggatgggaccaagccttcaacaaccaatcagcgcccgcagtggagcctgagcctggagccgtaaaccaggtccgggatgggtgggggtggagggagtagggacgacttggttggttggttgcttccttctctcctccttacccccggcagcccccaccctctgcctgccgtaaagttgcctttgcattcgcgacagttaagggaggcgtgccgaacggggcagagattcgtctccgattggtctcactcacttccccttacagcttccccgtggtggcttccgaggctccgcccctggcggagggactcaaagccgttgctaagagacactattcgccgaaggcggtctctgcgcatgcgggaggaggtgccagcttgtactttctgtgaactacggtggcccagagcgggcatttgtgttccctcaaatggcggtgtgaagagagttcgcctgagccagatcccaggcaggtaaccgggaccggccgccgtgctggcagcaggggaggcacgagtgcggccaaatgagagcctggttcagggcttaaggttgggagggcggcaggctccaggaagcgagtagaggggtgccttgtttctccgcccctgttca

SEQ ID NO: 14802 - DNA, 2300 bp, Homo sapien
caaactgctgcaggggaagtagcaggggcagagagatgggcggccaacccacctgcacagggcctcttacctccccattccctctcatcccagccctggggcatgcttggaggttggcagagccttgcaggaactgactctggagattctcagaaggaaaagcaggagagggagtttccagagattggcggggaactgaggggagatccctgtgactgaagcctgcttagcaacatgggaatctcctgccatcacaggatgccaaaagggtgcgaggcaagagagacaaaaggtaaagtaacaaaggcacctgatcaaagccaggggctgggtgtccctggctccactttacacaggaatcaactgaggctcactgggtgaggctgcttgacccctaccactctactagtcagtggctgggccacactttagaccccggcctgcctggctccccacagcagctgccgcctctgcatggacaccaccccagcctggcgctgggtgcagttgtgcgggggaagctgcagcctgggcaggttgggctcttgtgttgctcccagagcagctgacctcatcccatctgggtgtgtggggaaggcagcaggtgtggtgctgggagggacaggagcccgtgttcaacatgtctggagaaatcagtgacaacagaaatggcacgcgatttccgtatggagagcaaagccaccgaggggtttctccggaaaagtcagggggatggcatcgattgctcaaggaggatttagcaataggatggaaggaagcctacacgctggcgtcaggagcacgctcaaccagcacaagaagcgcacccaggcggcaggagccacagccgcctccaggtgtccgtgatgcgccttcagcgggcgccgcagctctagctgcgcgttagggtccccggagaagttacaaagcgagcgcataggcttgggccctattcaatggttctgccttaattgctctggggagaccccggcaggggcatgtttttgagtttcaggactctgctgtgtagctgtgatggagaatctttctctgtgggctcatgacgcccacccaggtctgctccccaccccgtcccatgaagtcttctgcctccagggtggcagcaggtcgaccaggggccatgtgagctggagcaggccgatcctcacctgggtctagagaggcgatctggccaggtgacccgtgaggctcctccctggggcaaaatcttcgtgaagggtgggccggagaagacgtgaaggcaggtgggacgcacccacttcccagccctgagggactggagactggtgtctcagccagctcgggctgccgtagcaaaacaccacagaatgggaggcttaagtaacagcttgatttttctcacagctctggaagctggaagccccaaatcaaggcgtcggcagggctggtttctctgagaccatcctgggcttgcagacggccgccctctctccatatccacatgtgatccttcctctgtgcctgtctgtgtcctaatctctttttcttgtaaggacacgagtcagatcatgttagggaccaccctaacgaccccaatttaacctaactgcctctttaaaggccctgtctccaaatagtcacattctgaggaatgggtttagggcctcagtgcatgaattcgggagaaacacaattcagcccctaacagctgtgctggaggcttgatgagacggccctgcctaatctaacttcaggacagcaagcacacacctgtatgctcacactctcacacacacctgcatgctcacacacacacacgcctgcatactcacacacccacacccacacactcacacacattgacacgcacacacactctcacacacacattcacacacacatacacacgcacactcacacacacgacacacactcacacacattcacacacataagcacactcacattgacacacattcacacactcacacatacacacacacatacacatacacacatatacacactcactcacacacattgacacacacactcatacacattcacacacactcacacacactcacattgacacactcatacaaattcacacactcacacacacgtacacacacacattgacacacacacacattcacacactctcacacacactctcacatcacattgatctagggatttcctcaggttgaaacgggcctgaccatctgcaaatgggcaggtaagtccaaatgcagaactgatcttcacttagggcttcagacaaaatctcaattgatgtaaaagcccattaaccg

SEQ ID NO: 14803 - DNA, 2300 bp, Homo sapien
attacaatgtagatataattttgttgtttaacctttcaaaaatgtggtttggtggataactccctcatttctagcatttacataattactaattgctggatgtcatactatacagttcacctattgacacacacgtgctttccagcttttccgttgtatgatccactgtaacgaacactttcacacatactgtatctttcttcagttatcttgggattagttcccaaggggccatattagtgaaatagtatggaatatttttatacatatcactaagttattactctcccaaagtgatagacccgatttgcagggccaccagtgccagttttactgcaaccttgccagcccaagtgggcaaatcttccaaacaacactaatttgcctgatgattaactattcaaaatgttatgtatttccttacagttactgtggcaaacaataaaacatcagaagaaatagaaaactgaattcagatgggattctagttatagaattttagtgctcgtaaagacctaaggagggggaggctggccgtggtggctcacacttgtaatcccagtactttgggaggccgaggcaggcagatcacctgaggtcgggagttcgagaccagcctgaccaacatggagaaaccctgtctctactaaaaatacaaaattagccaggcatggtgacccatgcctgtaattccagctactcaggaggcagaggcaggagaatggcttgaacccaggaggtggaggttacggtgagccgagatcgagccactgcactccagcctgggcaacaagaacgaagctccatatcaaaaaaaaaaaaagaaaaaaaaaagacctaaggagggggaaaaatgaaggaatctcttcaaactcagcctttacgcaaacacatgaaaaatcacagactcatttgtctgcagtcccaaatcaggtcattaagaaaacgtggtgggccgggcgcggtggctcacgcctgtactcccagcactttgggaggccgaggcgggcggatcacgaggtcaggagatcgagaccatcctggctaacacggtgaaaccccgtctccactaaaaatacaaaaaattagccgggcgtggcggcgggcgcctgtagtcccagctgctcgggaggctgaggcaggagaagggcgtgaacccgggaggcggagcttgcagtgagccgagatcgcaccactgcgctccagcctgggggacagagcgagactcggtctcaagaaaaaaagaaaaagaaaaaaagaaaacggggtggacaaatcgatggggaggcggctcaacctttttccttctcaggcagaagcccctgagtaaggccgccgctgccacccactgcccctgaaaggacatctgagcacagtgattccggtggtgccaggactccaaccagcaaggagcgtttcgcacagagctgcagagagtctgtgccttccaacgagagccgtgtcccgaacgccatccacttagctctcactctcctccttcctcctttccctgccgctttctgtttttcatcagggccttggaactcgctagtacagaccgactttcaagttaagtctttcaaggaaaatgactcttggtttccagcctggatgtgtcattacaccctcatgcgtctcagggaaattagcaacctgattcttgccctgactgtcatttaaaataaaaagctttcttatttgccatctaagacaaactctagtaaacccacagcggacgggtaggaggaatgaaacacagttactcgtattcagcaagttcctggggtcatatttacccgcatgtgtctccgggtaactggggggtggcgcgtgtttgccgttgtgatgcgggcgtgtgtgtgtggagtctgtgtgcgctggagagagcagtgtgtccccccgaggacctcggggtcccagagctgtgcacacgctgcccccctggacgtacagaaccagcaggtggcatcgctccacacaggccaccgaacggccctgccccgccccctgccacgccctgtgcgtgcatccgggtccccgcgcagtggctgcacgcagcccacctctcccgacgatccgggtcctcccgcccttcgcggtgattctgtcgcgaaccctctcacggcagctatgagactgctgcgctccccagacgaggaaacctggtctcccggagccaggtaacccacccgcagcctgcgggagagccgaggtctgcagccgggccgtcgggctgcctcttcccggggacccgggagcggggggcggggggcatggtggcctctcgggctgctccgaac

SEQ ID NO: 14804 - DNA, 2300 bp, Homo sapien
agtctgatctcaggctcccaggatcacgtgggtatcaaacggaggagctgcaggtgagccagtcggcatctttgcaactggctcctgagaccagacgcctcgggtcacaaggatgtctgagtgtgaggtgaggtggctttcattcctgacttcatagccaacaaagtggtgactgtctatctttgaccaaacaggctcgactatcttccctaaaggagcagagttctaagctcaaccccatttgcctcccccatcaatccagcaattatttaattaacacagtttcctctataaattttatttcagatttttttttaaaatcctggcagtgacataatttcaaccatcaaggacccccgataaagtctcaggatgggagttcagtttgtaaagcatctctagttgcagcttcctggggcctgctgcacacactggccttgggcccctggcctccatccatgcaggaggggtttgtcactactccctgacggtcctcttgggctcaggcacccaaacgctagggctcagcacccagccgggggccgtggcatagcacatctgcccagatgttttcaggagatctgagtgggagccatggggccagccaagagggcagggagccccggatttgcagaagcagctgaggaaagagctggcattgctcagactcgccagtgttagccagccgatatcggtcaaggctgccccgctcgagggtccattatcccctttccccggcctcagctgtgcactccaggccataacagcacaagacctttccacaaccccagggtaagggtcagatgtggggtttccaaaagcttcaaaacttacccctctatccagctctatccagaaggacaccaggggacagagagatggacacggaggcctcaaaacaggaaaataaggagacccctccccattgttgattacttggggttacctacagaaagagatgaactgaaggggctgagcctatctgaggattaaagcacagcttttgtcaggagtccgtgcctccggtctttgttccagcgacctgaggaatggcatgcatcagaagccgcttccgtgtctcagatggggcctgggtcaagtcctgggagttgatggagcgtttcccaaatcgcaaaaggagaggagctagacttacctccccctcctgggaagtaatgcgcgacaagaatttaaactcttaaaacgattagcagcaaaggtctcatgtgcttttttttaattatcattttttaatcgaggtataatttatgcatttaaaaaatcagatcaattgccccccgggctctgggatggaaggcggtgtgcgcctgcgaaggtcagaggcccagcggcgccagggctcctcggcggagagccgcccgggtccggcgctttgctttcgccttctgccccaccgcgggcgaagccccagggccccggggagactccaggccggctgggccggggtgcgcccgccggctgtccgcgctcgggcagggtggggcgcagcgggcgtctgtcctgctagcggggatcgggcggctggacccaagagcagggcacgtgcgcagcgacgcggggcggccccgccaggagccccgacccgggcgcggcgcagggcccggcggagagcgcgcattcccgagcgccgcgagccggccgaagtcgggcgagcgcgccgtgcggcggctgggagtgggctgcatgtgccgcgcggggagcccgcccgacttcggggaggcagcggggcgccgtggccccgcggctcagctccctgccgggtcgggtgtcccagccctgcgacttccggggcccggcggctcctcggggagctcgtccacaggcagcctccggggcgagagagcgcgcggcgcgggcgccgggacggtccgcggcacgcgggtggagccgccggcgctcgggctcccgcaggggcggcgggcggggcggggtgaggcgggccggccgccctcccctctcctccctcccgcagcccgccctcccttcctccggtcccgcagccaattaggcggccccctcgggcgggaggcgtggggcgctgcataaagcggcggggagctgccaccccgggagcgggctgcgcagtgtccgggccgagccggtgcgccgcagactagggcgcctcgggccagggagcgcggaggagccatggccaccgctaacggggccgtggaaaacgggcagccggacaggaagccgccggccctgccgcgccccatccgcaacctggaggtcaagttcaccaaggtgaggcgggcgcccctcccacccgacggccg

SEQ ID NO: 14805 - DNA, 2300 bp, Homo sapien
aacaaaaaagggaggctgggatcagatctctcgtaacatatgcacttatgttaagagaatttagacacattatttagagacatcccatttctcaatccaaatgtgagcaggaaactgtaggagaaggatattttccctcatttggtgtcccggaacatgactccctgaagggagccattctggggacaattggagggtgtggtatgcgtgtgcacacatgcatttgtgtgcctggtgtgcgtgtgggggttggcacctctctagaagtggaccctttgggatgtcctagcttctcctgctggtggatgaagcctttctaatggctttgctccttgctcctaggcatgagcttgaagggggataatgaagggcgtttaggaagttgctcaaggaagactgtctgaggaaactgcgtactgggctgaagaaagacaaccggaaaacactgaaggagcgctcagccactgcaccttcaaaaaggcagaaaagtcagttcagggaggtgcctcccagctaccccacccacctcaggaggggtcattccaacctagggtgctgagaatctgggtgggattaccagcaaaagctagagaaccatgggtcagcgacccttaggaagaagtggaaaggagtcttaacttacctgcaataaccttcctatgcgaagttgtggctaacgcatgcctaatggctagaattaaatgctgggaatataacgagctcagcacaggttatccgcgtgtcagatgttcctgctgtcttctacagtggggacatttcctagcctattcccaggctcctttagaagggaagtggaggtgccccatcttcacctgccgcgtcccctccagcgtctgcccgggccctgggcctgcgctccctcgcggtggcgccaggtggcggggctgcgcgccctggaggagctgcaccgccgtcgcggggctctctcagcactgaggacaccacgccctgcaaattgttgggaacttgtcggtggcaatcacactgctggctcctgcaaactggtgtgaggccctcaggggtgagaacaggattgcagaactgcgctcacccttttggaaagtcgtccagtggcagaagtagcctcccaggagcagagcgaagctgctcggtggtcccctctccaaccagggacccaagaagccgctcaagggaacacggccccgcggcgtccgggaggtcctgcaggagccctgcggctgccccggttctgtgaaatggcagtgagggtgggggagatgtgcgctaaatcctgggaacgtgcgagtcataactttccaggagaggggcccagggcgctggtcctgcagggcgtggaaccctctgctcttcctgagcaggctttgtccccgggtcgacacggggagctcagcgtgaggcccgcctgcagcgtggacgcagatcttttttatggtctgcgtttctgtattagcctcagcagcctggtgacgcctttataaaaggtcgaaacacgataaattgccaatattccacgttttatgtattccccccaaagccgacaattaacaatgactcaccgagcagcagattctttgcacacatccataattgaatcagtaaaatccatgtgttggaggatatgcaaattgcaggtcgttaacgctttagaacgacacatttctgtatcgccccgtgaagagctctacgcacatgaatgttccccgtctgtttaactgttacggccgcagtgtgtgggccgcaggcgcgctgggggctcatctgctgattttgctgcccctggagcagagggatagcgaaagcggggctgagcgcagcacggaccgatcccatcgccgcgctcgccccgcgtggaggcagccgggtgcccgaacctgaaggaggacccggtgccggaagggcccgcggaccccggcgtctcccggggcatcgagcgccatcgcccgcgttttacggccagggaaactgaggcggccgccgaggggacgcctcgcgacggttcctgggagagctggcggcggccttgctctgcgcgctcttcgcgccgccctccccgcccgcccgcctcaggattgaggaagtgcgtctgggcccggccccggcgcggggggcagacggcggtgggacggccaggccccggccccgccagtgtgtccgcccggccccgcgtcccggagcgcccgcacccggccccgccgccgcctcaggtaagcgccgctcctgccggcgccccccggcggcctggctgcctcccggccccgcccggggaacccagagcccgcgcccggcgcccgcgggga

SEQ ID NO: 14806 - DNA, 2300 bp, Homo sapien
gtgtttaatgggtttgggggcatccaaatatcttggagctgcaggccagagaaatatgttgttctcaatcccagatgagcccaaaaagggtggaggagagaaatgctccatgagtctgaaaccacaggtaagttagggttgtccattccccatccagtcactctaccaccatgcacggggtatctccctgtacagttatgggaatgagggcacagcaataagcaagacagatcagtctctgaccccaagagctccagtggagaccacaagataattaaggagaaattaaacagataaagaaggagtacagaatggggactgcagggaggctgcagagtgagggatgtgagagggagcgtgggttttcagagggtgaccagggaagactttctgaggctgtgtgaagagtcaggaggcagcagtgcaggggaccagtgctggacagcaagctcagccagtgtggcctggggcaatggcctggtggtccgagacagcagaggctggatcagctgggggtgtgaggagaaggaggtctcctggattgcgtgccagttgcaaggagaagctactgaaggactccataaagaggactgatatggtctgatttacccatttaaacacacagacacacacagacgcacgctgctatatagagaatggaggaagggggaactgaaatcctacagtaaagagatgctggtaccctggacaaggggcagggtggggggtgggggcataagaaaaaggggacagatcaggacacattttagacatagattcaacagactgaatgttttttatctgaggatccgagttgactgcgaggtcactgccagagacatcgacttttgggagagggaaaggtttggctgaccgcaaaacctcctttaggaacaaattaggtgtgaggttagtttgttatattattttctctttcaggacataggcaaagatgaagagaatcaaatcataaaaggcgtttaatgttaacattttccaaaattgtgcatgttctagctatccctttaatgtctgggcattttgataccctgtgagtggctggcaaactctatcattagtgtacacggtgagaggtttgctgaaagctatatgcccccgtttctctacctgttgcaggggaagtgttcgtgggagaaaaacttcgcggcctcatactgtgaaggggtaggttgagatggccacgggggttctcagattctccaccagcgtctcctcgctgaccccggccttcctaggcttccttcccgcgtccctgcctgccaggaaggtcccctgtagcttgcagagaccatggtagacagagcagttgtatctgcgccagccagagaccacctgggcaagaagcgtgacccagacatcgaggagggtgaagcctcgctgggccgccccgcaaccccaggaagccccggaccagcgagaggctcccgggcggtctcttgccgacaccccggcacgggctcacccgcgcgctcacactccgcccgctccccgctaagggactgggttcgctccaaaggcagaggaaacctatgggctccccggctcgtgtctcccgactcgtgtctcttgcctccgcttcccagctttcccgaccctgcccggacggggtttcggggttccctgctcgggccccgcgcgctcccctcccacaggctggctgggctccgggcgcggcgggaggcagcggggacgtgagaccggggtcgccccacacgccctccgcgcccctcgggccgcggcccctgcgcaacggccccccgtgcccgaccacgcggccgcccggagcgcaggggcccgcgggcaggcagaggccgaggctccccgcgggcgccgggcgcgggctctgggttccccgggcggggccgggaggcagccaggccgccggggggcgccggcaggagcggcgcttacctgaggcggcggcggggccgggtgcgggcgctccgggacgcggggccgggcggacacactggcggggccggggcctggccgtcccaccgccgtctgccccccgcgccggggccgggcccagacgcacttcctcaatcctgaggcgggcgggcggggagggcggcgcgaagagcgcgcagagcaaggccgccgccagctctcccaggaaccgtcgcgaggcgtcccctcggcggccgcctcagtttccctggccgtaaaacgcgggcgatggcgctcgatgccccgggagacgccggggtccgcgggcccttccggcaccgggtcctccttcaggttcgggcacccggctgcctccacgcggggcgagc

SEQ ID NO: 14807 - DNA, 2300 bp, Homo sapien
aaatgagtactcagacacaggtgtacggtgtaagagcagctgagtcactgcctggctctgttggccagagagcagcccgaagaagctagagctgcttgctttcattcagtgcaggcacaatgccgaaaacctggagccaacacaacctgtaggtaattaacatttattgttcccctttcagggaacatcaagccagcagatgatcaaaggtcagttcctggtcaacataagtaaacaagcctgtttaagatacattcccctacactccttgccctctgccttcagctgttctcccccagggctctgcagaagcttccaaactttcagaaggtttgtgtcctttccctgtagtttttcctacgactctgaccaatctcctacatttccaaacctctctgagctttggtttcctcatcttaaaatcatggtcctgaaatataatgcctgcctccaaagactgacacatccccatctcaacagaagttactagcatggttactgtgtttctcttacccagatattcttgtgtaagtggattaggggtcacttattttctgttaacatacctacaaatcattaattctggttaacagtagagggagaagaagggatatttacttggcactggctccagcctcagccctatgctacatgctttatttggtgaatacagggccatcctgaccccggtttcctgatcaatgtcctgtcgcgaaggagagagtcactctctcctcacttgggagcactttgatccctaggactatgtgcctctggaaatgaggcagtgttatgatgcatttgggaagtgtccctgcagaagatgaggtcatttttccatggcaactagacccaaaagatattgcactattttgaacttgaagatattgtaacatttcagcccacactgcccccgtcaattcaatgtgctaagtgttatttcatcctggaattaagtaggtggttctactggggagaaattgtcacttttaggcctgacagatctttcaccaaagcttttattattattattcatgaaagtaatatatgtatattatagataattttaaaatgtgggaaagtgtcagtactttaataatacaatgacacaacatcatgagttagggtttattgatccaggcacttgacatgcattttgtgatgtagtcctcacattaaacttggaagaatgagtattattattccgattttaccaacaggcaaactgaaacagagagagattaagaaatgtgtccaaaattacatactaaattattttatttctaaaatgcctgtctccaaagttcatactcctgcatgtaatgttaccctaggggaggggtgagggcaggggagagcccagagaaaataccacaatgctggggtagttgtttctagtcttatttccacacacccattttttatttggctaagatcatgctggatacgccatttttaatcctccatttcatcactcggcattatctgacaagcaggtgggtgactgatgtggggaaatgtcatatgcaattcagagagactattccagaaaacactatcaactcaacagaagcaactttcagctggaaacaggacagctgggttttgttttgttttgtttaacttttactttaggttcaggggtacatatgcaggtttgttacgtgggtaaactgcatgttgccggggttcggtatgcagattatttcgtcacctgggtaataagcatgggactcaataggtaattttttaaccttcccccttttccctccctccaccatcaagtagtccccagtgtctattgttcccttctttgtgtccacgtgcattcaatgtttagctcccccttataagtgataacatgcagtatttggttttctgttgttgcgttagttcacttaggataatgacctccagctccatccatgatgctgcaaagtacatgatctcattcttttttatggctgtatagtattccatggtgcaaatgtaccacattttatttaaccagtccattgctactagcggtctaagggaagagcagagtgggaacaaacagcacccttcagtggcactttccctttgtcctgccatctcctgccaggtccctgcagtccccagcggcttctgaactggatgctggccttggcttgccagcgagggcacctgggggttgtgaagctcctggtcctgacgcacggggctgacccggagagctacgctgtcaggaagaatgagttccctgtcatcgtgcgcttgcccctgtatgcggccatcaagtcaggtgggtttccccacta

SEQ ID NO: 14808 - DNA, 2300 bp, Homo sapien
aactttttttttttttttttttttttgagatggagtcttgctctgtcacccaggctggagtgcagtggcacaaactcaactcactgcaacctccacctcccaggttcaagtaattctcctgcctcagcccccccgagtagctgggattacaggtgcccaccatcacgcctggctaatttttgtatctttagtagagacagggttttaccatcttagccagcctggtcttgaactcctgaccttgtgatccccctacctcggcctcccaaagtgctaggattacaggcgtgagccaccagcctggcgcaccttgccttttcaattgatgggtagctcttgagtattacttcatacccccatatatgtagacctgccccatactttgtaatagctgcaattattctattactcattgaaccaaccccctgtggctggacacataggttgttgtagattgtcctctatctctgccactgagtgtcctcattctcacatctttgccacacatgcatgcaaagctatctgtagaatgagaattgctaggtcgatgaggtgagcattttgttctgataggcttgccaaaatgccctctggaggttgcatcagtttatacgcccacctggtcaccacgctgtgacggtccagaattatttttaaatgcagtctgctttgccatgtctttgcagcaagtgtgctggaatttccggccttcctaagtgagtctttggaagtcctttgcctgaacgacaaccacctcgacacagtccctccctcggtttgcctactgaagagcttatcagagctctacttgggaaagtaagtacacatctggaggggccgtgctggctctgctggcccagagaggcagaacgcccatccctaaaccaactgggacacagaaagccaggcagaaagaagccatctactttccaagaagcagtagtgagattttcggaacagggcttgatcaaggaggtggggagagaggaagacggagtagcaatgcaatgatacacactttcactacatcacttgggctgtgatgaggagaaccactcaatcattcatcctttcattactgagctcccattgcatgccagctactgccaggggttctaggcagtgtgcaaagcttgatgagagtgtaaaatgttatattaatattaaagggacatcgccttctcgggaagaggtagtgatcatctttatggggatgtacttagtagcagagacaggaaagttgggggaggggactcaattctaagccgtggggatttgcagaagacagagctgccgtttctatcactgatcctccaggagaaagcctttggaattagtgttgaaatcagggctcaaagtgtggggtctggggtacaggctgcagaggctgacaggagccacgtgtgtgcgtgtgtgtgtgtgtgtgtgtgtgtgtgtgtgtgtgtgtattctctcgtggtggacacatctgtcttcagcaaccctggcctccgggagctccctcctgagctggggcagctgggcaacctctggcagctggacactgaagacctgaccatcagcaatgtgcctgcagaaatccaaaaagaaggtagggcttccgcagccctgtcccctgccatcacctcttggaaagacaactccagtccacttgttaagttctgggggtggagacagttggtgacccatggagcccagctccaggttccagatttgacaagatgctataaaattgtccctaaagcaatcgttactgagggtcactatactgagaaggaccaggtgatacaactgtgacctcctgggcagcaaggattttgtccataggttcttgcctcttagagttcgcttttagggtggttagtgtcatgccttccctccccctgatccagtagtcttccttaactgtccccactaaaacacaaagaaggagttccttcacaacaggattttgtgtcctaagagatgtgagcatgtgcccacgcagctacccttccccttaatgattttgcacaggccccaaagcaatgctgtcttacctgcgtgctcagctgcggaaagcggaaaagtgcaagctgatgaagatgatcatcgtgggtcccccgcgccagggcaagtccaccctcctggagatcttacagacggggagggccccccaggtggtgcatggagaggccaccatcaggaccaccaagtgggagctccagaggccggctggctcgagagccaaggtcaaggatggtctgcgtgcagagtccctgtgggtgggaggaacatcccttggactccttctcccttct

SEQ ID NO: 14809 - DNA, 2300 bp, Homo sapien
aattcctgctttgcccttgagaaagtcccatggggtctgtgataagaggagtcctggctctgggtcagaacccaagtccagcctgtgtgagcctgtgcctgcccagcctgtacccttgggggtctcggtgtacctctgcacctcactttcctcctccgtgaagtgccatgtttagtctgggaagacagactaaagcgacacagtgtggggcacccagcacagtgatttgcacaaagcaaggcctcaataaacttcttgtgttgtctttcacgagttctccagacttgccagcgttcaggacaaacctctcagggaaacagagaagcagcagcgcttcctcggagtggggcatgatgagtaaagacgggtctttttgctcacagtgagatttcctgcaagagcctggaaggtcaggaagggctgcgacagctgattttccacgtcacgtgcagcatgaaggacgtgggcagcaccatcggctgccagcgactggcagggcggctggtgggtaccttgctggtccagtttaaaccagtctgcctgcttcccattgttgggggtcctcacttccccctctctcctgtgaagcccatgtctgtgtggcaaggctcggtggttcctggtgagggagggtcaggatggaagatagtgggtggaaacgtcccaccccctcaggccacaggggccgggcaggatctgcccaagctggcaggtgtgccttgggacctgagagaccctgcctcgcccaactgtcccccagatccccaggagctacctgagcctgcaggaggccgtgctggcagagcagcagcgccgcagccgggacgacgacgtgcagtacctgacggacaggcagctggagcagctggtggagcagacgcccgacaacgacatcaaggactacgaggacctgcagtcaggtgggtggggctggggtaggtggcagggtgcccgtgagaaatggaactgtctgtacttgctaacttcagcttggcctcagtaatgaatgagagaccgacacccagcctgcgtttctgccttccatccccctccccttccttcttccctctcacccttctttccttggagggagagaacacaaacagctactctacaccagcattgtgtttgccacgaggacagacatacaagctgatggactggcgcctgccctccggggctgatattcagtcagggagacagaggtcaaacagttacaatcgattctcattagccacaggacttaacgttctgtaaagtcaccgcgatcactgaaatagcaaatacggaaccagtgctcctaggagagacgcagcgttgggctcctgcgagcctctggtcaccacatactcaccagcccgtcagtacagaaccttgttttatgtgtgttgctgcgtaaagatgccatacttaatatatgttgttgatttgttggcattgaactcacggctgacagcactattgctcattcatgaacaaagcttatctaacacacaggtttcctccataaggcacatcgcagccttctcacgcttagggaactacacagcgtttcagcacttcactagggaccattttgaacagtgaaagcgtcaacaaaaagcacaaaaattcaaaaaacgtggcactgacatagaccactaagcaggcagctgttttcagcatgagagctgagagagttgtcctgttcagcctccgctggcaacgtgcacattggtcaatgcaaatttttcaccactcagcacatgtctgcaaataaccgcaggagtgctgatttggaggttgcagatcaatcttagcaagaaggtgaatttgcaaaggcaaaatccacaaataatgaggatcaagtgtagttacccaggcggccatcagcctaggactttggcaagagttaccaggggccaccagggcacctgtgatcaggctgccagcccacctgaagggtccagcatgtgggacatgttggtttcttctcaggaataatttgtgacctgggtcctcttggaaagagggccaccccagagtccctttcgctcctttgtctaactgctgcttcctcctctccttgcctggggcagccatcagcttcctcatagaaaccggcaccctgctccatttcccggacaccagccacggcctgaggaacctctacttcctcgaccctatttggctctccgaatgtctgcagaggatctttaatattaagggctctcggtcagtggccaagaatggggtgatcagagcagaagacctcaggatgctgctggtggggactggcttcacgcagcagacggaagagc

SEQ ID NO: 14810 - DNA, 2300 bp, Homo sapien
gttctgtacacatccaggaatagtgggacacgtttcatctcagcacaggcataatggttcccttgagccccaggcaagtccccgctcctggcatcatcagctttctaaggctgctgggatccctggatctgtgcaaacagacacatttgcggctcctctcagagcatggtttcccacctgcagtgaacccctccagcccctcagaaaatctccatgaactccctggaagtaccatacagttttaagcctttgtgcttctttcaggaggaaggtccttgcctctcagcagactctgagaagggctgcggcccctgtctgaggctgtctcagtggggtggcatgagccagcacctccgtgcagacactgtgccctgccagggtttcactgctttacgttcatcaaacacatgaagaatttacctcttaggacctgtcctgccgactcactggtcattccctgggacggcctttcccagctcgtaattgctctgaaacccggagccagcggcctccactacctggagaccactgcttcccttgagaactggcttctgtggccactcaggatctctttatttgccatgtcaccttctaaacctctgccctcaaaaacatcatggagcacctcttctgtgtgccaccgcacatcgtgctgggacgcctggggacagagaatgctccccccactctctaagcacactccgacaaggagaagagcaagacagacatggggcaccaccactgtaagagggccacatgagagacccaggatgcatgagatgaagtagaaaaagcagaaagaaacagcaggcacggcccagggcctcctgtatggggaacaaacactgagcagatagagaagcaaggacttttcagatgtaaaggaataagacaggacactctgatgaagaggcatctagcgagaggttgggaatgtcctttcactcaagacctgaaaggctgaaaaggcctcctgcttcaccacctgtgtctgctgtgtcatctgcacagcccccgtctaccttcaccagccctgccaagaggggatcctttctctccccattgtatacccatgtgtcagagcgtgtaagtgagagccgagacttgcgcctgtatgctcgggccatgggctgtcactgaattttcttacagtttagggagtcttttccagaaagttctaaggacatttattggactgaaatagatttaagattaggagagctgaaggtaaaacctttattgggaaggagtgcagcatctgcacaccaggggccgtcctgtacctgtccagtgcctgcccccgcagccccacaggatgcagccgttgctggttttcgggcacccttttggagggacctcccaggtttcagccgtgaagcccttgccgatgcaatgatgcagcatttttatgatgaccgagagtgttctcgtaaaacatccctcttccgcacaaaacaggcctattctaacttttaaggcaatcgcgtcgtgtcaacgggccaagaataataaatagctttaaaggccaaaaatgttactctgaccctaatatctgcattgtccttgaaaccttgcagctgtgtttgtttttccttcatcaaccaaagttaatgttatttccccaactgcaaccccgtttatagagaattgagtcccatttgctgtgtctgacatttttaggaccatgatgttttcatgtcttcccttagccttattctagtatcttagaaaccatgatagactcatattaatgggaccagtcttcattttcctttggagtatttattcttagcatataaaccacgcttctcttactaataacagaattccaaaggccctgggaggaaggaacccagcagcctgaggtgttccagcacagcctgtccccagatcaggccatctgctggggtcagggccctgcagtggagcttgggccccactgttcaccagtcccccttggtgtgtttcagctacctcctgccccatctccttccatctaaacctggcctggacacccacggtatgcggcaccccacagccaacaccattcagagggtatttaagatgagcttcgttcccgttggcttctggcaaaggtttatagcacggatgctgatcagcctggcggagatggacctgcaggtattatggctgcggtttctgcatagacagatgcccgagagccacctacagttgtaccactgggggaggggaatgccctttgctggggggccctgcctggagacccttctcctagagccatgccaccaatgtagtgccagggggcaggtgtggcatgg

SEQ ID NO: 14811 - DNA, 2300 bp, Homo sapien
cggtgactgagtttcgtctatgataatttgcactcatttctgcccctgcattgcccttcatggacattgtaaacctgatgtttctaattgtaagaagggtgccttccccactgccgtgatggttggaggatagctcacacctagtctgcgatgacctgttagggcccagtcatgcaggagggatccccccactcctctcaggccccccagccagcctgctcagtgtcccgaccactggacagttctcggaagcatcctgaaccctccctggacacatctttcaggacaaacaattgcgctctccaaaaaggcacccgaatgtggcagtgggtttcagcctgtctcttgggtacaggccaggacaggcagctcccctgctgcgaaggcctcagggcctggggtgcagagtgctgctcggggggccctcctgcaccaccttcttgtgaagctgtctcctgctctgtccttatttagccctgacagccacagagagcgacgggacgccactcatggagcagtacgtgccctgcccggtctgcgagacagcctgggcccagcacacggaccccagtgagaaatcagaggatgtgcagtacttcgacatggaagactgtgtcctgacggccatcgagcgggacttcatctcctgccccagacacccggacctccccgtgccgctgcaggagctggtccctgaactgttcatgaccgacttcccggccaggtatgccccgaaggcccctcccagaacacagtgcaggtcacagggggcgttcctcgctgtgcagttgccgagtgatctccaggaagacccctctggggcgggcaggtgccccggccatggcttcccaccaatctcagtaccttttaggttcccatcctcggctgcctgaaaggaaccaggctgccggctttccattttggaggccttgataggcccaactgggaagagtgctttgcaagtgcagccatcctgcctccccatacggctcccccttcccctcgtagccagagctgctctctcctgagctgcctctcctttccactcctacctccccaccagctctagggccagcagataagtgcagccagtgctcctcaagcattcaggaaggggagagaagggagagctcccacccagagccttgtttaccttctttgtcaaacgctgactcctgtctgtagccctagcgctgagctcccacccagagcctcgtttaccttctttgtcaaacgctgactcctgtctgtagccctagcgctgagccttggacccctcaaatctgttcttagagtttattgtacctatgctaacccaagatcataactagagagagaatcggggaggaaataggaaacgtcacctttcagaagaaaacttccaaaggggtcctttctctacggccaccacttctgtggggttcaccctgtgccagccatcaccacctctgaggccgttcctgtcctgagagccctctgtacagaggagactgaggcttagcaagcctgcataacctacccaggtgtgctcacccacaagtggcagggccggggtggcccagatctgtccagcctcacagatggctttgaaccatgactctcggccgttggggcaaatgacccagcccaggacccacccgcatcagggcgggggggatgtggctgatgccgggcgtgtgtggcaggctcttcctggagaacagcaagctggagcacagcgaggacgagggcagcgtcctgggccagggcggcagtggcaccgtcatctaccgggcccggtaccagggccagcctgtggccgtcaagcgcttccacatcaaaaaattcaagaactttgctaacgtaccggcaggtaagcgggtcccaggttggtgctgtttttctcagacatatgctgcccgggtctaagctctgtgcggccttagagaggcctgaggctgcaggcaccccatgtcctactggctgacactgcgctgtccctggcagacaccatgctgaggcacctgcgggccaccgatgccatgaagaacttctccgagttccggcaggaggccagcatgctgcacgcgctgcagcacccctgcatcgtggcgctcatcggcatcagcatccacccgctctgcttcgccctggagctcgcgccgctcagcagcctcaacaccgtgctgtccgagaacgccagaggtaccgcggcgcgccgccccacccggccccggagaccgacagagccccgggcgcctcctgcctggcacggggggtagagcctcaggtggccttggcaagcccagggcacgcccaac

SEQ ID NO: 14812 - DNA, 2300 bp, Homo sapien
cggcagtggcaccgtcatctaccgggcccggtaccagggccagcctgtggccgtcaagcgcttccacatcaaaaaattcaagaactttgctaacgtaccggcaggtaagcgggtcccaggttggtgctgtttttctcagacatatgctgcccgggtctaagctctgtgcggccttagagaggcctgaggctgcaggcaccccatgtcctactggctgacactgcgctgtccctggcagacaccatgctgaggcacctgcgggccaccgatgccatgaagaacttctccgagttccggcaggaggccagcatgctgcacgcgctgcagcacccctgcatcgtggcgctcatcggcatcagcatccacccgctctgcttcgccctggagctcgcgccgctcagcagcctcaacaccgtgctgtccgagaacgccagaggtaccgcggcgcgccgccccacccggccccggagaccgacagagccccgggcgcctcctgcctggcacggggggtagagcctcaggtggccttggcaagcccagggcacgcccaacccatggctcgtgtgaccatcccctggctgcgaggccaggctccccgccaggtccagtcactaggcagagccttggcgaggacgggggagcgcacactctggagtcggctaagaccaggctctgccgcggtccggaaagccgctgagtttatttgcctgtaaaaggaggatggtaacaggcctcgctgggagggcaccgagcacgggagctgcattgaatcactttcccaactgcacacgtacacggctgctgagactctgagaccgcagggtcagtgggaccatattttaacataaaatgtcgaagtaatttaccttgagaaaagagcagctaaactccagagtggccagagggtgaaaggtagctgtcttttgactaaggaagaagaaatgctatgaaaatcaatcacttctgcctcaatggaagataattttttaaacagaattctttacttttttttaatacaggatctcactttgttggccaggctggaggacagtggtgcaatctcagctcactgcagctttgacctcctgaactcaagccatcctcccaccgcaacttcccgagtagctacaagcacacgccaccacacccagctaatttgttgttgttgtttgtagagatggcctttcaccctgttgcccaggtcgttctcgaactgtgagctcagtcgatccccccactttagcctcccaaagtgctggaatcaccggcatgagccacacgcccagccaaacaaaatgcttctacttgcctctcacccctttacgtaggacagccttgacctgaggtgaactctagagatttcgaacccttgctcattcagcaaaatgccagcaattccaggaataagatatcaggaatgaagctacagcgatgagcatttctatcctaaatactgtttcacttaaccaggccattctctgtcctttatggcagtctggtgaatagtgagaatgtgtcaatggaatataaagtatctaagggccaggcgcagtggctcacatgtgtaatcccaacactttgggaggcccaggcgggcaggtcgcttaaagccaggaattcaagaccagcctggccaacatggtgaaaccccatgtctactaaaaatacgaaaattagccaggcatggtggcacgcgcctatagtcctagctactcaacttgggaggctgaggcaggagaactgcttgaaccctggaggcagaggttgcagtgagccaagaccatgccactgcactccagcctgggtgatagagggagactctgtctcaataaaagaaaaaagaaaaaaaatcataaagtatctagggagatcggaagacaaaaagacagttgttatcatgataatttgattctatcaaaactgaaattttgatacatttgaaaattgtttttctttgcaagattcttcctttatacccctgggacacatgctcacccaaaaaatagcctaccagatcgcctcgggcctggcctacctgcacaagaaaaacatcatcttctgtgacctgaagtcggacaacattctggtgtggtcccttgacgtcaaggagcacatcaacatcaagctatctgactacgggatttcgaggcagtcattccatgagggcgccctaggcgtggagggcactcctggctaccaggccccagagatcaggcctcgcattgtatatgatgagaaggtacgtgcctggatcccctggcccagccccacagtgtaggagcccagccctcaggctagcc

SEQ ID NO: 14813 - DNA, 2300 bp, Homo sapien
tggctcatgcctgtaaccccagcactttaggaggctgaggcaggtggatcttttgagttcaggagtttgagaccagtctaggaaacatggtgaaactttgtctctacaaaaataaataaataacaaaaattagctgggaatggtggcgagcacctgtagtccctgctactcaggaggctgaggcaggaggattacttgaacccaggagtttgccactgcagtgggtggtgattgtgccactgcactccagcctgggtgacagagtgagaccctgcctcagaaaaaaagagaagttattccaaaacacagcgatggagcacgccttcctgatgggatgtactctaaggacaaaacaaaaagcaaacatattaattaaacaggtttcagtaattatattgttggcagcactgttatgattgttactctaagatgctgcttgtggttgtggagtcagttaatgagtaattatgttgctgttgctggaaacatgagctaaaggggaaagagatgtaaagtcgggtaagtaaaagcctgcagttctgaatcgattggatagactcgtgacatagttgaaaaataaacacaaatatctcagttctgctcactgaaaaggcctaaaaacaaggaccaaccaaatgccaatatgcacccctaggacccagactgtggtctctaagtaccaaagtgaaccagggctcatcagaatcatggcagagtccaggtccggggcagggagtgcacctggaacatctgccaccctagaagcaaggacatcgtcagacttctgagggtgaattggaggaccttgggccagactggtcctgggaggctgggccgggccctgccctgctggcctagagacacacacgcggcaggtacctgagacagttccgctcagggctctgaagactcatcccagagggaagacagaggcctcttcctgtgacctgtgaaggttctttaaaactcactgcggcctgaagagagactcactcacaggaagggaggagggggctggctgggagcacacgggcagccaagcaggggagccaggatggaaccggacttgacttgagatctgtctgagaattaaggaaggaaaggaggcaggagaggcagggcagacgagcaggtaaacaggatacgcctaggacacaattccagttgcagggaacaggggcaattattctttatgactctctatatttttaactgtttgttttcaaagtaaaagctattcaaatatcttagttttgtttttctgatgcataaaaaaatgatgggaaaaggagacaaatacacctgaaggaagtttttgtttgctgtattttctaccatttctatcatctgcaaatacgttatcagtcaacagctttttaaaatttggtggcaggagaaactttatattgagaactgctatccgcgagcttaacatattctcttgagtctgagggacagagctgcgtgatgcggggtacataacttcccagccccatcagcttcagcctcctctgccatgcagtgagtgctcaggatgcccgccacagcctgaggggagacagcgatgccggggacagccggcctggtgagccaaggctctcgcaaatgacaagccattagttctcagagcactcgtgctgggagcacattttgagtgcccccccgccccaacccaatctcctctggaattctcccaacttgtctttagccctggctttgtctactctacagtgaggagctccccgcataacaggggcgggcaggatatggccggcgggagggcccctccttcgtactgggggcaaccgtctcaaccctgaggggtcacggaaagaggacagcctttcttctctggcgaatgcccttcctgcgggcgacggtcaagcattacccttcgggcagaacccggctctgccctctcagaacacaggatgcaaccctgggtgggagcaggggaggtagacgaggctcgcagctggcaggccaggctcagggaaaggaggcagcccctggcccccgggcactgacagcacagtttctgccacttacaggaactacacggtggtgaacacagagaagggcctcatggaggtgcagaggatgtgctgccctgggatgaaggtgagctgccagctccaggtccagagatccctgtggacagccaccgaggtaagcactgcccgcaggcctgcccaccgaggtaagcactgcccactgggtgcagccctgggtgggggccacattcataaaaatacaggacgccaggtcaagtgaactttcagataacccccagcgcatcc

SEQ ID NO: 14814 - DNA, 2300 bp, Homo sapien
cccagatcccaatgttggttttctctggggaatagatgacgggctattttctgtttcctctttagactagtctgtctttttcaacgtttctacaaagagcagaaatccataaacaacccaccagaacgtgtcaatccatgtaactttccaagacccataggggatccccaagtccaagtgcatcctcatgggaatggcttgggaaatgccagacactttccagcctgggtctcacagtggacctgtctgcctctgcaggaccagaaaatctacatctacaccctcaagggcatgtgccccttaaacacaccccaacaggccttggatactccagctgtcgtcacctgcttcttggccgtgcctgttattaaaaaggtgaggtcggggcaaaggcaggtatgcaggtctctgatgcacttccacgcctaggaggcgtctcctagctatgtcagggtggcgcctgcagagccacacctaggaccacctggcctaggacgtagacttagagacggtgggaggaaagatatcagacctggtccgtcattagtgccttccggtttgcaaaaacctaagtcaagtccccagccagactgcaggccgaatgaaaaaccccctttcacatgcaaatgccctgactcaggtggaaggactgttggtacaaatggcacggtgagcagtcatgcgtgtgcccttcccctatccggagcctcttccccacctgcccaggccagagccacctcacagccacttgatcaccaggtcctggaggtcctgatctccctccctccatctctgcctcccgccaagtactcgccgtcttacaccagacgcagtttctctttgtgcagcatagccctgcagactcagctctttaacctcctagccctggcctttctaaatgagaccccaaggggcactctccccattaaaggcccagccagctgtgctgcaccttgggattagccccagcctctatgaggctggcctccagtccctgctgggcccggcaccctccccacaaagcaccccactctgtgctgggcccttgacatcccagcctcctccaggaacagcccctccacgcacctcttcccagacggcctccgattcagttctcaagacccggggccttgtcccctcctttgagaagctgcccctcagtggggggcagctccctggcttttccgggctcctccgcccacaggattcaggcacggctcagccagctctggtttcatccaccctgaggggcctgtctgtgcataggcgccctcactaaatgcacaagaagcctttactggtgttgctttgttaaaatgtgactgtcatcatccaattccagtttgcccatctacaaaacaggtataagaagagacagaaggcctagcatacccaaaggtctaggccggtgtgcttggtaaatgagtattattattacttctggatggtcgcaaaatacatgaactcttctcttcacccttcttcagtttcatttaaaaaaaaaaaaaacaggtatgaaatgaaccttagagtcatttatgaccatggccccacagcgaggctacgcagcttgggaccaggcccgtaccagagcgcaggagaacacgacacaaagtgttattgaggccaccgctggcgagagcccccagccagggcaccacctcctgcacgaccagagggaataaagcctgctctgtgcagggcctcctgggcagggtgtctgccccctccaaggccgccagcgcgaagcctgcattcttgcacgcgcacccacgttcacacccagccgggacgtggcactcaccgccctggccggggcctgagccaggactgcagatagagacctggagcctgtttgccttggctgccttctttccctaaagtcctggggatggatttcgatacgctttcttagagcatgttgtcctggacagtgagctacgggtctccactccattgccctgcacagccagcctcctgagctcccccagctccccacaaggaggctttctgccctgccccctcactggcatgaggcccagctccctgctctgccctgactccagctttgttctgcagacctcttcccacccccaccacagccgacgcggtgtctaggctgcggagctgcactctgttcctggctctgccctgggaggtgccccggggcggtctggggtgggcccagcattcagcaaggtccctgcaactttggcctctgcccggtgacctctggcgggtgtagaagagctcatgcttcattgagggggtggggggcaccctgaggaccctgtcaacgt

SEQ ID NO: 14815 - DNA, 2300 bp, Homo sapien
aagcctttactggtgttgctttgttaaaatgtgactgtcatcatccaattccagtttgcccatctacaaaacaggtataagaagagacagaaggcctagcatacccaaaggtctaggccggtgtgcttggtaaatgagtattattattacttctggatggtcgcaaaatacatgaactcttctcttcacccttcttcagtttcatttaaaaaaaaaaaaaacaggtatgaaatgaaccttagagtcatttatgaccatggccccacagcgaggctacgcagcttgggaccaggcccgtaccagagcgcaggagaacacgacacaaagtgttattgaggccaccgctggcgagagcccccagccagggcaccacctcctgcacgaccagagggaataaagcctgctctgtgcagggcctcctgggcagggtgtctgccccctccaaggccgccagcgcgaagcctgcattcttgcacgcgcacccacgttcacacccagccgggacgtggcactcaccgccctggccggggcctgagccaggactgcagatagagacctggagcctgtttgccttggctgccttctttccctaaagtcctggggatggatttcgatacgctttcttagagcatgttgtcctggacagtgagctacgggtctccactccattgccctgcacagccagcctcctgagctcccccagctccccacaaggaggctttctgccctgccccctcactggcatgaggcccagctccctgctctgccctgactccagctttgttctgcagacctcttcccacccccaccacagccgacgcggtgtctaggctgcggagctgcactctgttcctggctctgccctgggaggtgccccggggcggtctggggtgggcccagcattcagcaaggtccctgcaactttggcctctgcccggtgacctctggcgggtgtagaagagctcatgcttcattgagggggtggggggcaccctgaggaccctgtcaacgtcagctgaaccacaggcatctcgatagatgtaagctgggatgagggctcagcaggctgagacaggcctccagaagagggttgagtaggaagcgatttcttccagaattagttcagcaaacacatgtcatccacttggagcaggagccaggtggagtcacagggccaccaagatgaaggagactgagcccttccctgtgccaggctagtgccacggggatgctggtgggctgggagcccatccttatggaacactctgcctggtggggggggtggcaggcagggggcagtgcacagatgcttgccatgcccccactgctgtcatgttaagcagcaccgagaaaagggcgggggcaccaggtcctgcctctgaaggaggccttggtggcctcaaggagaaggcagctccctgctgctcgccctgcaagaagctggcagaagcagaggcagcccatgtggtccaggtgacacgcagccttacttggtgccacaggccctgcctctgggtggcacattcctttctttgctgcagggatggtagatatggctctgcggagtcagagctgcacttctttaggagtagccccggcctttctaagagatttgctgccctgaggcgcactggtggaaagtgactgcccgcctggtgtgggtgcagatgagtccagtgcctactctgtgtctctcttggaatgtgtgaaatggaaggatgtgacacatccctgtctccttccttcagaattcctacctggtcttagcgggcctcgccgatgggcttgtggctgtgtttcccgtggtgcggggcaccccaaaggacagctgctcctacctgtgctcacacacagccaacaggtccaagttcagcatcgcggatgaagacgcacggcagaacccctacccagtgaaggccatggaggtggtcaacagcggctctgaggtctggtacagcaatgggccgggcctccttgtcatcgactgtgcctccctggagatctgcaggcggctggagccctacatggccccctccatggttacgtcagtcgtgtgcagctctgagggcagaggggaggaggtcgtctggtgcctggatgacaaggccaactccttggtgatgtaccactccaccacctaccagctgtgtgcccggtacttctgcggggtccccagccccctcagggacatgtttcccgtgcggcccttggacacggaacccccggcagccagccacacggccaacccaaaggtgcctgagggggactccatcgcggacgtgagcatcatgtacagtgag

SEQ ID NO: 14816 - DNA, 2300 bp, Homo sapien
aaaagggtatcctttctacattacgaaagacccccattaagcctgcaggtgagacaggtgagactgttaacctaggaactgagggacaactaggaaccaggatattgaggaggacaaaatatttggcatcctcagaatattattcccatcagatatttatatactttttttttttttttccttgagacggagtttcgctgttgtcgcccaggctgcagtgcaatgcaatggcacgatctcggctcacagcaacctccacctcccgggttcaagcgattctcctgcctcagcctcccgagtagctgggattacaggcatgcaccaccacccccggctaattttgtatttttagtagagtcggggtttctccatgttggtcaggttggtctcgaactcctgacctcaggcgatccgcccgcctcagcctcccagagtgctgggtttacaggcgtgagccaccgcgcccggccagcttttcactggacactagtttcgaagaaaactaggtaagtctaaagcaggttagaaaatactgaaatcgttgaatatgctacaaaattgaacatctgaatctggccagattcgtacttcatgtaaatcactgtgaatgatggggctgctgaatttgggggatctggtgactcctcggcatttgtggtttatggtcttagtggaaacctttttcgatggttttcgagcctgtaattcatggttgtatgttctgtatttttcccaagaccactgctggaatcctgtattcactgcataatgagtattttatttttagatgtggatcaccccttagggaggggctctgtgggaaggtaggtaatgaactatttttaatataaatcacaagtgtcaaagaaagtggtaatatccaaagaataaacaagagtgaccaccattcaggtgccgagaaggtatctgaagctcccacaggcattttaaactgtgtgatagtatttcaaccatttggtcaacaatgaagaaagatccaaggattgccccaggcatgtgtttatttgattcaatgcaggtaacttctcaggcccagggaaacactttgcccttcaaaagtttcattagaaaaccccaatatactggtgactaagtaacaagactgaaactctacacaaactttcgttgtatggagacctccgcttttgctgccttagctgaagtattgcagaggaaatgtataaaacttaaaatccagagtagaggatctgggacccaaaatccgtctttagaaatccacggcacttttacagacggactatattaaagtagggacaaagtcccaggctgggggtactagccggctatctgcccacacagtatgtaaatgaaagtagggtttaccatccagggcattaacttcattttccttgtcttcgagatccattaaatgctagtactgtatgagaagcgtggaccttaagtattaaagatggctttttcttcttcttcttcttatttagcgtagaaactagcaacagggaacaaggtaactgaattcacggtccactcgcaggcgcgcacgtccccagggctccgggacggctgttccctgcgtgcggccgcgggactgcggacaaagctgcagtgtggtcgggagcgcggggccgggagcgcggggccggcccggcggcaggaagggcgtggccgtggggtgcagcgaggacggcccgtgcgggaggaacgtgcgcagcgtggagtctgggggccgagaagcccccactgcaaggctggctcccgagattcgcgcccgggcgccgcggtgcgggaagcggccgtcctcgcggggacgcccttgcgccgggtgctaggtgcggatcacgggcagctccggccccgcgggcgccgggcgggggcccacgccccctccgcccgccagctccagtcgcagaccgcgcgggcggggcgcccgagagggctttttttttttttggtcaaacttcggccacgtgaaccgcccctcattcacttttgcgccaatcgcgcggcgcggacggatcccgagaggggccacggctcgccgccggcggggccacttcataacgcgccgtgcgtgacgtgaggggctcctgttgcaatggcgagctaagccggaggatgtgcagctgcggcggcggcgccggctacgaagaggacggggacaggcgccgtgcgaaccgagcccagccagccggaggacgcgggcagggcgggacgggagcccggactcgtctgccgccgccgtcgtcgccgtcgtgccggccccgcgtccccgcgcgcgagcgggaggagccgccgcc

SEQ ID NO: 14817 - DNA, 2300 bp, Homo sapien
acaaatctttgcaatttaggatcttcttccataactaagttttgtgggttttttttcttttcttttctttcttttttagacagtcttgctctgtcatccaggctgtggagtgcagtggtacaatcttagctcactgcaacctctgcctcccaggttcaagcgattctcctgcctcagcctccctagtagctgggattacaggcgcccgccatcacacctggctaatttttgtatttttagtagagacagggtttcaccatgttagccaggctggtcttgaactcctgacctcaggtgatccatgcacctcggcctcccaaagtgctgggattacaggcgtgagccaccgtgcctggccaaatttttttgtagagatgggatcttgctgtgttgcccaggctggtcttgaactcctggcctcaagtgatcctcctgcctcagcctcctaaagtgcaataggattacaggcaagagccaccactcctggcccactgcaacattcttgaagctctcaagtcttcatctgacaccttgtcaagatggggaactcttgtgttaaaccatcctgttaagttactgtataaaaataaaactgctcccaagcattgattgaaactgttttggtatgagtttcctgagagaaaagtgaggccctaaccatttttttccatgaactatgaccccagtacggtatacctaatgtccttcacagcctaacaaaatagttgaggcaaccctgctcatcctgtctagtttatcagtatttagatgtaaggcggatttaaagctaatctgggactgagaattgcaactaattccatagaagtcattcaatttagcacataaatgttcctgcaagatgccagagcaagtgagaaatcatctgtagcaaagcaaagagtggtgatggttcatcaccttttacaacggaaaggcaaacatgaagaaggaaattctccctcctaaaattcctcattaaatcgataagctatcttcacagcctttatggataacatccagagtcctcggttcatctgaggagtccattttcaaggtggccaacagggaagaagagctttcaggcttctctttgctatggctcatgaatgccaggtcccctttattgctttctgaacacactgctgggaaagcttgatgaggtcagtgctcaaatccctgcagctgtcccccttgaggaacttcttggcaaacctgcattgaagaaacactgattgcgttcacgcttcatgtcatggtttgccttccccacactgctcctggcgacagtggtgacgcagcactcggatgttgtcacctattcattattttttcagttctattcccaattcccaacccttcttttgaaacacagctaggtatgtgcacttcaaatgctccagaaaaacccaaggtcacatttcaaataggatggttatggtcaccataaaggtggtgacgtttgagtggtggaagagggtgcgggacggcgttgcaggcagaggaacacagccaggacactattataagtaactctgtgatcgtgtcttgtggtgatacagtataattcaacacaggttagagcagttactatgatcgttctttcctaaaaggctttgattttggagaaagaaccttgaggatcggtggggactttcttggcctgaaaggtatcaccagcagcaggagcaggaggctgctcacatttcgtgtcttcacttggggtggacgttggctgcaaccctcaaatgctgggagtcgtcaaccaactgagccctgttgtccaatgtgccccgggcaaggatgtgggtgcaaatcctgcttccgggcgaccactgacttccttggcttcagtgtccaattagaaaaaaaaaagaaagtagaaattcggtaagaaatccgtgaacgaggtccgtcctccacccccgactcaagccaagagatagcacagaacgttcccacacgcgctgtcccggccccggcgagcgtagccgggatttctcccccgccacgcccctcggccacgcccccctgcgtttggcccagcgacggggcggggtcggcctgcgattggccgggaccacgaccgcgtccgggcgcgccacgtgtgcgtaggagcgcaccggaagcgcccggctggaggcgcggcggcagggctgggcggcggcggcggcggcggtcatggaacgccaagaggagtctctgtccgcgcggccggccctggagaccgaggggctgcgcttcctgcacaccacgggtgagtcgttgcggggcagccgggcgcgcgccgccacttttgcgac

SEQ ID NO: 14818 - DNA, 2300 bp, Homo sapien
ccttcctcccgtattttcctgattgttgagaatgaactgtgttcctttccttgtggacaaggtccatagcatccttcagattctcaaggagatgcttgactacaaacataagacagcactggtccatggccatgtcctttctgaagtgtgtgaagtattcaacccgaaatacatatttataggcaatgtgtctcatgataggtgctgttagagaaattagagttgtatttaaagctctttgcaaagatgaagactactgggcttatcagttattgagagaggtatgttagaatctcacagcatggtagtggatttgactatccctgaagttctgtcgattttagttttgtatattttgaagttgccttatttgatacatacaaattttaaattattcatatctttctggtgaacggaaactttttattatgttgtgaccctcgatctctattaatgctgtttaccttgaggtttcttttacctcgaaacaatctttgttttggttagttatatgcatgataaatcgttttccatccaaaatttactttcagcttgtctgtacctcttgtagtttagatttctctcttaaaaactgtatggttgaattttttttttttttttttgagatggagtggctggagtgcagtggcgagatctcggctcactgcaacctctgcctcctgggttcaagtgattctcctgctgcctcagcctcccgagtagctgggattacaggtgggcgccatcacatctggctaatttttgtattttttttttttttagtagagacgaagtttcaccatgttggtcaggctggtctcgaactcctgaccttgtgatccacccgccttggcctcccaaagtgctgggattataggcgtgagtcaccgcgcccagctctggttggaattttttacaatccagtctgaaagctcttttaagtgaattatttatatttagtctgtttacatttaatgtaattactggtgtgttccagtttgtcttctctctgttctggggcttcctgtctgtcccacccgttcttcaatccgttttctctcctttattgtagatgctctccttctgtcattccattttttcttctgatggtttagaaattactctctttcaatcttgagttagcatcgtaggaattaaaacacacatatttataaaagtttaaaattaaatgttaagatcactgtaccatgaccttcaacatttaattttaaactttgacacctttaccctgctaaacaatacagtacagtgaccttcaacatttcagcagccttcgggttgttacatatttattcttttttgaagcccatcactacatcgccattacgttttacactgtgtatgtaacaaatgttaccactttgttctttattcctttttggatcatcttcagtgggggtaaaacagtatcaagctctagagctccctctggtggtttttgtgacatatttgaagatggcagcttgctttttgagaatttctggctctgctctccctgtttttatctgtacttttttttctcattgtgcctcttgcacacacacaccccttccccaccatctacccaatttgcgcctgttccagcagtttctcttcagggcagggccgtgttgggacatgatttctattaagagtgagggcccaaattgctcttgcccctgcagcccttatcacagacccctgtagtcattattggaacatgctggtcttgggcctgcttttctcagtcactggagttctccagtttgtaagacggctcctcgcctcccctctgcttcttcctgtacaaaggccgtcaccctgcaagccttgttgctctcaacatgggttgtctctacttgttcctattttagagttactgcagaatgccttgccatctagcttggttgtagctggtaaccataggtttttgtttttttgctatccttattgcactatgttttatggaacaattggagaagattaaaaattcaccctgcccactgggcgtggtggctcacgcctgtaatcccagctctttgggaggccgaggcaggcagatcacgaggtcaggagatcgagaccatcgtggctaatacagtgaaaccccgtctctactaaaaatgcaaaaaaaattagccgggcatggtggtgggcgcctgtagtcccagctacttgggaggctgaggcaggagaatggcatgaattcgggaggcggagcttgcagtgagccaagatcacgccactgtactccagcctgggcaacagagcgagactccgtctcaaaaaaaaaaaaaaaa

SEQ ID NO: 14819 - DNA, 2300 bp, Homo sapien
acttgccgctgtttaagatactagagagaaaacgctgaacgagtctcaagtccccagtgccatgaagcttagaatctgatgacaacaaggacaaggacaataacaatggctgatataggcagctaacatttataagaacatttacaaggtgcctcacactgtcctaagtcgtttgggctagttaagcggaatcggcacaacaggagtttacacttggagctgcttagtctcagtgcccaaacggcgttcaaacattgtggacgacagttctccactcttgcatctccacaggccagattcttagaacccatcagaacagcctcaacatatcacgacagttctccctcccctcccccagctccaattcagaattgaagatcaatggtttaaatacagtaataaatctgtgaacactcaaatgttaatttgtctaatttgggcataattattgtgttaggcactataagaaaagaaatattccgaagaagcaaggtctactaaaaaaagaacttacccaaagttaaaggacacaattcagagctgtactacacgtactgcatcaaaatacgtattctcaacactgcacatgctccataaagagaaatggcagagatcatcaaaagtggtgagttgggccgggcgcagtggctcaagcctgtaatcccagcacttcgggagaccaaggcgggcggatcacctgaggtcgggagttcgagaccagcctgaccaacatggagaaaccatgtctttactaaaaatacaaaaaattagccgggcgtggtggcgcatgcctgtattcccagctactcgggaggcttgagacacaggaatcacctgaaccggggaggcggcggttgcagtgagccgagatcacgccactgcgctccagctggggcggaaagagcgagactccatctcaacacaacacaacacaaaacagtgggatttcccaaaggtcggcaagaaatctaagcagatcccgcagcgatgctgctccgaggccataggtccccatgggaacaaatctcaggctacgacagcatggtcttatcctcagagaagttgctctatcacgtcccttttaaagccgtctcctgaaatgccaactagctagctgccctcccagtatcttaccaagtcttgctaaggttgaaatagtacaggaatctgaataattgcgagcgcttccacaacttacacacagcacccggcggtgcaagcctgggtgacacagttcaatttttaaaacgtcttcatataggggaaacgccagacaattaaagctactaagtagaaaatactggaggaaacaatcgcggttgttcggggacttagtttcctccctcacattaggaataatgaacacatatcctatctacgctcaaaatatcatctggcggcaagtattaagaaccaatcccgcgccctgcacttgcgttacaaccattaatgagccgctcttccgggccctcaaacagccagcggcgaaacagccaagcaaggcctaacagggccccacgaggacgcaccaggaagtaatgaagtcacccgtgcctgtcaagaggcacggcgctaacagaaggctcccaggagcttaaccggatgctcatctggcaacaacggcaagaatcaggcccggcgttccctgcgcagcccggtcggagcccagacaaccggcccgcgggccaagctccggccttcggtgcacgcggcaaagcgcggaaaataaggcggctcggtgccgcctggggactggccgcccacgcccccggactcaccccggaggtccagctcccggtcgcgcaccgcgttggtgtactgcgccgcctgctcgatcagctccgccgtcagcttgaccatcctgcagcctcccgttcccccgcgctgtggaaagcccgtggcctcccgccagcgagacgtcccagcgtgccccgcgccccgccgccaggcagcaccaatcgcagccgccgagtgcgcgcgcagctcgaccgccaggccgaagcaatcgaagagccacgcctccgggggcgttcttgccggaagtcgtggcgcgcgcacaggggatgtgtctcgttctgggttgtttcctagggtgtgtttcggagtctggaggacccctgattccagacgttggtgtttaaaagttaaggcgaatgtggaaacacccgaggggaactttctcatgcattagcgcacctcgaggtgggaggggaagcggtgactgtcctccctccaccagccgtcgcgggaacccgtggggttcagtgaagggtccagcagttcaggtgcccgccccgggc

SEQ ID NO: 14820 - DNA, 2300 bp, Homo sapien
ttagcaaaaaatatgcaaggtacttcatttgcataaatacaaaactagataaagcaaatctatacaagatggcaggataatggttacccttggggcaagggtggtgactagatgaagacaggaggagggcttctggaatgtggcaatgtcctgttcttacgaggatgctagttggttgggtgtgttcagtttgcattcttctatatgtatatcatacttcaataaaagttcaaggagaatcatctccgggtggattgcagaactaaatgtgaaaagcaaaacaatcgtctagtagaccacataggaaaatatgatgggggtaagggaagatttcctaaggcacatgcacatgcacacacacccaatccactaacctaaagaaaataattgaactacataaaacttggaaacttctcagccaggcgaggcggctcacgcctgtaatcccagcactgtgggagtctgaggcaggtggatcacttgagctcaggagttggagaccagcctgggccacatatcaaaaccttgtctctacaaaaaatacaaaagttagccaggcctgttgacctgtgcctatagtcccggctatttgggaggctgaggtgggaggatctcttgagcctgagaggtcaaggctgcagtgagtcctgatggcaccactgcactccggcctaggtgacagagtgagaccctgtctaaaaaaaaaaaaaaaaaaaaaaaaaaaaaatctaatcatcaacaccattaagagtgaaaaggcaagccacagagtgtgttcatatccctaatatataaagaaattccacaaatcaataagaaaaaaggcagacaactccataaggaaaaaaaaaaaatgagccagggactcgaaagaacacttaaccaaggaagctatcagaatgggcaccatacacatgagaaggttctcagcttcattagttattagagaaaagcaaagcaaagcagtagtgcaataccaccacacacccatcagaatagctgaagttatagagttaaaatgccaagaaggctgaagctggaagccatgaaaacccttacacaccgctggagtgtgtatattatttcagcctcttagcataactgttgggcattacttattgatgatagatataccctatgtcccagcagtcccactccaggacaaactcatgcaaacgtgcatcagaaccacgtaccagaaaattcatagtagcattactcagaatagccctaactgaaaacaactttgatgtctatcaacagcagaataagtaatttatggtataatatatacaatggaattctcttcagcagcaaaagcaaacaaaccatctctgtatgcaacctggatggactccagacataatatagactccatgaaactaggccaaaaaaaaaagcatactgcatgattctatttatagcaaaagcaagcaaaccgaatttgtagtgttgagttcgcggttgccttttgggaaagagggaggctttcagaatagcggtgttttggatcccggtgtcggctacgcagctgtgttcactctggtcattaatcactgtaaattcctgatatgcacacttttatgtatatcacatttcatacatatgaatattcagaagtctaaaggtcacaagcttaaccgcaaaccctaccgtgcccgaggccgggctggacttgcggggcggtggggttgtcccggcgacctgccccaggcgggccacctagcccgggatctcacactgtagcccggagccaaggcccaggcccggggcgggcacctgaactgctggacccttcactgaaccccacgggttcccgcgacggctggtggagggaggacagtcaccgcttcccctcccacctcgaggtgcgctaatgcatgagaaagttcccctcgggtgtttccacattcgccttaacttttaaacaccaacgtctggaatcaggggtcctccagactccgaaacacaccctaggaaacaacccagaacgagacacatcccctgtgcgcgcgccacgacttccggcaagaacgcccccggaggcgtggctcttcgattgcttcggcctggcggtcgagctgcgcgcgcactcggcggctgcgattggtgctgcctggcggcggggcgcggggcacgctgggacgtctcgctggcgggaggccacgggctttccacagcgcgggggaacgggaggctgcaggatggtcaagctgacggcggagctgatcgagcaggcggcgcagtacaccaacgcggtgcgcgaccgggagctggacctccggggtgagtccgggggc

SEQ ID NO: 14821 - DNA, 2300 bp, Homo sapien
tcattttgggaagctggtcttcctacaacatcggagtcaagatattgccgggcacttccatgacaaatggaaagttcagcccaaaaggaccagacttgttagtaaaatacattcagatctctccaaataaaaattcagatgcattttagtctcccctcagtacagcaggctgaatcccttaatctaccacattattatggaaacacccttatctctgcctgtcaaaatcactgccgttgcgggggctccgtcttgggaggcaccagctgctttataatcatttagctgatgtgcagttacattatcttgaagcaggccacatatttgaagaacggcaccagatccaggatgaatctgagggacatccggccagcaggggaaggggaagagaggtaacacatgctgcccagacatactgctgctaggtgacaatgcaatgcctccaaccccgtccccttgactcaggccaatgtccctcttctgcaagccagttggctaggcagccagggccatgtcaggcagaggcagactgagagttctgggtactgtttctgtccaacaagtatggccggttctcctctagggctgccagtttgcatgagggcctcatgtctctccactggcaggggctggtgagcatccagtccatctgtaggagggacacacggtggctgtcttctgcagtgtgggcaggcctggagtgacggcccaagcagctgaccccacttgccaggggaacgcagggaggtgaagttacatctagtgtagcaaagcgaaggccatgtgggacgttgatctccaggttccaagatgggcccttggcaggagcccttgtgaacatggatgtggcctgttgggatggggcctcccaccacgcctcctgttctcccacctccattaggggtgactcacacctgaagaaatgatgaatcacgtgggttacaaaaccaaagggctcctgagagcgaggctggaaaggacctcggaaaccatctatgcagatcctgtcctcagcccatcccctctcgccccagcctctcacctccagctgccaagccacagactccaagtgaatcctgcacgctcaacaagagaccgctcctggaactgaccatcagagaagcagcttccttcccacctcaaggccttctcgacctttttgttttacttcctatattaagcaggttgatggcttgctttctggaagtgggccagtaggaccaatgggtcctgggagggatgacagaagagatccagcagcgatccttacccttcataattccttgattatggtgtgaacatttccatccatctccagggtgcttcaaatcattatccactggataccaggctgctccaggaagcaggggtgaggatgattcagctgactttctactgctggtcccagctcagtgggtgcttttaagagtgtacatcgtctagtgaacacctaccacacggcaggccctgggctcataaaaacgaacgtttacggacagcttattgtacagcaaaagctgacctcatcctcaaatcagcccgacggggtagatgccactgttccccgcattttgcaggtggggcgcctgccctcagccaccacagtcatttgcccaagatcgcagcgaggctaagcggacggcctgggggttcacctgcacggcctgggggttcacctgcgcggcctgggggttcacctgcacggcctgggggttcacctgcgcggcctgggggttcacctgcgcggcctgggggttcacctgcacggcctgcctcccagcatgggccgcggcctccgccatgggctccgtgcggtggtttctcgggtacacgctcgtgagcccggctgatgcgccacatgcctttgccccgctcaatgtgtcccttcagccaggcttggtcccgggcgacccactgtcttccccgcagcttcttctccctgggaccccgcacacgggcgagccctccgtctagggaggcgggcgaggccgccaggcgtctgaggcccccgccaggtgagtgcggccttcgggtgtccggccggtctagggaaccggggactcacctgagacgccggggcctccccgctcccagcagaactcgcgggccgaggacgcctctggggcggcaccgcgtcccgagagccccagaagtcggcggggaagttcccccggtggggggcgtttcgggcctcccggacggctctcggccccggagcccggtcgcaggagcgcgggcccgggggcgggaacgcgccgcggccgcctcctcctccccggctcccgcccgcggcggtgttg

SEQ ID NO: 14822 - DNA, 2300 bp, Homo sapien
gactgtgcgcaccaggcttcccgcctgcaaagcacttctggttaatcatcagaaagggaatattgtaaaagggtatcaagtggctcacagacaactccctgctgagtcactgtggggaagggtcaggaacctggaggtgccaagtggccacagctatagccccaagacatgtggctaggacactgctggtgctgagcatgcactagccactgctcttcgcacccaggacactggggcactgctctgccacctgggaatggggggacggaccctgaagtctccgtgcctcctgggcatgtggctgcacagccctgctaccccccaccggtgtcagggagtgcacgttcttggccttttaggcttctgtagagggaagcagggttttgcctcccactaagacggttcacttctcaaatgttaaaaggctgtcctgatgctgcataaccacaaaataaaaagcatccagaaggccaggcgtggtggctcacgcccgtaatcccagcacttcgggaggccgaggcgggtggatcacttgaggtcaggagttcgtgaccagcctcgccaacatagtgaaaccccatctccactaaacatacaaaaattaaccaggcgtggtggctaatgcctgtaatcccagctacttgggaggctgaagcgggagactcacttgaacctgggaggcaggggttgcagtgagccgagatcacgccactgcactccagcctgggtggcagagcaagactccatctcaaaaaaagcatccacaagaatgaccaagtgactgctcaatggccatggatgtttctggaccctgagggcccctgttttgctgagatggaaatcattgctgactcctttaatgttgtttaattttttaaaaacctcttcaagcattcctctagatttctggtattcagaactatgctgtgaacacagaaagattaaggactgttcttctaatgccttagacagcctgtgccaattggtctcagagtagagaaaaatatatttatgctgtgaaacctaaatacccaaactaaattcattttagcaaagattaatacgcagagccccaattcttgtacagattcctcagagcagcacgtgctgttcggcgcttcttcctttataataaatggtcaggtgtgcaaacaactgtttgaagagccattaggagtcagtcagctgtggtgtgggcagagtgggcagtggtatgccaggaagcgcccagggttgcaggtctagggcattgtggagacagcagcagcattccttggtcctgagctgggattccgcatccagttgggcccaagcgtgatctgtgtgtagttccatgaggcctgggtggagggtgttgggagtgatagaatgtttggaaggaagtacaggggagtgaggcctgattcacccaggctatggggctgtgtgaaaatggccaggctcttgaatgtttggcacatagaggagaaaactgtcatgaacaagactcatagcccctgaaaataggcagcttgtcttctctgcaagacggcctggctggtgtccctgcaagcccaagtgtgagctgggggattcgcaggcaggctggtgacactttccatcagtgggaacccctctactttcgagcacctgcccccgacttcatgcagggagtgcacgaggagtctgcctgggactgtggatgggcctgaaggacagcccagcctgggactgtgggacgcagctgtccagcgaggtgctggctggccggccagcagccaccacccaggcccagctgcagggctgggtttcctgcaaaccgtgattctggagcagggtaggtgaccccgaactgcctgtttacagttttcatgcaccctggggacaccgtgagcctccccagccctgtggccttgagctgctgtattctagaaataccggcagctgcctgtcccctgaagcctccccacagctttgagcaatgatgaatattggttaatctctcctgtaaacagctgttttcccggcaactgcccagctcgtgttaaatattaacaaagagccgcctccacagccgctcacagggtgtctgctttaaatatttaagaaattgctgttcctgtccctgagtgactctttggctcaaactgttctgtaagtgttcttgcctccctggtgactgcgttgtgtgaaatgtccgacatccctgcttgcttgctctttcttcacccattgctctctttgtctctgtccttccctgtctctatcactgtctctctgtctctctctctcttagtgaatagtactaaaaaatgtaaacg

SEQ ID NO: 14823 - DNA, 2300 bp, Homo sapien
aaataagtgtctttaggatgaaacgccacgcgatagtgtcctcggaaccttcgcacgagatccagcacacaacatccgaccacacactggggcggccagcctcccgcgttcgcccgcctctgctcttggttgcttcgggcgcgcatttcggtccacggatgacctttaacaggtctcctgcagtggaaccaggggtgagggcctcgtccaagggcgtgaggggcgcgtggaaatggaacaacctcccaggctcgcatcctcctcggggacctcccagaaggctcaaccggaagaaaacccgcgacccgcgcgaggacagcgaaagcgcaaacgccggccgccaggagtcgcagcgcgcctgcgtccagttcacgctccggctcccaggcgcgccccgccccccggcccggaagtgcgcaggcgctggcaagatggcgggaggggtgctcccgctgaggggcctccgcgccttgtgtcgcgtgctgctcttcctctcgcagttctgcattctgtcgggcggtggtgagtcaaaggctgggttcagcgccgggtggggctgagtggcagcagggccccgggagctgcgaggaggccgggcccacgggcggacgctgacgcggggaggaggccgagtgccgggctccgggccgcttgtcgctgcatctggagtctggcgccctggccgcccggcccgaggccgcccctccgctccggcgacaccgagcccgccatcgcggctgcggagccctggcacggagatggagcgcttgggggctgggccggggaggcggaactggagcgcgatgtcatccttcggtccctcgttgccggctgacctgaactgatgtctactctgttgacgtttcgtccctaagctttgtgttttctggctgaccagccgtgaggttttcatgagcagcttattggcctggtgtagacccgccgtgttaaccacacaaaataaggttttcttgtcccgggataacgtgtttctctaattgtacgatccttaaatttagagcaatcgcaggcgctggctcagtcaataaaggatccgggcccaacacgcacattcacagtagttcccagggcagcaggtactagacgttttctattctagtaaatacatgtagttatctctagtagtttctctttgtttttataaaaattccctttagtatacgaagtcactttccatttttgaatatttattgtattttagattatgtgaattaagggtagatacacagccattttcagtagatagtcttcgtatttataccttttgacgtttctgcctcctctctttttccaatcccacgctcatttgtcaccttatttctattatttttccacttcatccatcaaaataaccttcagtccgtgcttctttcccttcagcaaatttcctctactgctaaaaccctgttcctgatgttggaatattaaaggctccctcaggactgtggaaatggaaggattacagcgggactgatggagacttgaaatctagatctggttttgctactgggatcttgaacaaattatttatcctctttggaccttggtcctcatctttaaagcggtggggttggtctgacgacctaaagtcatttctgctttgtgattctaagtgtccaccttccagccacatagtcacgggatcaaaaagagtattttgtagaattgttccttaatacagtgagtaaagtaggaccagttttaaacaagcattagtgtgttttgctaggtggaggctctgactataatttcatcactttaaagtgacattacttcagtgaattgaaactggcagagatattttactgattcttatttggatgtaaaaaacagcagtgcacttgaattttaaactcagattactttttagagaaagcacaagagttcttaactcttgcaggcttttgaaagcccttcttttcaggaatacttgcaattttgatcctttcagttggtaaaaatacattgcacactcattaggttggttggaaataagttgcagcttactgaagatgttattaaagtagagaactgttttgaactttggtagcgtaaaactgtaaatattatattagcaaatgtggcttatcgaagtaccagtgtgaaataatgacattttaaagttgatgccctgaggatgtcagtggcttcatttctgaattagtgaattcagatgaaaagaacacgggattggaaatggagagatttgggttctagttccagttttgccacagacttcctctgtgattttgcaaaaccctactgtaagttttttttca

SEQ ID NO: 14824 - DNA, 2300 bp, Homo sapien
agccactgatgggtccactcatggcctcagctgagaaaggagacgatgaacgtgtagctgacatgcacgaagtttaatttactcatgtccacgggggacgtttagagggcacgtgggaaattttccagcaatcaatgccttgagaaacttaaatggggaaatattattcatcgagaaagtgaaacaaaacactaggaaatgattatgaaatgttagtgattttcaaaagatgggcttcaaataaaagtctgcagagttttttttaaataggagggaaaatcttattttctaatatgtctcaggtatttttatgacttctactaaaattcacactgaaactttatcttctaaactggaatcattacttaattttaactaaccaacaaccacaaaagcagcagctactgctaaatattggattactgacaaaggaattcagttttgtggaatctggtgtttgcactataggttaagagttgccatttaaatgtttcttattcataattaggttttgttccgctttagaaaaaaataaattcccaaatgaattgcatcagtgtttccagcgtttcagctgtgggcttctaccaccactaagccgctcacctagagttgttacttttttgatgggatgacattccatggatttatgtactgaaatggatttcagattttaaagagaggaatgctctacgtgctcagaactgaattaaaatggcattatgtcaatagagaattcagctaccaaacaagaagtattgtttattttgcgatatgctgtgaaattcaaaagaaatgtaagaaataatctcttttcaatatactgatcatttagttaacttcctgagggatgtgaacagtgaaacagttggcaaacaaaacaatatatatcaggcttgtgtagtagtataaggtgcagattgtgtgatatgatttttattatttattttttgagacggagtctcgctctgtcacccaggctggagtgcagtggcgcgatctcggctcactacaacctccgcttcccgggtttaggcgattctcctgcctcagcttccccagtagctgggaccacaggcgcgtgcctccacgcctggctaatttttttgtatttttagtagagacagggtttcaccgtgttgttagccaggatggtttcgatttcctaacctcgtgatccgcccgcctgggcctcccaaagtgctgggattacagacgtgattcaccgcccccggccgtgatacgatttttaaagctaacattcagggcttatgtgccggcacttttccatgtattttttaaaaagtcattcagcaaacatgcacgtgagggggtggtagtcagaagaccgcggaatgaacgatcccgaagcacgtgggtgggaggagagcacctgtcaccagcgctttctcccaggtgtgctgtgacagaaaccggcaagggtctccgcaagctggggcctgagcgcggctccccagacggccgcgaccttccccaggcagggctgggctctggaccctcccctcacttcccagcgcctcgggccatcctgcttctccaggcctgagaggaactttctggaagtgctgcgtatcttcaagaggccggccagaagtgaaagccgcggcaggcctgagcgccggccccaggggaggggtccctcgggccctcgtcgtcccggggccgcttccccgactgtaaataagtgtctttaggatgaaacgccacgcgatagtgtcctcggaaccttcgcacgagatccagcacacaacatccgaccacacactggggcggccagcctcccgcgttcgcccgcctctgctcttggttgcttcgggcgcgcatttcggtccacggatgacctttaacaggtctcctgcagtggaaccaggggtgagggcctcgtccaagggcgtgaggggcgcgtggaaatggaacaacctcccaggctcgcatcctcctcggggacctcccagaaggctcaaccggaagaaaacccgcgacccgcgcgaggacagcgaaagcgcaaacgccggccgccaggagtcgcagcgcgcctgcgtccagttcacgctccggctcccaggcgcgccccgccccccggcccggaagtgcgcaggcgctggcaagatggcgggaggggtgctcccgctgaggggcctccgcgccttgtgtcgcgtgctgctcttcctctcgcagttctgcattctgtcgggcggtggtgagtcaaaggctgggttcagcgccgggtggggctgagtggcagcagggccccgggagctgcgaggaggccgggccca

SEQ ID NO: 14825 - DNA, 2300 bp, Homo sapien
gtttcactatgttggcgaggctggtctcgaatgcctgacctcgtgatccacccgcctcggcctcccaaagtgctgggattacaggtgtgagccaccacacccggccctgtgactttctatgtaaagattagagtattgaagcctttcatgctaatttggcattccttcccttcatctgagtgttgtttacaagctctctccctagagaacaatacacaaagactgaccattgagagagatgacattttcgtgtttgccactctgtaagccagtccctttttgtattcattgtaatttttaagtttttaatcagagaattgcctagtttctttcagaagatgttctgtggtttttgaatctagagggcagagtggactctgaggctagatgaatcacctctctccttcaccctaaattaaaaatggcattgctacatataaataagtgaagctctacctaaaacataggatattatggcttataatgaatagtccagaacactgtaactgtgcctgagcatgtcctaaatatttcattataggtgcggtccattaattgacctttgcaaaggtccacatgtaagacacactggaaaaattaaaaccatcaaaatttttaaggtaaggattgatttttttttaatacagtaaacttaaggtgcactagctattaaaggattttaatcatatcttattcaatcatatcttttgtagtctgaacatcatgatattttaaaatatttcattcttatttgatgaaaactaataaaatcatttagaattttgataattagaacactataggtggcttttgtttatcattttaccttattgtaagtgttataacatttctttttcatacgatattttattttattttttatttttctgagacagagtcttgctctgttgtccaggctggagtgcagtggtgtgatcttggctcactgcaatctccgcctcctgggttcaagcgattctcctgccccagcctcctgaggagctgtgattacaggcctgcaccaccccacccggctaatttttctatttttagtcgagatggggttttaccacattggtcaggctggtctcgaactcctaacctcaggtgatccgcctgcctcagcctcccgaagtgctgggattataggcatgagccactgcgcctggcctttttcatacactattttaaaatattgttctatatactatggttttcttgaatagccctgatgtaagcaagaatatttgtctgcatgtgaaagtaatgtattgcggcataaagaaaacagcaggaggggatatgatgttgtaatggagaaaacatcgctctgggattaggaggcatgggactgacttggcagtcccagcctttcttggctttgattttcttacaggtaaaatggggctggctaatggcactgttcttaatcattgactgtaggtcagcaagaccgacctttacttccccatacctactgtctgttctgccccatccttggtgattatgattgctgcttagccttccctcctttctgtgtgctctcactgtcattcctagaatccatagcagactctacataatttgctggttaatggtataatttaggctgggaaggtttagttagaatccattttaagattgttcccagcactacaaatagtcttctttaagctttgttgattttgtttgtttgtttgtttgattttgagacaaggtcttgcattgtcacccaggttggagtgcagtggcacaaacactgctcactgcagcctcgacctcctgggctcaaacagtcctcctgccccagtctcccaagtagctgggattacaggcatgtgccatcgtgcctggctagtttttgtattttctgtacagatggggttttgccacgttgtccaggcgagtctcaaactcctgagctcaaatgatctaaccaccttggcctcccaaagtgctgggattataggcatgagccaccatgcagggctgctttgttgatatgatagtggaaaattgcatttgtatttaagagcagttttacttacaactgaatgtatgatatatttaccaaaatcctctttgatatttagaattcctcaacatattgggagggcaatccggaaatggaaacattgcagaggatctatggaatatcctttcctgataacaagatgatgagagactgggaaaagttccaagaggaagcaaagaaccgagatcacaggaagatcgggaaggtatgccccacatcttaatcactggagatgtaatcataagccaacataggaatgtttctg

SEQ ID NO: 14826 - DNA, 2300 bp, Homo sapien
gtggcactgcaccctagcctgggtgagggagtgagactctgtctcaaaaacaacaacaacaaccacaaattaatggcatttgaaatgcccagtagccacgtggcttgtggcctccatgctgcacggtgtcgctcaaggctgtgagctctttgtatccctcgtgtctcagcacctagaacatcagtagatgacctttcaatgtttcttgaagaaaagtagagttgttttcttcatttcaacattgtgtgtaataatgtgtaaatatgtttttcttcgtagtacaataaatttaaatgccgcattctgaatgagaaagttaacactgcaactaccaccgtgtacaggtttgtgtccacacatggtaaacgctgctcagtggtaaacttgaaggtgttagcagtagaggccgagtttgttttctggttggagatcgatttttcaagttgtgtagttgataatctaccgtagttacaatcttcaaaatgttttcactaaagagaaatgattattttcccctttttagtaatcaggacagtactgagacccatattttgtttcctgggtgttagctataacaggatttttctccatgtgagtgatactgttgggaaaggagtttctattctgtccttccacgttcttattaatgtggcagtgggggccattacaagccatctcctcggcagtgattctctgcctcatacttactgtccagagtgcaagtgtagaagagtctgccccattgtccagagtccaagtgtacagtcttcatgcattagcaggatactcatgatgagaccaaaagaaaatactgggaaacaaaggcaggatcaaatgtaagaggagacaagtgaagttaataccagaatcacttagctctgttcatttaacctcaggttcctgagcacctttttctttattcgtgtgtatacgccttatatgtcattgctgttcccctttccgtgtgttccggccatctgggtgctgctaggactatcacagtaccgccttagaagacctggtatttatttaattataaccacagatattctccctcatggtacttactttcgacagtcaaggacttatggttctctggtttaattgtactgtaagtaaaatcatatcccctttgtgcaaagctatgcacggtgcatttcttaaagcttaaaaataaatgaaaatgtagaaaacaggccaagttttaaatttctggcttctaatgcttgagctcttgggtttgagaaccttacttacgtcaacattgacactttttgtagtttttcaatttgaatggcttgtatttaatttttgaaaaaaaaataaagcttttcttttatggctttctttttttttttttttttaattttttgagatggagtcttgcactgttgcccgggctggagtgcgatggcgcgacctcggttcaccgcaacctctgcctcccaggttcaagtgattctcctgcctcagcctcccaagtagctgggattacaggcgcccaccaccacgcccagctaattttttatattttttattagagacagggtttcactatgttggcgaggctggtctcgaatgcctgacctcgtgatccacccgcctcggcctcccaaagtgctgggattacaggtgtgagccaccacacccggccctgtgactttctatgtaaagattagagtattgaagcctttcatgctaatttggcattccttcccttcatctgagtgttgtttacaagctctctccctagagaacaatacacaaagactgaccattgagagagatgacattttcgtgtttgccactctgtaagccagtccctttttgtattcattgtaatttttaagtttttaatcagagaattgcctagtttctttcagaagatgttctgtggtttttgaatctagagggcagagtggactctgaggctagatgaatcacctctctccttcaccctaaattaaaaatggcattgctacatataaataagtgaagctctacctaaaacataggatattatggcttataatgaatagtccagaacactgtaactgtgcctgagcatgtcctaaatatttcattataggtgcggtccattaattgacctttgcaaaggtccacatgtaagacacactggaaaaattaaaaccatcaaaatttttaaggtaaggattgatttttttttaatacagtaaacttaaggtgcactagctattaaaggattttaatcatatcttattcaatcatatcttttgtagtctgaacatcatgatattttaaaatatttcattcttatt

SEQ ID NO: 14827 - DNA, 2300 bp, Homo sapien
accatttaatcctaagtatacagttctgtggcattaagtacattgacaatgttgtcaaaccatcaccaatctccaaagctttttatcttgccagtcagaaactctatacccattaaacattagctccccattcccgccctgcccccagcccctggccaccaccattctactctccgtctctgaatttggttcctccaggcacttcatatcagtggaatcatgacaatatttatccttttgtgactggcttgtttcactcagcaaaaagtcctcaagattcatccatattttaatattttaatgtgtgtcagaatgtccttcctttataaggttggataatattccattgtacggatagaccacattttgttgatccattcatccacctgtaaacacttgggttgcttctgccttttggctactattgtgaacagcgctgctgtgaacatgggtgtgtaaagttctgtttgagtctctgctttacttcttttgggaatatacttagaaggggaatttctggatcctatggcaattctgtttttaagttttcgagaactcgccataccgtttggtgcagtggctacaccattttacagtcccaccagtgatgcacagggggttcagtttttccacatccttgccaacacttgttttgttttttttttaatcatggacatcctaatggttgtgaagtggtatctcattggggttttgttttgacttgcatttctctgatgacgtactaatggtgagcatcttaatgtgcttattggccatttgtgtattttcttgaagaaatgtctttggagaaatgtctgttgagctcttttgcccattttttaattaggtttttttgtatttgagttataagagttcttgatatattctggatatccatttcttaacagatatgtgatttgcaaatatttaattctgtgggttgccttttttgcagctacttttaagaactaaacacaattaatctttgttaaggaaaatgatttgttgtgaatatatagatacgaaacagttaaatcatgcagatacgggtttttctcccaacaactagcttctttaagtagttatttaatataaagtgccttgtataccccgatagtagtgatggaagcagaaaagaaaggaaaaggaaaaaaacccttagttttataaatatatcatcattacgataaactttgcttttgtttttatacaaattaataatatagctgtgtccttgtcagaattttattgattaatgttaaaattagatcttctagaacagtactgtccaatagaaacataatggaatccactagtctgagctacatgtgtaacctataattttatggcagctacattttaaaagtaaaagttgcaattaattttaacaaatttttaacccaatatataaaaagtataatttcaatggtagccagtataaagaatgattaacgaatgattttcttcttctttttgcaacattatacttccaaagtccagtgtgttttatactcactgcacatcttctttcaaattagtggcatttgaggccaggtgtggtggctcacacctgtaatcccagtactttgggaggccaaggcaggcggatcactagaggtcaggagtttgagaccagcctggccaacatagtgaaaccctgtctctactaaaaatacaaaaattagcacatagtaaaaatacaaaaatacaatacaggcatggtggtacatgcctgtaattccagctacacgggaggctgaggcagaatcgcttgaaccagggagacggacgttgcagtgagccaagatggtggcactgcaccctagcctgggtgagggagtgagactctgtctcaaaaacaacaacaacaaccacaaattaatggcatttgaaatgcccagtagccacgtggcttgtggcctccatgctgcacggtgtcgctcaaggctgtgagctctttgtatccctcgtgtctcagcacctagaacatcagtagatgacctttcaatgtttcttgaagaaaagtagagttgttttcttcatttcaacattgtgtgtaataatgtgtaaatatgtttttcttcgtagtacaataaatttaaatgccgcattctgaatgagaaagttaacactgcaactaccaccgtgtacaggtttgtgtccacacatggtaaacgctgctcagtggtaaacttgaaggtgttagcagtagaggccgagtttgttttctggttggagatcgatttttcaagttgtgtagttgataatctaccgtagttacaatcttcaaaatgttttca

SEQ ID NO: 14828 - DNA, 2300 bp, Homo sapien
aattctctaacatccatttgtcttctacataggctaaatgtaaatgggatggtaaggtaaggtaaatggggtgtgatgagaatctccacccctgcatctttcaagttcttgaaggcaacagtaatctgtgcaattccttcaggaatgcagtattacttttgatttattatttttgtatgttgataaagttctagtggtttctgcttggcctttcctaccagaataatagccttatgtccgagggtcagggaaacactgtagggattctgccagtttggagtatatctattcaaactctgcattctggaactgacgaaataactacagtgtgagtttggaaacccaatgggctcactgggtattgtgtgatcctagctaaaacctggaaataacccaaattttccatcaacaaatgaataaacaaattatggtatatccatacaatggaatactactcagaaaaaaagaacaatagatacacacaaacataggtaaatatcaaaattattgtgccgactgaaagtagctaaacaaaaggaggacatacggtgtggttccatgtgtagaaaaatcaagaaaatgcaaactaacctatagtgacaggaagcagactggtggttgcctaggtattgggaatggagacccaagagagacaaattccagagggtcccgaggaaattctggggtggcttaagtgggtccatgacattcagtgatgtgttggtcatgacagaatggcagaagcagaaactccatggcagtggattgagaaatgatgaataatgaggagtcagtgggtcctatgtaactgtatccagaggcttcctgaggaaggactaaaaaagatacagtgatattggttagcaacatacttcatggaatctcctcctgggtgctgtttgggattccacttagcttaatccaatgagcttgtccccctccgctccttctcctgcactgattctgctcctggagtggaatttacctgcttttcctccttgctaacatctcccaacctttattttccagagcaaaataaaccttttcccctttctcaaaattttctccctttctcaaaccacaccagtccaagctaagctcttccacttcaggactcttataagggcattattacctgtatcacattatatgacatgctcaattaaattctgccaaagttgaaaagtactagtgttaagtgtgtagaaactggcatcagactatctgagtttgattccccctttgtcatgtagtggctgtgtgaccttagtcaagtaacacagtctcactgtgcttcaatttctccagctataagcggatataacagtatctcctgttatgaagattaaaggagttactactgttacagagtttagaacagtgtttgtcacatcctaagccctaagaatagtgataaaaatcaatttctgttcctgctccaggaagtttcacgctcatggttaagagggatacaaagatatatgtggcatttgccctagactcaaggagccagtaatttcgtgctggtcggatttagatttcacagcgattttctatatgccctggcccagaggcctcagtacttgggcaagtttggcacgaaaggccagaaagtccatttataatgaatggccactttttagaacctgtttgcaaggcaaaagaatggtgactgccagaattcaagaggaagaaagggtgaagcctttttggagaacgcagacgatggcctttttgcaaggttttggaagattttcgtttcaacggactaaaaactactgccaatagcctctagacaggcctcgaaaggcaggggaggcccttcagaccccatttccccactgcccgtgaccctaaggtgggcctggcctcaggccccgccccgccccgcccctgcagggtatctggcctcaggccccgccccgccccgccccgcccctgcagggtatctggcctaggccccgcccctccccgcccagcgccccgcccctgcaacgtgtaggcctcggctccaacgaggccccatggctccgtccccgccccatcgccccgcccctcccgggagccctgtcttctgccgtgcgctgagtgtccgcgtcgccctcgccgcagtcgcgggcaccccgctcggcgtcggtgcctgagggaggccgcgatggcggccgaggccctggcggcggaggccgtggcgtcgcgcctggagcggcaggaggaggacatccgctggctgtggtcggaggtcgagcgcctgagggacgagcagctgaacgcgccctacagctgccaggcggaggggccgt

SEQ ID NO: 14829 - DNA, 2300 bp, Homo sapien
catttctatgaaaatgtttttttaaaaaattagctggacttggtggcttgggcctacagtccagctactcgagaggctgaggtgagaccacttgagcccaggagcttgaggctgcagtgagctgtgattgcaccactgcactcccgcccaggaaacagagagagaccctatctcaaataaatgaataagtaaataaataaaataataaaataatgcatgcaattagtacactagtacatgatcaggcacatgataactgctcgataaatggtagcctcagtaaactttataatgttttaaaggagaatgtcctttggactcagcctttcaaatgacagagcatttgaaaagactgatttgtatgatggctatttcctacagatacaagactgtacctccagggactcaaggcattggctcagtggggcaccttgttctgtttactcttgttttggtcagcaccgattgccctagggctaagcagggctgccaccacagactcagttgccaagagtatccccctccccaagctagccatgggaaagccactcgcattgtaagactacaggaaatcaaagggaataaaaagcacaatttagtcacctactctccagttgatgggcaataggtttttgctattttgaacagagctgttaggaacattccttgtccacatcccctgttttatataggcaagaatttctcttccacgtagagtagaattactgggctaggaggagtgtgaatattgaaccttatgagatggagccaaactgttttccaaagtggtcataccagtgtatactcccagcagcagttcttaagagatctcaggatgtctatcttctggtgatttcacaagcagtcaaaaagaatgaacgccagcaataaacaacaataagaactttagcaatataatattgtgagaaaaacaaattccagaaggatgcatacagaatactttatataacatggaaaagaaaatgtatagacccagcatggtggctcatgcctgtaatcctggcactttgggaggccaaggcaggaggattgcttgaggccaggagttcaagaccagcctgggcaacatagcaaaaccctttctctacaaaaactagaaaaattagccaggtgtggtggtgcaggcatgtagtcctagctactcatgaggctgagacgggaggatctcttgagtttaggtgttcaaggttacagtgagcccatgattgcaccactgcactccagcctgggcaacagaatgagaccctgtttgcaaaagagaaaaacaagtaaataagtaaaatttaaaaacaaaatgtgggctgggcacggattctcatgcctgtaaccccagcactttgcggggccgaagtgggtaccttatgaggtcaggagttcaataccagcctgatcaacatggtgaaaccatgtctctactaaaaatagaaaaattacccagggtggtggtacgcgcctgtaatcccagctactcaggaggctgaggcaggagaatcacttgaacctgggaggcagaggttgcagtgagccaggattgtgccattgcactccagcctgggtgacaaagcaagattccatctcaaaaaaaaaaattatttttttaaaaagataacattgacaaacaaaaggaaacatgacaactgataccacaaaaactcaaaggatcactagtggctattatcagcaactatatgcaaacaaatgggaaaacctactaaaaatggataaatttccagacacatccagactaccaagactgaaccgggatgaaatccaaagccagaacagaccaacaacaaataatgggatcgaagcagtaatgaaaagtctcccagcaaagaaaagcctgggacctgatgattcactgctgaattctagcaaacatttaaagaagaactaataccaaccttacccaaacgattccaaaaatagagaaggagggaatacttccaaactcattctacaaggctagtattaccctgataccaaaactaaagatacatccaaaaaagaaaactacaggccaggatcactgatgaatattgatgcaaaaatcctcaacaaaatattagctaattgaattcaacaacacattaaagttggggtgcagtgtcccaggttcactcaacccttcccgttttcttgtctgtgtgtgtctactttgctctgttccctggtggcagcggcggtggcaatgttggtgcatgggcctcctaggacaaggggaaagtgagtatgcccttttcttgcttcctgccaggcatctgcagcctggcgcaagc

SEQ ID NO: 14830 - DNA, 2300 bp, Homo sapien
gggctgccacaaagatctctgacatggcctgaagacttagcgattaacatttggctccttgttacttatgcaaatttctgcagccagcttgaatttctcctcagaaaatggatttttcttttctatcacagtgtcatgctgcaaattttctgaacgtttatgctgttttcctgttaaaactgagtgcttttaacacacccaggtcacgcttgaatgctttgctgcttagaaatttcttctgcaagataccctaactcatctccctcaagttcaaagttccacaaatctctagggcggggacaaaatcctgccagtctctctcgatagcaagagacacctttactccagttcccagtgagttcctcatctccatctgagaccatctcagcatggatttcattgtctatatcattatttgacattttagtcaaagccattcaacaagtctctaggaagttccaaactttcccacattttcctgtcgttttctgagccctccaaactgtttcaacccctgcctgttacccagttccaaagtcgcttccacatttttgggttatctttacaacagcaccccactctaccagtaccaatgtactgtattagtctgttttcatgctgctgataaagacatacctgagactgagtgatttatgaagaaaaagacacttaatggactcacatttccaggtggatggggaggcctcacaatcatggtggaaggcaaaaggcacatctctacatgatggcagacaagacagaatgagagctgagtgaaaggggaacccccttataaaatcatcagctcttgtgagacttattcaagaccacgagaacagtatgggggaaatactcctgtgattcagttatctcccgttggatccctcccacaagacacggaaattatgggagctacaattcaagatgagatttgggtggggacacagccaaaccatattgctgctgaatagatcatgtagacaggctctcaaactacacggagagcaagagaggcccaccttaccacaacatttcatccaatccactaataaaacaggcacatcactgaagccaccttcaactctccagactacccagctgccagctgaataccacagatggctacagttaataccacacggagcagaatcacgtagctaagccctgcttgcgctaatacaagtccacaatttttttaagtttgttgttttaagctgctaagttctgaggtggtttgtggtacgtggaataagatgtcactctaatataatataaacttaaactatgtggcattggctttggaatcagacaatggatagaagctagaaggatttcacaaagactgttagtgaaaagtgaacagacttcaaggaaaatgacagcaaaacctgtaaaagcattctgggaactgacagtaaacactgaatggtccttaaggagactgaaaacttgaaagagcttaagaagtctactggaaagggctttaaggataatgagaaaaaatcatcagtggaggctgaggaaaacgcaccaaagtcgtattctgatgggagagttagaaaacccttgcctggaatgatataaaatataggaaaaataccgaaaactttgtggatctggctggggagatttttggtgtcaactaaagaaaaaaattaagcttttaagaaattaaagttagatttatttaggggtctgagaacaagagactgaggattacagcctaggagaagtctttcagagaggttctgtcagactgctctggtgcaggtctttagcccacagtttatatacaagctgtgaagatccagtaagtgcagaatcatattggacttgcttagaagctacattaaagcagaatcacatcaatgtgtgggtgtagatatgtggggaaaagcaagagagatcagattgtcactgtgtctgtgtagaaagaaatagacatgggagactccattttgttatgtactaagaaaaattcttctgccttgggatgctgttgatctataaccttacccccaaccccgtgctctctgaaacatgtgctgggtcaactcagagttaaatggattaagggcggtgcaagatgtgctttgttaaacagatgcttgaaggcagcatgctccttaagagtcatcaccactccctaatctcaagtacccagggacacaaaaactgcggaaggccgcagggacctctgcctaggaaagccaggtattgtccaaggtttctccccatgtgatagtctgaaatatggcctcgtgggaagggaaagacctgaccgtcccccagcccgacac

SEQ ID NO: 14831 - DNA, 2300 bp, Homo sapien
tagtccattcataaagggcttttaattaaccaagtggtttactaaaaaggacaattcactacatattattctcttacagttttatgctactatgcttcaagggactacagcaattttcacagaattatatataattctaatggttgaattccatgaataatctatggcatgaaagattttacctgtcaacagtggctggctcttcatggttgctacaatgagtgtgtaagattctgaagaactcctttaataagcctaaacttaatgttcaacttagaataaatacaattcttctaaatttttttgaataatttttgaaaagtcagaaatgagctttgaaagaattatggtggtgaaggatcccctcagcagcacaaattcaggagagagatgtcttaactacgttagcaagaaattccttttgctaaagaatagcattcctgaattcttactaacagccatgatagaaagtcttttgctacagatgagaaccctcgggtcaacctcatccttggcatatttcatgtgaagatataacttcaagattgtccttgcctatcaatgaaatgaattaattttatgtcaatgcatatttaaggtctattctaaattgcacactttgattcaaaagaaacagtccaaccaaccagtcaggacagaaattatctcacaataaaaatcctatcatttgtactgtcaatgattagtatgattatatttattaccgtgctaagcagaagagaactgaagtgaatgttcatgatttattccactattagacttctctttattcttaaaaatatttaagatcactaaatttttataggactttaaaaacagtaatgtgctgcttgagtgtgtaggactaagaaatgggattcagagtagtaaagagaaaagtagaatttccaagcactatgaattactgttctttaaaaaacagcaaaaatcaaataacagtattcctccaaaaaagatggcaagtgtaaactctataccttcatgtctcccgtggaatgttagtgatcaatttccacttctcccttttacatcttacttgcccattaactcttatacctaatccaaagattgttaatatggctatgcctcactttcaggacaccttttatttgttacttctcttcactgcaaaacttcttgaaacagtacttattttctctcctccatacacaattgaaatggctctcaactcatgcccagaagtcagtgttcagtctctcacctggcagatagcaacttacaaagatgccccaacaatacctccttgtgtctagacagtcatcattatcctttacctttttctgtatttatttctgctcctaaaagggatctctatgtaaagtattgttatactagtgcttgttataattattatcagctccctcccttccaattccaagctccctcccttccaattcacattgagtccagagctaaattaaacaatcattcaaaatttttcagtagttcttgtctctataataaaacagaaatgctttagaaagcattccaaaatctcttaccagttttatctcctatgaaagtccttcacactttctctcatttaaactttattgcattttcctcactttttctcacttcacttttgaattccctattcttttatcctctgttaatttttaagtattacatttgtgatactattttttctttttttctattttttatctttcatttcattttggcctatttttttctcttaagaactttaatatcaccaaataacatgcgtgctacaaactgttttgtagttcaaagaaaaaggagataaacatagagttatggcatagacttaatctggcagagagacaagcataaataatggtattttatattaggaataaacctaacattaatggagacactgagaagctgagataactgaattataaggcatagccagggaagtagtgcgagacaaaattatgatcttgttgaattctgaatgtctttaagtaatagattatagaaagtcactgtaagagtgagcagaatgatataaaatgaggctttgaatttgaatataataattctgacttccttctccttctcttcttcaaggtaactgcagaggctatttcctggaatgaatcaacgagtgaaacgaataactctatggtgactgaattcatttttctgggtctctctgattctcaggaactccagaccttcctatttatgttgttttttgtattctatggaggaatcgtgtttggaaaccttcttattgtcataacagtggtatctgactcccacct

SEQ ID NO: 14832 - DNA, 2300 bp, Homo sapien
tgaggagccacatgatctgacatggttaaggatgcctctggcttccctgttgagaatagactgaaggggcaaaaatggaagcagaacagcagttaggaggctcctgtcaaacccacgtggaaggcaggctctgggctgtgttactggactaacactaacaccgtccccttgcacttctgaggggtccctggaacttccccaggggatgagactcctggctagcaggactcagcccctccccttcaactttactcaggacctggtctcccctccttaaggtctctggagcccaacgcacacttcagcccactctcacaggcattctctctgtccacaaaatatcaacgaagagtcttctgtgagtgcagcatggtgtgaacactgggagtacaaggagaaataagacacagttgctgtgctggagaagcttgtgcccagtggtggtgatactgccggaggtgagaccactatgccagcacaggaacaaagacggcaggggcacagggcaattcaggggtgcagatctgggggcatccaagaggctcctaagcctcagtatataaactgacaggtcacagcctgctctaggaaacaccttcttaagggttggagttatctctgtgcatcccatccccaccccaccaagccgcccttggccctgccctcaggagcctctgcttggccttgctaattcctctcttctccctgaagctagagtgaggtccctcttggcagcctttgtatctagagagagccgtccaatagaaacataaggtgagcaacatgcttaattttaaaatttctagtagctacattaaacatttttaagtgaaattaactttaataataaatttatttaacccaatatatccaaaagattatcatttcaacatgcaatcctattttaaaaataactagtgaggtacctgacaaaaaaaaaatcccttttcatgctaagtccagaagatctttgtgtattttatactcataggacatctgagtttggatgttacctttttattggaaatatgggatctgcacttagatttcactgaatttacattgaaaaggtaggttcacatacccaagttgtctcacacatacctaaatgttttctggtaactggatggagtatcagtttttatatttatctttgccttagctaaaaaacaaattaatagtgcaggtcctcagccgcacgcaggcagttttctccacggtccaaatggttgcccgaattcacccagaccccgctgtcgtccgctttttcatgcagacattcaaacaactgcctcccttcctcctggcacccccaccccatcgccagcagcctccaaaccagtttccctcctgtcctcatctcagccacccatgactcacacacacatctggctcccctggcccacttttcacctggtcctcataatctatgcataaacattaacataccacagagtcaatctgcatactgattacttctgctctggtcaaattcttgctttcaggatcaggaggctttctccccacaccaaactgggcctgaggaaatagtgtcttgtcttcctgtcacccctcccgtagttgcatgtctaatgagacaaggggtgtctcaggtgaagcaggacagggaggatgccagcacttgggtgggagaggcttgaggagtgcctgttgggggatgtgttggggaaggatgacttttcacatatggctcattgtgtcgggatgatttcgttgttaaataagcacctacaggatgatttcacattccatacttctaagtttttataatttaaattctttccgccaggctgggttttttttttttttccaaactttgaatctgtggctagaattggtttgatttacataatcctgcccctgagatttagccccacccctgagagccccctcagagccacccacagccaggacacctctgctggcctccccttccccagccttccaacttgtggcaggcccctggctctggcctccccctatatgggaatgagccagctgcaccgctgctgacagtggctgggataatcctccctgagctgttccaaggattagtcctgctgccctgtgcccagctcccacacaacggggtttcggggctgtggaccctgtgccaggaaaggaagggcgcagctcctgcaatgcggagcagccagggcagtgggcaccaggctttagcctccctttctcaccctacagagggcaggcccttcagctccattctcctccaaggctgcagagggggcaggaattgggggtgacaggagagctgtaaggtc

SEQ ID NO: 14833 - DNA, 2300 bp, Homo sapien
caccctgtcacattttcttcactcctccaccaggaattcctaaaatccatgctcttggatcctggcaaatccaggaggctgggggatgtggcaagcttcagcaagactgcctgggaccaaccctgcagccttaatttcccaggcccgctcagcccagctggccagcaaaggcaggcagagcttccgtgtccacacatgagaatgacctgcagctgttctttgtccaggctgaggtccaggattcccattgcagctcctaggaaatctttaaaattaggtcggggatgagcctgtcagtagattaggtagggaacttttatgaagttgagggtgaaccatctggagggtgaactggctggtgtgattctagaactgggggtggtgcctagcagtgcatttgtgagaagacacagccaggcttggtatatgatgtggtgtgtgtgtatattcacaggcatcgtggagcatatacactttttttgtgtgtgttgaaatcttacagattacaaagtacttttttttttttctgagacagggtctctctctgtcgcccagcctggagtgcagtggtacaatcatagctcactgcagcctcgatctcccaagctcaagtgatcctcccgcctcagcctcccatgtagctgggactacaggtgtgtgacaccatgactggctattttattttatttttgtagagatggaatctcacaatattgcccaggctgatctcaaactcttgggctcaagcagtcctctcgcgtcagcctaccaaagtgctaggattacaggcatgagccaccacgcccagccagattacaaaatactttgacatcttttctctacagccctcaaaaggaggcagggcaagcacaattaaatcccattacaaatggggtgactgaagctccattcatggcttgcccagggtcacacaaagaatgaatagcagagccctgagcctgtgtgcttccctctgtgccaggctgctttacccaggcatgggtgcaccttgtgcatgggacatttctcctttgttgtgtcctgagtaccttaagccactcagatattgctcaggtggagtgaggggaaaatgttttcaggttgtattagtcaaaacaaaataccacacactgggcgactttaaaatcatacatttatccctcacagttctggaggcttggaagtccaagttcaaggtggcagctggacgggttcctggtgagggctctcttcctggtttgcagacagccaccttctcttcgcatcctcacttggtgggaaaagacagaggagagaaagagagagagagaaaaatgagatagagagagagagagaaatgagatagagagaaatgagagagagagagagagagagagagagagggagacacagagacaatgctctcttttcttaccagatctataatgagggccccaccccatgacctcatctaaccgtaattacctaccaaaggcccatctccacataccatcacattaggggttagggtttcaacataagcatttggagaggacataaacattctgtctacaacatgagtggagatccatctcttctttacctctggtaaggggaccacacgctgcagccagcgagacagtggcatgttcttgttacaactcgatctaactcccccagaagaggaggcagggaaggcggacaaaactgggagagggagagagtgttaggaagagagtagggtggccagaggcagcaaataaaatataaaatgcttaattctgaatctcagataaacaaccaataatgttttttagcataagtatgtcccaaactaagcttgggacatatttatgctacgaaattattcgttgtttatctaaaattcaaactagctgggcatcctgtcttttaatctggcaaccctaaaaggcaagggccaaaaatgccggaggcaagccaacggattccaggagggacaactgctggactttggactgatgatgctctttttatatatttaactttttaaaaaagcctcttttctttctttttaccagcttttcactagctttttaaaaattgtggtaaaacatacataacctaaaattcaccgtctaaaccatttttcagcatacagttcagtgggattaagtagattcacactgttgtgccgccatcactaccactcatttccagcacccttccatcaccccagcctgaaactctacccattgaacacgagctgcccaactccgccttgcttccccattcctggcgaccactgcttctgtctctgtgaattttgactattctaggca

SEQ ID NO: 14834 - DNA, 2300 bp, Homo sapien
tgagccaccacgcccagccagattacaaaatactttgacatcttttctctacagccctcaaaaggaggcagggcaagcacaattaaatcccattacaaatggggtgactgaagctccattcatggcttgcccagggtcacacaaagaatgaatagcagagccctgagcctgtgtgcttccctctgtgccaggctgctttacccaggcatgggtgcaccttgtgcatgggacatttctcctttgttgtgtcctgagtaccttaagccactcagatattgctcaggtggagtgaggggaaaatgttttcaggttgtattagtcaaaacaaaataccacacactgggcgactttaaaatcatacatttatccctcacagttctggaggcttggaagtccaagttcaaggtggcagctggacgggttcctggtgagggctctcttcctggtttgcagacagccaccttctcttcgcatcctcacttggtgggaaaagacagaggagagaaagagagagagagaaaaatgagatagagagagagagagaaatgagatagagagaaatgagagagagagagagagagagagagagagggagacacagagacaatgctctcttttcttaccagatctataatgagggccccaccccatgacctcatctaaccgtaattacctaccaaaggcccatctccacataccatcacattaggggttagggtttcaacataagcatttggagaggacataaacattctgtctacaacatgagtggagatccatctcttctttacctctggtaaggggaccacacgctgcagccagcgagacagtggcatgttcttgttacaactcgatctaactcccccagaagaggaggcagggaaggcggacaaaactgggagagggagagagtgttaggaagagagtagggtggccagaggcagcaaataaaatataaaatgcttaattctgaatctcagataaacaaccaataatgttttttagcataagtatgtcccaaactaagcttgggacatatttatgctacgaaattattcgttgtttatctaaaattcaaactagctgggcatcctgtcttttaatctggcaaccctaaaaggcaagggccaaaaatgccggaggcaagccaacggattccaggagggacaactgctggactttggactgatgatgctctttttatatatttaactttttaaaaaagcctcttttctttctttttaccagcttttcactagctttttaaaaattgtggtaaaacatacataacctaaaattcaccgtctaaaccatttttcagcatacagttcagtgggattaagtagattcacactgttgtgccgccatcactaccactcatttccagcacccttccatcaccccagcctgaaactctacccattgaacacgagctgcccaactccgccttgcttccccattcctggcgaccactgcttctgtctctgtgaattttgactattctaggcacttcacaaaactggactcatacgatatctgtagttttgcgtctggcttctctattgaattcttaaaggggggtgggaactaagcagatcacaagggagctgcccacagaggtaaagacaaggtcaggtaggctgagagacgcaggaaagcgggtcaaggcgtagggctggagggcaggggcgggccctgggcgtgggctgggggtcctgccccggggcgcaccccgggcgagggctgcccggaggagccgaggttggcggacagcttggccctgagcttgaggggaaggcagcgatgggacaaaggacggaggtctaggaagagggtctgcagagcagaaagcacgggtaggggcggcctgacgctcggaagacaacggatgggagccgtgtgcacgtcgggagctgggagtgagcgtgagttccgtgcccaggcccgcgactcggtccacgaggacagcgctccgggtcgacggggtcctggagccgcgctcggggagggcgcagcggagggcgagcggcggcgttaggacccggaggcgcgggcggactgtgggcggcggggctaggacccagcggctccggcagagcggaagcggcggcgggagcttccgggagggcggctcgcaggtgaggaggcgtccggggccgcgggaagtagggtcgtgggggcctggcggggcgaagtaggggacccggaggggctggagggaggcgggcgggaggcccgggaccgttcctgaccgagaagcctgcgccaagctggtgttccgcggccgctgcccggtgccc

SEQ ID NO: 14835 - DNA, 2300 bp, Homo sapien
ttcaagtgattctccttcctcagcctcccgagtagcggggattacaggcatgcaccaccacgcctggctaattttgtatttttagtagagatggagtttcaccatgttggtcagactggtctcgaactcccgacctcaggtgatctgcctgccttcgcctcccaaagtgctgggattacaggcgtgagccgctgcgcccggccgagaggcacacattctgctaagagctttttcctgactcccctaactccaagagggatttgtcactccttagctttgtactcatgactggagtagaatgaatttaatttgagtttagttgtttttgagactctccctggctagtgtagtgtcttattcgtctttgttgtgatcatggcctgcacctaacagatgatcagtagatgtttgcagacagaaagtaaaccactcatcaggtgtattcagtcccattcttgaacgggcttgctgcctcctttttgaggagatctgtgtatgtactattctttcacgcatatgtgtgagcaaacacacacacactaacaagaaattcatctgaagatgtgcacaggaaatatcttgcatctttaccccctttgtgatcttacatatgggagaactgaggcacagaaataagttaggacagccagcaaacttgcatcagtataaatacaaagaaggggagggaggaacatgcttgaaaggggtgtgctggtctcagagggttaggtttctcagttggctgggcatcagctggccatgctttagttatttgatgggaggaaaaataagtgggaggtgaggagtaactcctgggctctgatgagtattcaaggcaagtacagatctggaaagcctgtatgcaaaggaggaactcactgaaaagtgctggcctgaggagggcagaagggagggctggggaagccagcagcgggagcaaaggagtaggctcctactgggtgaagatgttggtgtggtgcgttatgtaaaatatacaaattattattgggaataaccacgtctcagcagtgctagttctcagtttggagaatgggaaatcgaaaggatcagattcagagacggcaacttactcaaggtcacagcattttaaacccaaatgaaatctcctaggcccttcatgccacactcatccatccctacctacttgtgttgcaaccaagggccccactgtagtgcctaggggagcaggtctagggcacagtgccaggcctgattaatgtcttccttaccattttccagcgaggggctgtgattaggcctatttataggggcctggtcccttaatattctgcctggtgcatctcttgccaatcaaatcagtgctgtctgcagtgtgattgctgctttagtggcaccagggagaggagttaattaaacccaatataaatagactctgccctcactttgcaattccaggagtgtttttccttcctgtcctccacccccacaggcacctctttcctcttgtccccctaagctctagcctgggtgagcagggctggctactcctatacctagagtcactagccacttgcccagtctgtttcaggagcaggcctcagattcctcaggggttaaagtgggaagaacccgtgtgtgcacattttttgtgcttttccagaactgggtaccatttggcagttgatcacccaatctcccccgctaccccatttctacccctttgtttccagcctcttttttcctctgcaaccaaggtttcttgtttatccaaggtggggagctgaactgagacaaggtatggaaagggtgcctggcaggtagcaagcaccttgtagggggtcagaaatgttgcaccttctctgaactcctccattgaccctacagattccccagtcccgggccctgccctttccctcattcactcagcaggcatcagcagagtcccatctatgcgctcctggcctctcaccaaatgctctgtcccctactcccctatctgtgcaggctgaagctatgtgcatagttgggatgagggctgtgttgtctcaacaccaccctgccctgtggtgggtgggtgcaggtggtcgtgggtggctgtgatgctccggctcccacccacaggcaccatgactcctgtgaggatgcagcactccctggcaggtcagacctatgccgtgcccctcatccagccagacctgcggcgagaggaggccgtccagcagatggcggatgccctgcagtacctgcagaaggtctctggagacatcttcagcaggtgggtgctgccacccacccccacctgatgagagggccatccc

SEQ ID NO: 14836 - DNA, 2300 bp, Homo sapien
cctgcgagagagatggattccccaagggaaatggggccattgcttgagtaaaaaggaaatagttgctgaagaggaaaaccacgtgcttactccacatagggcagactcctggaagaggggggcagggtagggaggtggatatgcaggttgccctggcagggtctggaaatgggggctgcaggcttggagggaggcctcagtgtggcttggaacgtggtgtatggtggtctgccgcgaaggccggcctgcacaggggtgggaggggggtgcttctgcatgggaagcacagacagcgctgcctctcccttgcactcagctctcggggcatgagaggctgactttccgtgagcctgtgggccaggcctctttgaatggggctgagggagctttgccctggttcctttgtgtccccacggtgccacgggaggctccctggcagggtgtggggcaaggcagtgagtgaagagttgggatgagtgagttagggcccacggattactcaagacaggacttcaagttgattcaggcgtgttagggagctgtgattggattttgagcagggcagggatgggacagaagagtttggggaaggttcctcaggcatccgtcacggaagggacaagaagggagagagagtggatgccagggacacccagaagctgttattgtagtcaggatacgacaggggtgaggctacagacaggggacttgcaagcagggagggcagggtgagacattcagaggaaacgacaacaggaaatggtgacagatagggaacgaggatgaagggaagggagagccagtgacgactggcagtggagtggggagcaccgccacctctcctcctccacttgcccctcctgtggcactggacaagctagtgggcttttcgttgtccatgggctttttcggtggggatgtgaccagctttgaacccgtccccttaaacatgctcctcctgcatggaagagacaggggcaggggagagactctctccccaccacccagctcaggccccagcacagcccggcctctggcctcactggcgtctgtgcccagtgacgcaggcaggtgagctcctggcaaattagcattgcaggctgtgctctctcctcctgctctgctgcagctgggagtgtgcagagactggaggggatgacagtcaccctctgttttctgtggtggctctgttttctgtggtgctggatgcacctctgttttctgtggtggctccaagagagtgcacggtccctgctgattgaaagaaggatgaagggcagaagaggggcggggagctgtgtgccctaagatctcattgcctttttatgccgattaacatgcttttagcccctactgagcttatagttaacagaagtttccgggtctttcttcacctgaactgtgtctaaagcaagttccctccaccttctgtatttatatgcttgatttttaaaacctaaatgttgggcttcacatttgttccttgtaaatttcatcttggtgattgcagtctaccctctggcctttaaaaattgtctgagccttgattcaatcatgaaaccagcttacccttcccctgtgtgctggccccagttttctaaccaggtgttgaatgaactggatggactctgccagatccctccgtgcaaggctggaatcagtccattgttcaactgtgccctttggggctgtggttcatttggctctgatttttcctatatgttctctcctccaacccccatagctccatcttgtctacaagattttgttagaagccgtcaaaatcctgctgacttgagatgcactgtgctgcatgttttccccgggcacagcaggctaataatcctgttacaaagagaaatgctgtacatttcgagcagtgctggcccctggggctcaccgcggccttttctaagtgcttacagactctctgtttaataatccattccagaaattttccagggctcattgttgagcttggtgttcgcaactttgagtgatcagcccttctcctttgtgggagcaccaggacagagcagcctttgtccctccccagtctcagttccctcccactgcccctgtggacctcgaatgcagagcttatgcacctaccgaaggtcgtgtcagcacccaaagcagaatgaggctgccctgggaactagggtcaattaagacagcttgtgctggaggaccctttacagcagatgaaggcctctccccagccagaaaagatggagcacacgctgggtggtggccccgcttcctcactggaaggagatggtgctcttcttttttctttc

SEQ ID NO: 14837 - DNA, 2300 bp, Homo sapien
acagacaggggacttgcaagcagggagggcagggtgagacattcagaggaaacgacaacaggaaatggtgacagatagggaacgaggatgaagggaagggagagccagtgacgactggcagtggagtggggagcaccgccacctctcctcctccacttgcccctcctgtggcactggacaagctagtgggcttttcgttgtccatgggctttttcggtggggatgtgaccagctttgaacccgtccccttaaacatgctcctcctgcatggaagagacaggggcaggggagagactctctccccaccacccagctcaggccccagcacagcccggcctctggcctcactggcgtctgtgcccagtgacgcaggcaggtgagctcctggcaaattagcattgcaggctgtgctctctcctcctgctctgctgcagctgggagtgtgcagagactggaggggatgacagtcaccctctgttttctgtggtggctctgttttctgtggtgctggatgcacctctgttttctgtggtggctccaagagagtgcacggtccctgctgattgaaagaaggatgaagggcagaagaggggcggggagctgtgtgccctaagatctcattgcctttttatgccgattaacatgcttttagcccctactgagcttatagttaacagaagtttccgggtctttcttcacctgaactgtgtctaaagcaagttccctccaccttctgtatttatatgcttgatttttaaaacctaaatgttgggcttcacatttgttccttgtaaatttcatcttggtgattgcagtctaccctctggcctttaaaaattgtctgagccttgattcaatcatgaaaccagcttacccttcccctgtgtgctggccccagttttctaaccaggtgttgaatgaactggatggactctgccagatccctccgtgcaaggctggaatcagtccattgttcaactgtgccctttggggctgtggttcatttggctctgatttttcctatatgttctctcctccaacccccatagctccatcttgtctacaagattttgttagaagccgtcaaaatcctgctgacttgagatgcactgtgctgcatgttttccccgggcacagcaggctaataatcctgttacaaagagaaatgctgtacatttcgagcagtgctggcccctggggctcaccgcggccttttctaagtgcttacagactctctgtttaataatccattccagaaattttccagggctcattgttgagcttggtgttcgcaactttgagtgatcagcccttctcctttgtgggagcaccaggacagagcagcctttgtccctccccagtctcagttccctcccactgcccctgtggacctcgaatgcagagcttatgcacctaccgaaggtcgtgtcagcacccaaagcagaatgaggctgccctgggaactagggtcaattaagacagcttgtgctggaggaccctttacagcagatgaaggcctctccccagccagaaaagatggagcacacgctgggtggtggccccgcttcctcactggaaggagatggtgctcttcttttttctttctgaattgtggccaccttcataccagtctgtcatggaacacttaagccgcttgagtgcctgctggtactcccagccctgccatgcctgagccccctgcacacaaggagccaggagtaatcagggcagaccctttagggcatggggacttctggattgtgaaattggctctctgggggccaaggccttctaacgttggtggaagtggctttggcttattgggtcggattctaggccattcattctaacgtttagagacatcccagctttccctagcccagagtctgcagcccctccaccatcccacatcctccccctccctttcctcgtgaaccccagtcgcgcctctgccttctcaaacccctccaccatcccacaccctcctcctgcccttcctcatgaaccccagtcgcgcctctgccttctcatccctgcgcaccacacaggctcactcgtgcccagtgagtgctgaggctgctctgcacgtggagtgttggccctgtgggcaagggctgggctcttggaggtaggggagctacaggggcgactgggaggaggatgttgtgttacacacgcatcagagttaactttgcagtgagagcggccttgctgcggccaaagaacatggaaaagcatgagtggggtgatgtgccttaaagcatcagacacttgggcctcgggcatcaggagccagccac

SEQ ID NO: 14838 - DNA, 2300 bp, Homo sapien
cttttttctttctgaattgtggccaccttcataccagtctgtcatggaacacttaagccgcttgagtgcctgctggtactcccagccctgccatgcctgagccccctgcacacaaggagccaggagtaatcagggcagaccctttagggcatggggacttctggattgtgaaattggctctctgggggccaaggccttctaacgttggtggaagtggctttggcttattgggtcggattctaggccattcattctaacgtttagagacatcccagctttccctagcccagagtctgcagcccctccaccatcccacatcctccccctccctttcctcgtgaaccccagtcgcgcctctgccttctcaaacccctccaccatcccacaccctcctcctgcccttcctcatgaaccccagtcgcgcctctgccttctcatccctgcgcaccacacaggctcactcgtgcccagtgagtgctgaggctgctctgcacgtggagtgttggccctgtgggcaagggctgggctcttggaggtaggggagctacaggggcgactgggaggaggatgttgtgttacacacgcatcagagttaactttgcagtgagagcggccttgctgcggccaaagaacatggaaaagcatgagtggggtgatgtgccttaaagcatcagacacttgggcctcgggcatcaggagccagccacagggatgtctggggaaatggcgttccatgagatgcaagcacacaagaatgcacttggcacatctggggaacagcaggcagctgatatcactgggcccaccccgcaccagggaggatggaagcaggtgaggagctagaccacactgaggcggtggtcgggactcggggtttgctcagtgagccgttcactatgtgcaggggcagttccccgtctgaatttaggtgacgacactcaggtccagccttgccagtctcagcctccggtctccgttccccctctgcagaggccacattgtctgctgcacgtgatcatgaggggttgtgaagtgcttgccccatcagtagccatgtgtgcatgtgtaaataccatcctctgtgtgccctggaggctgtccttcagatagcatgtacaggtggcagcatagggcctgtccctactgagagtgcagggaactcagcaccgtcaactcctcgaccctgcaggtcagattatccttgtagaggccccctggatggcaccaagatcggccctggcaagtaggtgaccctgacttcagagcccttgcctgagggcctggcctggcagctctgctgttagaagcaggaggtgtgcagggggtggggagcagcccagcctctgtgatcttctccatggcaggatctcccagcaggtagagcagagccggagccaggtgcaggccattggagagaaggtctccttggcccaggccaagattgagaagatcaagggcagcaagaaggccatcaaggtagtccccatacccctgtgtcctgaggctactgggcagtccctccatttccccgtgcctctgaggctgcccagtctctgccctgctgcccacctgtaccttgagctttcttctcgcccaggcttccaactccaccctctcctgccaagcaatcctagccctctgagcctcttggggccccctcagacttgtccctgtgtccacaggtgttctccagtgccaagtaccctgctccagagcgcctgcaggaatatggctccatcttcacgggcgcccaggaccctggcctgcagagacgcccccgccacaggatccagagcaagcaccgccccctggacgagcgggccctgcaggtctgctggccgcgcatatagcctgtcacacaccaggaggactggatactggggaggagccggggccaccatagggttctgtcccccagaggaggctgactgggatgggatggcagctgattaggcccagcaccaaatattcaccatccgttggccatcctggccctcccaggagaagctgactttcctgtgtgcgtgagcaccaagccggagcccgaggacgatgcagaagagggacttgggggtcttcccagcaacatcagctctgtcagctccttgctgctcttcaacaccaccgagaacctgtatggccagagggcagggccgaggggtgtgggcgggaggcccggcctggcttagtggggacccagggcatcagacacaggtacagcacataggccaggagccagggggtgactggggtggctcggctcgggaggcctgggaccccacagtgcacgctgtgcccct

SEQ ID NO: 14839 - DNA, 2300 bp, Homo sapien
caagtaccctgctccagagcgcctgcaggaatatggctccatcttcacgggcgcccaggaccctggcctgcagagacgcccccgccacaggatccagagcaagcaccgccccctggacgagcgggccctgcaggtctgctggccgcgcatatagcctgtcacacaccaggaggactggatactggggaggagccggggccaccatagggttctgtcccccagaggaggctgactgggatgggatggcagctgattaggcccagcaccaaatattcaccatccgttggccatcctggccctcccaggagaagctgactttcctgtgtgcgtgagcaccaagccggagcccgaggacgatgcagaagagggacttgggggtcttcccagcaacatcagctctgtcagctccttgctgctcttcaacaccaccgagaacctgtatggccagagggcagggccgaggggtgtgggcgggaggcccggcctggcttagtggggacccagggcatcagacacaggtacagcacataggccaggagccagggggtgactggggtggctcggctcgggaggcctgggaccccacagtgcacgctgtgcccctgatgatgtgggagaggaacatgggctcaggacagcgggtgtcagcttgcctgacccccatgtcgcctctgtaggtagaagaagtatgtcttcctggaccccctggctggtgctgtaacaaagacccatgtgatgctgggggcagagacagaggagaagctgtttgatgcccccttgtccatcagcaagagagagcagctggaacagcaggtgggaggggtgggacagaggtggagacaggtgcagtgacccagggccttgccagagctcctctccagtcaaggctgttgggccccttattccacccatgggaggtgcacacaaggtcttgttggctgcccctgcaggtccctgtcacctctcacatgtccctgcctaatcttgcaggtcccagagaactacttctatgtgccagacctgggccaggtgcctgagattgatgttccatcctacctgcctgacctgcccggcattaccaacgacctcatgtacattgctgacctgggccccggcattgccccctctgcccctggcaccattccagaactgcccaccttccacactgaggtagccgagcctctcaaggtaggtgagctgggttctgggatgggagctgggccggggacctccctggtcacacaccttctttcctagacaccccacactttgtgtttcagacctacaagatggggtactaacaccacccccaccgcccccaccaccacccccagctcctgaggtgctggccagtgcacccccactcccaccctcaaccgcggcccctgtaggccaaggcgccaggcaggacgacagcagcagcagcgcgtctccttcaggtgggagcagctctttgaggccacctgatttctggcgtgctcagtgcactcgggtggattttctgtgggtttgttaagtggtcagaaattctcaattttttgaatagtttccatttcaaatatcttgttctacttggttcataaaatagtggctttcaaactgtagagctctggacttctcacttctagggcagagggagcctgaacaagtgaggctctgggttccccattcctaattaaaccaatggaaagaaggggtctaataacaaactacagcaacacatttttcatttcagcttcactgctgtatctcccagtgtaaccctagcatccagaagtggcacaaaacccctctgctggctcatgtgtgcaactgagactgtcagagcatggctagctcaggggtccagctctgcagggtgggggctagagaggaagcagggagtatctgcacacaggatgcccgcgctcaggtggttgcagaagtcagtgcccaggcccccacacaccgtctccaaaggtccggcctccccagcgcagggctcctcgtttgaggggaggtgacttccctcccagcaggctcttggacacagtaagcttccccagccctgcctgagcagcctttcctccttgccctgttccccacctcctggctccagtccagggagctcccagggaagtggttgacccctccggtggccgggccactctgctagagtccatccgccaagctgggggcatcggcaaggccaagctgcgcagcatgaaggagcgaaagctggagaagaagcagcagaaggagcaggagcaaggtgagcgggccctggagcttgcagtcggagggccttgggcaagatcgcc

SEQ ID NO: 14840 - DNA, 2296 bp, Homo sapien
taaccctaaccctaaccctaaccctaaaccctaaccctaaccctaaccctaaccctaaccctaaccctaaccctaaccctaaccctaaccctaaccctaccctaaccctaaccctaaccctaaccctaaccctaaccctaaccctaaccccaaccctaacccctaacccctaacccctaaccctaacccctaacccctaaccctaaccctaaccctaaccctaaccctaacaaccctaaccctaaccctaaccctaacaaccctaaccctaaccctaaccctaaccctaaccctaacccgtaaccctaaccctaaccctaccctaacccttaacccccaacccttaacccctaacccttaacccttaacccctaaccgtgaccctgaccccgaccccgaccccgaccctgaccctaaccctaaccacatgagcaacgtgggtgttatattttgggtatcatgtgtgcattaggactgctgcatttgcgttccgatgctgcaactggaccctttaatgcagcccctcgccttagcttgggagaatctcgctgcccaggattcagaggggcttttgctttcccgttttccgcactgaaccgctctaactggtctctgaccttgattattcacggctgcaaccgggaaagattttattcaccgttgatgcgccccgagttgtcccaaagccacgcagtggccccaacgtctgtgcttaggggaatgctgctccacctttacggtgacccccaggtctgtgctgagcagaacgcagctccgccctcgcggtaccctcagcccgcccgcccgggtctgacctgaggagaattctgctccgccttcgcagtaccaccgaaatctgtgcagaggacaacgcagctccgccctcgcggtgctctccgggtctgtgctgaggagaacggaactccgccgtcgcaaaggcgcgccgcgccggcgcaggcgcagagaggcgcgccgcgccggcgcaggcgcagagaggcgcgccgcgccggcgcaggcgcagacacatgctagcgcgtccggggtggaggcgtggcgcaggcgcagagaggcgcgccgcgccggcgcaggcgcagagacacatgctaccgcgtccaggggtggaggcgtggcgcaggcgcagagaggcgcaccgcgccggcgcaggcgcagagacacatgctagcgcgtccaggggtggaggcgtggcgcaggcgcagagacgcaagcctacgggcgggggttgggggggcgtgtgttgcaggagcaaagtcgcacggcgccgggctggggcggggggagggtggcgccgtgcacgcgcagaaactcacgtcacggtggcgcggcgcagagacgggtagaacctcagtaatccgaaaagccgggatcgaccgccccttgcttgcagccgggcactacaggacccgcttgctcacggtgctgtgccagggcgccccctgctggcgactagggcaactgcagggctctcttgcttagagtggtggccagcgccccctgctggcgccggggcactgcagggccctcttgcttactgtatagtggtggcacgccgcctgctggcagctagggacattgcagggtcctcttgctcaaggtgtagtggcagcacgcccacctgctggcagctggggacactgccgggccctcttgctccaacagtactggcggattatagggaaacacccggagcatatgctgtttggtctcagtagactcctaaatatgggattcctgggtttaaaagtaaaaaataaatatgtttaatttgtgaactgattaccatcagaattgtactgttctgtatcccaccagcaatgtctaggaatgcctgtttctccacaaagtgtttacttttggatttttgccagtctaacaggtgaagccctggagattcttattagtgatttgggctggggcctggccatgtgtatttttttaaatttccactgatgattttgctgcatggccggtgttgagaatgactgcgcaaatttgccggatttcctttgctgttcctgcatgtagtttaaacgagattgccagcaccgggtatcattcaccatttttcttttcgttaacttgccgtcagccttttctttgacctcttctttctgttcatgtgtatttgctgtctcttagcccagacttcccgtgtcctttccaccgggcctttgagaggtcacagggtcttgatgctgtggtcttcatctgcaggtgtctgacttccagcaactgctggcctgtgccagggtgcaagctgagcactggagtggagttt

SEQ ID NO: 14841 - DNA, 2300 bp, Homo sapien
agtttggtcccttgaaaccacaatttttgttaaaaaaaattaagaaaattgtatgatttcctcagcaaatacatattgatcatctgttatacagccatgagaagtggttctgttgaacacgtttattttatcagatcccaattctaaaccaggcatagaatggaaaccatgaaggtaggatgaaataacttctgaatgtttgaaaatagtgtacttaaaaataaatatcaggtgtttttgttttgttttttgttttttgtttttgagacagggtctcactctgtcacccaggctggagtgtggtggtgccatctcacctcattgcagccttgacctcccaggctcgggtgatctcccacctcagcctcccaagtagctgggactacaggcacatgccaccatgcccagctaattttttgtattttttgtagagacagggtttcaccatgttgcccaggctggtctagaactcctgggcttaagcgatcttcccacctcagcctcccaaagtgccaggattacaggcatgagccaccatgcctggctgaaaataccaggtttttaagtatcagcactgcctcttcaatcttttctattactatgttgtgctcagtggtattttttattgaattagagcagtgctgttcaatggaaccttctttgaggatggaaatattttatgtctctgctgtgtgggtatggtattagctgggtatggggcacctgcctatagtcccagctactcaagaggctgaggtgggaggatcacttgagcccaggaggccgagtctgcaggttcgtaccactgcaattcagcctgtgtgacagaatgagactcagtctcagaataaaatgaaataaggaaataaaaatgtaattgttgaaataagaaactagtggatggattagacacgagaagaaagaattaattgtttagacgattctctccaaaaagtaagtcagcatgtcacacagagagacatgaggatagatgatagggcagaagttggtgggcttggaggggagaggaagatcagaatgaggtccaaaatgtgtcttagtgaaatcccaggaggagatattaaaattatattagaaagtgaaagaaatagaagttttatttatttatttatttatttattttgagaaggagtctcgctctgtagcccaggctcgagtgcagtggcacgatctgagctcactgcaagctccgcctcctgggttcacgccattctcctgcctcagcgtcccaagtagctgggactacaggcacccaccaccacgcctggctagttttttgtatttttagtagagatgtggtttcacctttttagtcaggatggtctcaatctcctgacctcatgatccaccagcctcaggctcctaaagtgctggaattatacgcataagccactgcacccggcccaaaagctttgtgtttttacaaatattacacatgtttcttgtttaagaaaaaaagtcttcacaataacgtaggagaataagagaaacatttttccaaaaaagagaagtcattgtgattattttatcttattggaatgttggataatatagtctgcttcagtaatcatcaagcatgctatggattttccattttcataggatctgtatctcggttaaggtaatactggtaatttttgtactctatgaaaaatataggccagaatcatagaccttgcatagaagctggatcatgaagacagctctggaggaacacacaggtacacacacacagacacacatatatataaagtatacacatatatattttttaaaagcttttaaagcaaaagccggccctgcccctctcccagagttggcggcctctcccctctcttagggtgggtggggacagtggttgcatgggcagctttccttgtgagccaaagatccctctggacacatgatgcctggccacgccccctttccctttcatctttctcattaaccaatgggcttggagcattaaggccacgcccctattctgccttctactgcatccctggttacgcctcctctggctcagtcgcacagctacctggtaggtgactggaggtgttgatcagtgcttggtgggattttgctgatgtggccccaagcccgcctccctccccaccctgcgatggcagaagaaactcgacaaagtaaattggcagcagccaagagaaaggtaaaaacacaccaggtcacggacccccaacccagccatagatcctctccaacgacaagactgctgccagagtccataccactcccgaggttcaccggactgggacccc

SEQ ID NO: 14842 - DNA, 2300 bp, Homo sapien
ataatggacgcaaggcttaaaaaacttgatctgtttattttatgtttgtcctggaagtcagcctcggcatgcaggaagagtgtatatggattgtgttatttttgctataatcattagtttgttggtattcttactgttttactgttgttgcgtgtggagaaatgactgggtgagatcacaggtgatggagagagacagcgctcagctgagagaccagtgctggcctgtctctcctctgtcctgtgaaaaccctgctccaggagggtccagtcttttggtttccctgggccacactggaagaagaattgtcttgggctacacataaaatacacttatgatagctgatgagcttaaaaaaagaatcccaaaaatatctcatgatgttttaagaaattttactttgggccacattcaaagctgccctgggccacatgctgccctcgggccgtgggttgaacaagcttgatctactcagtaagctcggctcccaaagcaataccttcctttcctcaccatgaaggctgtggttagggtcaaaataaaagctacaaaagccttcctccctagcaaaactaaagctgaagtgtttgatcatcatcttttgtctttgtaataaaaccctctaacttaatgacaagaaccacggttttctcgacatagtaatttttcccttttattacagtggtttcttgtaacaacccgtcatgtccctcttccagcccctcccctttttgccctgcttctagaatgtacagaactgagtgtagtgtttagttgcagtaatgaactgagcagaggtctggagcatgcttctcctctagtcctctgtagcactcatttatcaccatatctgtggcatcctggcgtttgcgtggttgcgccccaggtgtttgctgcccctcctggtttgcggtgatgtgtctgttctggtcagtgctgtggggcgtggccttgcgtatgtcttaggctgtcgaggtgtcccagcgtatggttttgcatttgcctctccggggtcctgaaggttctgtaggtttcacagactccaggtgagtttcggtggtcatttcctgacctgtgatatctatacctagatgagtggtgtgcttttgatttcacttctactcacagggcaaggccgggtctctgatttctcatggggcctcttgctacccagagcctgggacgggcagtgtgttgccccctggctgcggttggctggcaggcaggtgatcctgagtggctcccagccttctgcaggaagctcgggttcagtgggtccttgtgtgcattcccgtgtgggaggttgtgctgaagcctggcggcttggctctgctttcagagcccggaacctcttgactcctgctgtgtgtgcccacgtgaattttggttttgcacttgaggagtttccctgtgtactctcagctccgcagtctaatttttagcagctctttttttttttttagacagggtgtcactttgtcacccaggctggaatgcagtggtacagtcttggcctgccaggttcaagtgattctcctgcctcagcctcccaagtagctgggactacaggtgtgtaccatcacacccggctgatttttttatagagatggggtttcatcatgttggccaggctgatcttgaactcctgatctcaagtgagctttcccgtcggcctcccaaagtgctgggatgacaggcatgagccaccgcctgtggcagcttttgtggttacattgtagccattatttctgtgtttggtgcagattgttggggcggggtggaggttgctgttgctagttgtttagctcttctgctcatcttgagcttttccatatatgtgttcatagtggggttaaaaaaaattcctctagaaaatacttcaactattgtgggtaagagtttttttagtccagtttttaaaaatacgtaaactgagaagttattttgtctatttagataatacttcaaattgacttttattcagtgtttaataagactttgaaattcactcatttttaggggttctaagtgaaaattgtttttctcctttcagttgcatgctgccattagtcaccaggttgacctggaattccttggtttaggtctgggcagcgtcttcctgaacagcctgaagcagaaggtggtgaccctggcaagcagcgcagacgtgctgagcaccgtgcagtcggcctcccaggccatgctgcagagcggctggtccatgctgttgcccaccgctgagaagcaggcccgggcactctgctctcctgtcctgcggaggtgggctcggggaaggaaca

SEQ ID NO: 14843 - DNA, 2300 bp, Homo sapien
gaatgggaggtctgggggcccttagcatgggtggtgtgctgggaggtggggggtccaggtgagtgtggggagtggctcatacatgttttcatgtgtgcacacggaagctctagtgctggctgtgccactgactcatggggtagcctcaggcaactcatgtcttctctctggcctgccacctgggacttttaattcctggggtcccttccagcgccacggttctgtggttgtggggcgagggtagggggtcaatcaccaaagtggtcttttatgttcttcattcattcctttctctactgcctctggccatagcataactgatgaggagctgaaggagaaaaatgccaaactacaagaaaaacttcaacttgtagaatctgaaaagtctgagatccagctcaacgtaaaggagctaaaaaggaaactggagagggccaagctcctgctgccacaggtgagcagctgcagccccgggggttgtgggagacccatccagctgggaccatggtctagggatcatgcagggtatggggaggctccagccaagagctggaaaatttgggtccttgttctggtcccgccatagaatcctctagagtgtactaaaaatgtacaaattggggccctgcctggggaatcagaatctcaagagttagggcttaaaaatatttttttaaaggatcatggatgaaaaccattattttatagattacatttatttatttatttatttatttatttatttatttgagaagtagtctcactctgtcacccaggccagagtgcagtggcgcaatctcggctcactgcaagctccaccccccggcttcacgccattctcctgcctcagcctcccaagtagctgggactacaggtgcccaccaccacacccggctaatttttttgtatttttagtagagacggggtttcactgtgttaaccaggatggtctcgatctcctgacctcgtgatccgcccacctcggcctcccaaagtgctgggattacaggcgtgagccaccgctcccagcctatagattacatttatgtggctagctcatgattctgcttccttctgaggttcaaaaaaacactttcactattccagcagcagctgcaggcggaggctgaccacctgggtaaggagctgcagagtgtgtcagcaaagctccaagcccaggtggaagagaacgagttgtggaaccgcctgaaccagcaacaggaggagaagatgtggaggcaggaggagaagatacaggagtgggaggagaagatacaggagcaggaggagaagatacgggagcaggaggagaagatacgggagcaggaggagaagatgcggaggcaggaggagatgatgtgggagaaggaggagaagatgcggaggcaggaggagatgatgtgggagaaggaggagaagatgcggaggctggaggagatgatgtgggagaaggaggagaagatacgggagctggaagagaagatgcacgagcaggagaagatacgggagcaggaagagaagaggcaggaggaggagaagatacgcgagcaggagaagaggcaggagcaggaggcgaagatgtggaggcaggaggagaagatacgggagcaggaagagaagatacgggagcaggagaaaaagatgtggaggcaggaggagaagattcacgagcaggagaagatacgggaggaggagaagaggcaggagcaggaggagatgtggaggcaggaggagaagataagggagcaggaggagatatggaggcaaaaggagaagatgcacgagcaggagaagatacggaagcaggaggagaaggtgtggaggcaggaggagaagatgcacgaccaggaggagaagatacgggagcaggaggagaagatgtggaggcaggaggagaagataagggagcaggaggagaagatacgggagcaggaggagaagatacgggagcaggaggagaagatacgagagcaggaggagatgatgcaggaacaggaagagaagatgggggagcaggaagagaagatgcaagaacaggagaagatgcggaggcaggaggagaagataagggagcaggaggagaagatacgggagcagaaggagaagatacgagagcaggaggagaagatatgggagcaggaggagaagatacgagagcaggaggagatgatgcaggaacaggaagagaagatgtgggagcaggaggagaagatgtgtgagcaggaagagaagatgcaagaacaggaggagaagatgcggaggcaggaggagaagatgtgggagcaggaagtgaggctgcg

SEQ ID NO: 14844 - DNA, 2300 bp, Homo sapien
agccaagagctggaaaatttgggtccttgttctggccccgccatagaatcctctagagtgtactaaaaatgtacaaattggggccctgcctggggaatcagaatctcaagagttagggcttaaaaatatttttttaaaggatcatggatgaaaaccattattttacagattacatttatttatttatttatttatttatttatttatttatttgagaagtagtctcactctgtcacccaggccagagtgcagtggcgcaatctcggctcactgcaagctccaccccccggcttcacgccattctcctgcctcagcctcccaagtagctgggactacaggtgcccaccaccacacccagctaattttttgtatttttagtagagacggggtttcactgtgttaaccaggatggtctcgatctcctgacctcgtgatccgcccacctcggcctcccaaagtgctgggattacaggcgtgagccaccgcgcccagcctatagattacatttatgtggctagctcatgattctgcttccttctgaggttcaaaaaaacactttcactattccagcagcagctgcaggcggaggctgaccacctgggtaaggagctgcagagtgtgtcagcaaagctccaagcccaggtggaagagaacgagttgtggaaccgcctgaaccagcaacaggaggagaagatgtggaggcaggaggagaagatacaggagcgggaggagaagatacaggagcaggaggagaagatacgggagcaggaggagaagatgcggaggcaggaggagatgatgtgggagaaggaggagaagatgcggaggcaggaggagatgatgtgggagaaggaggagaagatacgggagctggaagagaagatgcacgagcaggagaagatacgggagcaggaagagaagaggcaggaggaggagaagatacgcgagcaggagaagaggcaggagcaggaggcgaagatgtggaggcaggaggagaagatacgggagcaggaagagaagatacgggagcaggagaaaaagatgtggaggcaggaggagaagattcacgagcaggagaagatacgggaggaggagaagaggcaggagcaggaggagatgtggaggcaggaggagaagataagggagcaggaggagatatggaggcaaaaggagaagatgcacgagcaggaggagaagatacggaagcaggaggagaaggtgtggaggcaggaggagaagatgcacgaccaggaggagaagatacgggagcaggaggagaaggtgtggaggcaggaggagaagatacgggagcaggaggagaagatgtggaggcaggaggagaagatacgggagcaggaggagatgtggagggaggaagagaagatgcatgagcaggagaagatatgggaggaggagaagaggcaggagcaggaggataagatgtggaggcaggaggagaagatacgggagcaggaggagaaggtgtggaggcaggaggagaagatacgggagcaggaggaaaagaggcaggagcaggaggagaagatgtggaagcaggaggagaagataagggagcaggaggagaagatacgggagcaggagaagatacgggagcaggaggagaagatacgagagcaggaggagatgatgcaggaacaggaagagaagatgggggagcaggaagagaagatgcaagaacaggagaagatgcggaggcaggaggagaagataagggagcaggaggagaagatacgggagcagaaggagaagatacgggagcaggaggagaagatatgggagcaggaggagaagatacgagagcaggaggagatgatgcaggaacaggaagagaagatgggggagcaggaggagaagatgtgggagcaggaagaggagatgcaagaacaggaggagaagatgcggaggcaggaggagaagataagggagcaggagaagaagatacgggagcaggaggagaagatacgagagcaggaggagatgatgcaggaacaggaagagaagatgggggagcaggaggggaagatgtgtgagcaggaagcgaagatgcaagaacaggaggagaagatgcggaggcaggaggagaagataagggagcaggagaagaagatacgggagcaggaggagaagatacgagagcaggaggagatgatgcaggaacaggaagagaagatgtgggagcaggaggagaagatgtgtgagcaggaagagaagatgcaagaacaggaggagaagatgcggaggcaggaggagaagatgcgggagcaggaagtgaggctgcg

SEQ ID NO: 14845 - DNA, 2300 bp, Homo sapien
actgaggttttatataagtcccctgattcttagaacatgaaggtgtagtattcaagtttggtcccttgaaaccacaatttttgttaaaaaaaattaagaaaattgtataatttcctcagcaaatacatattgatcatctgttatacagccatgagaagtggttctgttgaacacgtttattttatcagatcccaattctaaaccaggcatagaatggaaaccatgaaggtaggatgaaataacttctgaatgtttgaaaatagtgtacttaaaaataaatatcaggtgtttttgttttgttttttgttttttgtttttgagacagggtctcactctgtcacccaggctggagtgtggtggtgccatctcacctcattgcagccttgacctcccaggctcgggtgatctcccacctcagcctcccaagtagctgggactacaggcacatgccaccatgcccagctaattttttgtattttttgtagagacagggtttcaccatgttgcccaagctggtctagaactcctgggcttaagcgatcttcccacctcagcctcccaaagtgccaggattacaggcatgagccaccatgcctggctgaaaataccaggtttttaagtatcagcactgcctcttcaatcttttctattactatgttgtgctcagtggtattttttattgaattagagcagtgctgttcaatggaaccttctttgaggatggaaatcttttatgtctctgctgtgtgggtatggtattagctgggtatggggcacctgcctatagtcccagctactcaagaggctgaggtgggaggatcacttgagcccaggaggccgagtctgcaggttcgtaccactgcaattcagcctgtgtgacagaatgagactcagtctcagaataaaatgaaataaggaaataaaaatgtaattgttgaaataagaaactagtggatggattagacacgagaagaaagaattaattgtttaggcgattctctccaaaaagtaagtcagcatgtcacacagagagacatgaggatggatgatagggcagaagttggtgggcttggaggggagaggaagatcagaatgaggtccaaaatgtgtcttagtgaaatcccaggaggagatattaaaattatattagaaagtgaaagaaatagaagttttatttatttatttatttatttattttgagaaggagtctcgctctgtagcccaggctcgagtgcagtggcacgatctgagctcactgcaagctccacctcctgggttcacgccattctcctgcctcagcttcccaagtagctgggactacaggcacccaccaccacgcctggctaattttttgtatttttagtagagatgtggtttcacctttttagtcaggatggtctcaatctcctgacctcatgatccgccagcctcaggctcctaaagtgctggaattatacgcataagccactgcacccggcccaaaagctttgtgtttttacaaatattacacatgtttcttgtttaagaaaaaaagtcttcacaataacgtaggagaataagagaaacatttttccaaaaaagagaagtcattgtgattattttatcttattggaatgttggataatatagtctgcttcagtaatcatcaagcatgctatggattttccattttcataggatctgtatctcggttaaggtaatactggtaatttttgtactctatgaaaaatataggccaaaatcatagaccttgcatagaagctggatcatgaagacagctctggaggaacacacaggtacacacacacagacacacatatatataaagtatacacatatatatatttttaaaagcttttaaagcaaaagccggccctgcccctctcccagagttggcggcctctcccctctcttagggtgggtggggacagtggttgcctgggcagctttccttgtgagccaaaggtccctctggacacatgatgcctggccacgccccctttccctttcatctttctcattaaccaatgggcttggagcattaaggccacgcccctattctgccttctactgcatccctggttacgcctcctctggctcagtcgcacagctacctggtaggtgactggaggtgttgatcagtgcttggtgggattttgctgatgtggccccaagcccgcctccctccccaccctgcgatggcagaagaaactcgacaaagtaaattggcagcagccaagagaaaggtaaaaacacaccaggtcacggacccccaacccagccatagatcctctccaacg

SEQ ID NO: 14846 - DNA, 2300 bp, Homo sapien
ggcagtgctgagccccggtcctggcagagctcagaaccaggctctcatgagctggggcaagtggggcctagggaacctctgggttgaggaccttgcaccccactctgcagctgccctgctgatttggctcatgcaacctctcctcctgggctcaagcgatccttctacatcggtctcccaagtagctgggatttgggctaccacgtttggctaatttttgtatcttttagtacagatggggtttcacctgtagcccaggctggtctcgaatcctgggctctagtgatctaccctcctcagcctcccaaagtgctgggattacaggtgtgagccactgcgcccggccttgtgccagcttttaaatatcaacaaggacaaattagagaacagtggaagagggtgagcagcatgatgaggtgatacagaaataatttcacatgaagaactgggcatgcctggcttttttttttttttaagctattctgggttggatgctgaggctcacacctgtaagcctgtaatcccagcactttgggaggccgaggtgggtggatcacctgaagtcaggagtttgagaccagcctggccaacatggtgaaaccctgtctctactaaaaatacaaaaaattagctggaattggtggcatgtgcctgtaattccagctactcgggcagctgaggcaggagaatcgcttgaacctgggaggcggaggttgcagtgagctgatatcgtgccattgcactccagcctgggcaacaagagtgaaactctgcctcaaaaaaaaaaaaaaaaaagaaagaaagaaaagaaaatatatctatgcaccagagctcaacactaggttaggagcatttctgagatttggagctattcaaccatggaagttcctggcacatacatcaggtattcacaataccctttctcaggtgtttggtcactgctagtgagcctgcctggatcagtgtttcccaaatggcagtcatttgcatctttgcattttttttggggggggggttgtgggggtatataccataccagattttttaaaaattgacattaaaaatacatgtataaaatgtgtaaagtgcactaatctaaagtgcactggatgtattttttattgatgtacatacttttgttatccatcacccaggtcaaaatacagaatcagcaccacagagggttccctcctcctccttcccagccaataatcttctcctcctacctaaccaactgttcttacttcaagcactgtcaactagtattttacattcttgaactgcatataaagtgtctcaagtttcacttaacacttttcttgaaatacacttgttttttgccactttttatttgacctaagaagtaacattaatgaaacaatgatttgacgtgataggcatttccctcctaatgagcactaaaacacttaactatttgaaaaaagaagtttctccgtgtaccagctaatatattctcctcggccgccgttggtacacggaccacattttgtttctcaaagcaatccgatgatttctgaggtcctttgcagcttgaagacggaacgactgtggtgatcgagtagccaaaagttcacggaatgcactgtcacaattgtgattccgccatagcgccgtgcatccatccaacacttgtttaatacctatatttaatacctaataccttagagtgtcctaggctgtggacacacaagactaaaccccacttcctgagttgaagtgggggaaatagaggagtaaatcatttcacgatgtgtggttaaatgctacagctcaggtaaccacgagcacacagagaaagggcagtttctagaaacagggcggagaggagaccgtgagtgggcatttcccagagcagtctctgccagccaccctgctgtgatcactttgccacagagcagccccggcggtcaacctcagcctcccttagcaacctgagcgccccgcccaggtgccttactattggtctcgtggagcgggatgggcagctctgccgtgcaatcccagctcgcagcccttgctccgcgtgtactcacgggaggactcgcagacgttactgccttcttgcgtgccccggccacccccgggcggcttgtagccggtgcgcggggtggctggggctacgtgcagagctgtcgcggagccggaacagcagcggtgaagcccctcggctcggccgagaccgccgtgcccattgctcgcctcggttgccgccgctttagccgcagccgctgctgccgccgccgggggagaggcagcctattgtctttctccgcggcgaa

SEQ ID NO: 14847 - DNA, 2300 bp, Homo sapien
cacccaacccactaaacctccacactctgccacccctccaggggcagtcagaggggaagctacataggagagggggtgggtgagaaccaggaggacagcaaggaggcgacggtggaggtctgccttcatcctgacatgggcagtaaggcgctgttctgggagggttctggcagagagggtgtctttgggtcttgggcggtgggcacctgggtgccagtcccaggctgaacgccatggcccctaggtgtgcagaggcagagtgtgtactgctcggagcggcaggcagggcccgtggacgaggagcactgtgaccccctgggccggcccgatgactgccagaggaagtgcagccagcagccctgccctgccaggtgagcccgcccccatcccctaccaactccccacccccaggcatcctgggtctgccacaggcccctacatctgggtccccagaggccccagggaggagcagagggagccgggctttcattctcttcccaaggctgaagccccaacccccggtcacctctcaccccagcctgggccagcctggacacctatggtcctcctctttgggtccctggatgtggaaataggcctcaggtcatgctcagtttccctgaggggaaggtggcaggagtggaggggctgtgccttgtcaccagactttgagggcaggacacttacctgagcttggagctctggagaatcatccactggcttctggcactgcccaaaccccgagggcctggaaacccagcctggccctccctgctggtgagcctgtcaatgccacctgtctgatgccatactgatgacacctgtgtgccctcagcaggtggtgggcaggtgagtggcagctgtgctccagctcctgcgggcctgggggcctctcctgccaggctgtgctctgcatccgcagcgtggggctggatgagcagagcgccctgaagccacccgcctgtgaacaccttccccggccccctactgaaaccccttgcaaccaccatgtgccctgtccggccacgtaggctgtggggaactggtctcaggtgagtgtgggatgggaaggtgcccgcctccagccccacccttggtcttcagctacagggaggcagacagccttcctggagaccttgtgggtgggagggaacctgggcattccagggtccagcccctgactctaaagcctcagggatcaggaagcccctggcaagcatggccacagtcatggccttgagctgggaagggccagagagggctggctggggtctctgccactctgacatcaggcagtggacaggttacccagccttgccccagcgtcccctggcagcctgcctcccaggctaagcccctcaccctggcttcccctgcagtgctcagtgacatatgaggaagggactcagcaccgaaatgtcctctgcatcagtgacaccggtgtcccctatgacgaggcccagcagccagccagcgaagtcacctgctctctgccaccctgttggtggcccctggacacactgggccctgaaggctcaggcagcggctcctccagccacgagctcttcaacgaggctgacttcatcccgcgccacctggccccacgcccttcacccgcctcatcacccaagccaggcaccatgggcaacgccattgaggaggaggctccaaagctggacctgccggggcccgtgtttgtggacgacttctactacgactacaatttcatcagcttccacgaggatctgtccttacgggccttctgaggagcctgatctagacctggcggggacaggggatcggacgcccccaccacacagccgtcctgctgcgccctccacgggtagccctgtgcctgccacagagcctcctgcagccaaggaggaaggggcaacgggaccttggtccccgagcccttggcctagccaggccggccgctccccacccccaccctcagagcagacccctgggaaccctttgatcaatttcctgcctgaggaagacacccccataggggccccagatcttgggctccccagcctgccctggcccagggtttccactgatggcctgcagacgcctgccgcccctgagagccaaaatgatttcccagttggcaaggacagccagagccagctgccctctccatggcaggacaggaccaacgaggttttcaaatgatgagggacccaagggctgcggagcaccccacctgcccccgagacccagccccacgctgcccactttgtacccggtcagcagcacccactcctctcctagtcctgacgtggcggagctgt

SEQ ID NO: 14848 - DNA, 2300 bp, Homo sapien
atggcttggttgcccatgccctcatgcctgcggaggggccaaacagacctcctgcccatccaggtcaaccctgtcaatgacccaccccacatcatcttcccacatggcagccttatggtgatcctggaacacacacagaagcctctggggcctgaggttctccaggcctatgacctggactctgcctgtgagggcctcgccttccagctccttggcaccccctctggcctccctgtggagcaccgagaccagcctggggagccggtgactgagttctcctgctgggagttggaggccggcagcctagtctatgtccactgtggtggccctacacaggacttgacattccgggtcagcaatggactgcaggccagccccccggccatgctgaaggtggtggctgtccagctggccatacaaatccaccgcagcacagggctgcatctggcccagggctctgccatgcccatcttgcctaccaacctgttggtggagaccagcgccgtggggcaggatgtgaccgtgctgttccgtgtcaccggaggcctgccgttcagggagctgcagaagcagggggctggtggggtggaggatgctgagtggtgggtcacacaggcgttccaccagcaggatgtggagcagggccacgtgaggtacctgagcactgacccacagcactacaccgaggacaccgtggagaacctggatctgcaggtgcaggtgagctgggaaatcctgagcaatctgtccttcctagtgaccatccagagagccactgtgtggatgctgcagctggagccactgcacactcagaacacccagcaggaggccctcaccacagcccacctggaggccaccctggaggaggcaggcccaagccccccaaccttccactgtgaggtggttcaggctcccaggaaaggcaactttcaactacagggcacgatgctgtcagacggtcagggcttcacccaggatgacgtacaggctgcagaggtgacctatggggccatggcacgtgcctcagtggcagtggaggacaccttctgtttccatgtcacagctccaccatatttctccccactctgtaccttctccatccatattggcggtgacccagacatgcctgtcctcgtggtgcccgagggtggtgggtgtgtcctctctgctgaccagctcttcatcaagagtctcaacagtgccaggtacctctatgaggtcatggagcagccccgccatgggaggttgacttggcgtgggacacaggacaagatcactatggtgacatccttcaccaatggagacctgatgcatggccagctggtctagcagcatgatgactccgagatcacagaagatgatatcccatttcctgctgccatcaggaccagagcagtggtgacgtggcctgggaggaggtatggggtgtcttctgagtggccatccagcctgtgaatgaccacgcccctatgcagaccatcagctgcgtcttccacgtggcctggggtaggtggcggctgctgactacagacaacatggccttcagcaatgctgattcgggctttgctgaggcccagctggtgctgacccaccaggacctcctctctggcagtatcatggccacggatgagcccatgcagcccatctgccgcttcatccaggaggggcctcaggaagaggcgagtcctgttcacacactcaggctgaccacggctggatcccgctgcaggtgtccgatgggcagcaccaggccatcacggtgctggaggtgcaggccttggagccttacctctgtgtggccaatggctccggcctcatggttcctcaaggaggccagggtaccatcaacatggccgagctccacctgggcaccaacctcaacatctgcagtagggatgaggcccactaccacgtcacagacagccctcactggggacagttgctccaagccactcagccagccacagccttctctcagcaggacctgctggttggggctgttttctatggccacaatggcagcctcagctcccgcaacaccctggccttctcaatggatgtgggaccagtgcacacagatgccaccctacaagtgaccattgccctagagggcccagtagccccactgaagctggcctagcacaaggagatctacatcttccagggagaggcagctgagatcagaagggaccagctggaggtgaggagctggaggtggtgagcggggtgtggaccaggtagagggccttcctcccagcctccatgccgggaacacatgtgacttgggctgtacctgtggt

SEQ ID NO: 14849 - DNA, 1754 bp, Homo sapien
taaccctaaccctaaccctaaccctaaccctaaccgaccctcaccctcaccctaaccacatgagcaatgtgggtgttatattttagctgtcatgggtgcattaggaatgctgcatttgtgtttcaacgctgcaactggaccctgcaatgcagcccctcgccttgccttgggagaatctcggtgcccaggattcagaggggcttttagtttcccattttccacactgaaccgttctaactggtctctgaccttgattattcacggctgcaaccgggaaagattttattcactgtcaatgcgccccgagttgtcccaaagccaggcagtgcccccaacgtctgtgcttagcagaatgctgctccacctttacggtgacccccaggtctgtgctgagcagaacgcagctccgccctcgcagtaccctcagcccgcccgcccgggtctgacctgagcagaactctgctctgccttcgcagtaccaccgaaatctgtgcaaaggagaacgcagctccgccctcgcggtgctctccgcgtctgtgctgaggagaacgcaactccgccgtcgcaaaggcgcgcgccgcgccggcgcaggcgcagaggggcgcgccgcgccggcgcaggcgcagagacacatgctagcgcgtccaggggtggaggcgtggcgcaggcgcagagacgcacgcctacgggcgggggttgggggggcgtgtgttgcaggagcaaagtcgcacggcgccggcctgggggcggggggtggggggcgccgttgcacgcgcagaaactcacgtcacggtggcgcggcgcagagacgggtggaacctcagtaatccgaaaagccgggatcgaccgccccttgcttgcagccgggcactacaggacccgcttgctcacggtgctgtgccagggcgccccctgctggcgactagggcaactgcagggctctcttgcttagagtggtggccagcgccccctgctggcgccggggcactgcagggccctcttgcttactgtatagtggtggcacgccgcctgctggcagctagggacattgcaggctcctcttgctcaaagtgtagtggcagcacgcccgcctgctggcagctggggacactgccgggccctcttgctccaacagtagtggcggattatagggaaacacccggagcatatgctgtttggtctcagtagactcctaaatatgggattcctgggtttaaaagtataaaataaatatgtttaatttgttaactgattaccatcagaattatactgttctgtatcccaccagcaatgtctaggaatacctgtttctccacaaagtgtttacttttggatttttgccagtctagcaggtgaagccctggagattcttattagtcatttgggctggggcctggccatgtgtatttttttaaatttccactgatgattttgctgcatggccggtgttgagaatgactgcgcaaatttgccggatttcctttgctgttcctgcatgtagtttaaacgagattgccaccaccgggtatcattcaccatttttctttttgttaacttgccgtcagccttttctttgacctcttctttctcttcatgtgtatttgctgtctcttagcccagacttcccgtgtcctttccaccgggcctttgagaggtcacagggtcttgatgctgtggtcttgatctgcaggtgtctgacttccagcaactgctggcctgtgccagggtgcaagctgagcactggagtggagttt

SEQ ID NO: 14850 - DNA, 2300 bp, Homo sapien
atgcccctgtgtcctgaggctactgggcagtccctctatttccccgtgcctctgaggctgcccagtctctgccctgctgcccacctgtaccttgggctttcttctcgcccaggcttccaactccaccctctcctgccaagcaatcctagccctctgagcctcttggggccccctcagacttgtccctgtgtccacaggtgttctccagtgccaagtaccctgctccagagcgcctgcaggaatatggctccatcttcaccgacgcccaggaccctggcctgcagagacgcccccgccacaggatccagagcaagcagcgccccctggacgagcgggccctgcaagtctgctggctgcgcacataacttagcctgtcacacaccaggaggactggatactggggaggagccggggccaccaagggttctgtcccccagaggaggctgactgggatggggtggcagctgattaggcccagcaccaaatattcaccatcccttggccatcctggccctcccaggagaagctgaaggactttcctgtgtgcgtgagcaccaagccagagcccgaggacgatgcagaagagggacttgggggtcttcccagcaacatcagctctgtcagctccttgctgctcttcaacaccaccgagaacctgtatggccagaaggcagggccgaggggtgtgggcggtaggcccggcctggcttagtggggacccagggcatcagacacaggtacagcacatagcccaggagccagggggtgactggggtggctcggctcgggaggcctgggaccccacagtgcacactgtgcccctgatgatgtgggagaggaacatgggctcaggacagcgggtgtcagcttgcctgacccccatgtcgcctctgtaggtacaagaagtatgtcttcctggaccccctggctggtgctgtaacaaagacccatgtgatgctgggggcagagacagaggagaagctgtttgatgcccccttgtccatcagcaagagagagcagctggaacagcaggtgggaggggcgggacagaggtggagataggtgcagtggcccagggccttgccagagctcctctccagtcaaggctgttgggccccttattccacccatgggaggtgcacacaaggtcttgttggctgcccctgcaggtccctgtcacctctcacatgtccctgcctaatcttgcaggtcccagagaactacttctatgtgccagacctgggccaggtgcctgagattgatgttccatcctacctgcctgacctgcccggcattgccaacgacctcatgtacattgccgacctgggccccggcattgccccctctgcccctggcaccattccagaactgcccaccttccacactgaggtagccgagcctctcaaggtaggtgagctgggttctgggatgggagctgggccggggacctccctgctcacacaccttcttccctagacaccccacactttgtgtttcagacctacaagatggggtactaacaccacccccaccgcccccaccaccacccccagctcctgaggtgctggccagtgcacccccactcccaccctcaaccgcggcccctgtaggccaaggcgccaggcaggacgacagcagcagcagcgcatctccttcaggtgggagcagctctttgaggccacctgatttctggcgtgctcagtgcactcgggtggattttctgtgggtttgttaagtggtcagaaattctcaattttttgaatagtttccatttcaaatatcttgttctacttggttcataaaatagtggctttcaaactgtagagctctggacttctcacttctagggcagagggagcctgaacaagtgaggctctgggttcctcattcctaattaaaccaatggaaagaaggggtctaataacaaactacagcaacacatttttcatttcagcttcactgctgtatctcccagtgtaaccctagcatccagaagtggcacaaaacccctctgctggctcatgtgtgcaactgagactgtcagagcatggctagctcaggggtccagctctgcagggtgagggctagagaggaagcagggagtatctgcacacaggatgcccgcgctcaggtggttgccgaagtcagtgcccgggccccacacagtctccaaaggtccggcctccccagcgcggggctcctcgtttgaggggaggtgacttccctcccagcaggctcttggacacagtaagcttccccagccctgcctgagcagcctttcctccttgccctgttcccca

SEQ ID NO: 14851 - DNA, 2300 bp, Homo sapien
ctttctgaattgtggccaccttcataccagtctgtcatggaacacttaagccgcttgagtgtctgctggtactcccagccctgccatgcctgagccccctgcacacaaggagccaggagtaatcagggcagacccattagggcacggggacttctggattgtgaaattggctctctgggggccaaggccttctaacgttggtggaagtggctttggcttattgggtcggattctaggccattcgttccaacctttagagacatcccagctttccctagcccagagtctgcagcccctccaccatcccacatcctccccctccctttcctcatgaaccccagtcgcgcctctgccttctcaaacccctccaccatcccacaccctcctcctgcccttcctcatgaaccccagtcgcgcctctgccttctcatccctgcgcaccacacaggctcgctcgtgcccggtgaatgctgaggctgctctgcacgtggagtgtggccctgtgggcaagggctgggctcttggaggtaggggagctacaggggcgactgggaggaggatgttgtgttacacacgcatcagagttaactttgcagtgagagcggccttgctgcggccaaagaacatggaaaagcatgagtggggtgatgtgccttaaagcatcagacacttgggcctcgggcatcaggagccagccacagggatgtctggggaaatggcgttccatgagatgcaagcacacaagaatgcacttggcacatctggggaacagcaggcagctgatatcactgggcccaccccgcaccagggaggatggaagcaggtgaggagctagaccacactgaggcggtggtcgggactcagagtttgctcagtgagccgttcactaggtgcaggggcagttccccgtctgaatttaggtgacgacactcaggtccagccttgccagtctcagcctccggtctccgttccccctctgcagaggtcactttgtctgctgcacgtgatcatgaggggttgtgaagtgcttgccccatcagtagccatgtgtgcatgtgtaaataccatcctctgtgtgccctggaggctgtccttcagatagcatgtacaggtggcagcatagggcctgtccctagtgagagtgcagggaactcagcaccgtcaactcctcgaccctgcaggtcagattatccttgtagaggccccctggatggcaccaagatcggccctggcaagcaggtgaccctgacttcagagcccttgcctgagggcctggcctggcagctctgctgttagaagcaggaggtgtgcagggggtggggagcagcccagcctctgtgatcttctccatggcaggatctcccagcaggtagagcagagccggagccaggtgcaggccattggagagaaggtctccttggcccaggccaagattgagaagatcaagggcagcaagaaggccatcaaggtagtccccatgcccctgtgtcctgaggctactgggcagtccctctatttccccgtgcctctgaggctgcccagtctctgccctgctgcccacctgtaccttgggctttcttctcgcccaggcttccaactccaccctctcctgccaagcaatcctagccctctgagcctcttggggccccctcagacttgtccctgtgtccacaggtgttctccagtgccaagtaccctgctccagagcgcctgcaggaatatggctccatcttcaccgacgcccaggaccctggcctgcagagacgcccccgccacaggatccagagcaagcagcgccccctggacgagcgggccctgcaagtctgctggctgcgcacataacttagcctgtcacacaccaggaggactggatactggggaggagccggggccaccaagggttctgtcccccagaggaggctgactgggatggggtggcagctgattaggcccagcaccaaatattcaccatcccttggccatcctggccctcccaggagaagctgaaggactttcctgtgtgcgtgagcaccaagccagagcccgaggacgatgcagaagagggacttgggggtcttcccagcaacatcagctctgtcagctccttgctgctcttcaacaccaccgagaacctgtatggccagaaggcagggccgaggggtgtgggcggtaggcccggcctggcttagtggggacccagggcatcagacacaggtacagcacatagcccaggagccagggggtgactggggtggctcggctcgggaggcctgggaccccacagtgcacactgtgcccct

SEQ ID NO: 14852 - DNA, 2300 bp, Homo sapien
atagaagaaaatccacgtgactttgggttggtgatgagttcttagatacaataccaaaagccagtccataaaagaaaaaaaatgataatttggacatcattaaaatttaaaatgactactctgtgaaatatcctgctaagagaatcaaaaaataaggcacacactgagagaaaatatttataaaacaagcctgaaaaaaagacttgcatgcaaaatatacaaagacattctaatactcaacaagaagaaaaacaacccaattaaaagataaagacatggaataggaacagctccagtctacagctcccagcctgagtgacgcagaagatgggtgatttctgcatttccaactgtggtactgggttcatctcactggggcttgtcagacagtgggtgcagcccaccaagcttgagccgaagcagggcgagacatcgcctcacccgggaagcacaaggggtcagggaattccctttcctagccaagggaagctgtgacagatggcacctggaaaatagggtcactcccaccctaatactgcgcttttccaacggtcttagcaaaccgcacaccaggagattatatcccacgcctggctcggagggtcccacacccacggagcctcgctcattgctagcacagcagtctgagattgaactgcaaggtggcagcaaggctggtggaggggtgcccgccattgctgaggcttgagtaggtaaacaaagtggctgggaagcttgaactgggtggaacccaccacagctcaaggaggcctgcctgcctctgtagactccacttctgggggcagggcatagtcgaacaaaaggcaacagaaatctctgcagacttaaatgtccctgtctgacagctttgaagagagtagtggttctccaagcacggagtttgagatctgagaacagacaaactgcctcctcaagtgggtccctgacccccgggtagcctatctgggaggtaccccccagtaggggcagactgacacctcacattgccgggtacccctctgagaccaagcttccagaggaacgatcgggcagcaacatttggtgttcagcaatattcactcttctgcagcctccactgctgatacccaggcaaacagggtctggagtggacctccagcaaactccaacagacctgcagctgagggtcctgactgttagaaggaaaactaacaaacagaaaggacatccacacaaaaaccccatctgtacgtcaccatcatcagagaccaaaggtagataaaaccacaaagatagggaaaaaacagagcagaaaaactgaaaattctaaaaatcagagcgcctctcttcctccaaaggaacaaagctcctcaccaacaatggaacaaaggtggacggagaatgactttgacgagttgagaaaagaaggcttcagatgatcaaacttctccgagctaaaggacgaagttcgaacccagtgcaaagaagttaaagaccttgaaaaaaagattagatgaatggctaactagaataaccaatgcagagaagtcctgatggaggtgaaaaccatggcacgagaactatgtgacgaatgcacaagctttagtagccgatgcgatcaactggaagaaagggtatcagtgattgaagatcaaatgaatgaaatcggggtcagggtcaagggtcagggtcagggtcagggtcaagggtcagggtcagggtcagggtcagggtcagggttagggttagagtcagggtcagggtcagggtcagagtcagggtcagggtgagggtcagggtcagggtcagggtgagggtcagggtagggtgagggtcagggtgagggtcggggttagggttcagggtcggtgttagggttcagtggtccgggttagggttcagggtccggattagggttcagggtccgggtcagggttagggtcagggtcagggttagggtcagggtcagggttagggtcagggttttagggtcagggttttagggtcagggtcagggtgagggtcagggtcagggtgaggaccctttacagcagatgaaggcctctccccagccagaaaagatggagcacacgctgggtggtggccccgcttcctcactggaaggagatggtgctcttcttttttctttctgaattgtggccaccttcataccagtctgtcatggaacacttaagccgcttgagtgtctgctggtactcccagccctgccatgcctgagccccctgcacacaaggagccaggagtaatcagggcagacccattagggcacggggacttctggattgtgaaattggctctct

SEQ ID NO: 14853 - DNA, 2300 bp, Homo sapien
tcaagcttcccagccactttgtttacctactcaagcctcagcaatggcgggcacccctccaccagccttgctgccaccttgcagttcaatctcagactgctgtgctagcaatgagcgaggctccgtgggtgtgggaccctccgagccaggcgtgggatataatctcctggtgtgcggtttgctaagaccgttggaaaagcgcagtattagggtgggagtgaccctattttccaggtgccatctgtcacagcttcccttggctaggaaagggaattccctgaccccttgtgcttcccgggtgaggcgatgtctcgccctgcttcggctcaagcttggtgggctgcacccactgtctgacaagccccagtgagatgaacccagtaccacagttggaaatgcagaaatcacccatcttctgcgtcactcaggctgggagctgtagactggagctgttcctattccatgtctttatcttttaattgggttgtttttcttcttgttgagtattagaatgtctttgtatattttgcatgcaagtctttttttcaggcttgttttataaatattttctctcagtgtgtgccttattttttgattctcttagcaggatatttcacagagtagtcattttaaattttaatgatgtccaaattatcattttttttcttttatggactggcttttggtattgtatctaagaactcatcaccaacccaaagtcacgtggattttcttctataaaacttttacaattttatatttgatcatttaaggctacagactatcttgagtgattttttgggggtgagctatgaagtttttgtccacattcagtgttttccgtatggtttccgattgtctattgccatttgtggaacagacttttctttccccagtgaattgcttttgcccctttgacaaaatcaattgaatgtatttactcgggttttttgggttctgtattgtgttctgttgagctgtttgtccattccttcaccaatatcactctcttcattgctttagctttgtggtaaagctaacaataatgagtgtactgctcctaaacaaggagtatctgcatttatttaatattttttattcttctcaaccgtgatctaaagttttctgaatgcatatttgtatgtattttgttagatttatacctaataaattaaattttgggaatgctattgtaaatggtatttttttcaaatttcaagttcaaattattcctatacattattgctgatgatagaaagaaaatcaggcagtgtgtggtggctcacgcccgtaatcctagcactttgggaggcctagttgggaggatcatttgagcttgggagttctagaccagcctgggcaacatagttagacctgccccgcccataaaaaataaaataataaataaaggaaaatcaggtggtgccggacacagttgttcacacctgtaatcccagtgtgttgggaggctgaggctggagaatttcttgaacccgggagctggaggctgaactcgggagctgtgattacaccactgcacttcagcatgggtgacagagcgagaccctgtctcttaaagagaaaagaaagaaaatcaattaagttttgcctactggccatcttttttttgagatggagtttggctctgtcacccaggttggagtgcagtgacatgatcttggctcactgcaacctgcgcctcctgggttcgagcaatcctcctgcctcagcctcctgagtagctgggattacaggcacgtgccgccatgcccagctaatttttgtatttttagtatagacgcggtttcaccatgttagccaggctggtctcaaactctggacctgaagtaatccgcccgcttcagcctcccaaaatgctgggattacaggcatgaactggccatcttctttgcttccttgctccatgagttccgatcaaggcatgggatggtgggctccatttcagtcgtaatttccaaaatccacagcctggaaaaatctagacgctgattttcagagactccccatggctgccgcaagggggcgcatggcccctggcaactcggggcgccgtgcacgcaccgcgtctcatccacacagcggcagtcactttgcggccactatgaggactgagcttcctctccccaggacccgcatgggagagaccgcggcttcgagacacctggggacacctggggacacctggggcggcgtccgcggtgaggactgggagacgctgctgcatctccgggacaccacttggggccgaggccaaggtgaggaaaaggcttcccgccccc

SEQ ID NO: 14854 - DNA, 2300 bp, Homo sapien
cagagcagcaggagacagaatgagtgcgagcaggggaaacgcaaacgcttataaaacgatctgatcttgtgagaactcactcactatcaggagaacagcatggggggaaaccgctcccatgattcaattacctcccactgggcccctcccaggacacctggggattacggaaactataattcaagatgagattagggtggagacacagccaaaccatatcaaacagaaagaacatacttttttccttagactcttatttttattaatctactcatcattgccattatcaaagctatcacctgttgagtgcctcttatataccaagcacggtataattcactttatgctctcgcggtctacgaatatggattagccccagagaagtcaagagacccaaggaaggtcctacaacaatacaaggttgccctgagaatctgacccgggcctgtatgactccaaggctggcacaaatattgcttgtctgacagattattaaacagtaacaaatacaaataaattattcaagaaccattttctatttttagaaacctacatcatttatatgacatcatagactctgccaagcagtggcatcaacagcctcataattatccacagtttagcaacagaaacagttttccctcttacctgcagtagagtcaacattctcccaggcagctgctccaccaagcacatcatccacttctttcagttttgggtacttccgatttgttacctaacaaaaacaacacttcagactccaagtaactgaatagcgcaaacctgggctgccaaaccttaaatttcaggattacataagagttcactcggctgggcgtggtggctgacacctgtaatcccagcactttgggaggccaagacgggcggatcacgaggtcaagagatcgagaccatcctggctaacacggtgaaaccctgtctctactaaaaatacaaaaaattagcccggcgtgttggcgggcgcctgtagtcccagctactcaggaggctgaggcaggagaatggtgtgaacctgggaggcggagcttgcagtgagccgagatcacaccactgcactccagcctgggctacggagcaagactccatctcaaaaaaaaaaaaaaacaaagagttcactcttcccgtagtttcaaactccaaactcccacaacacagtacaaactggagtagcatgcaaacattaagactgacgtagcaccaacatattctaactgctaaaaagtaaaggtattctggccaggcgtggtggctcacgcctataatcccagcactttgggaggccaaggcaagcggatcacctgaggttgggagttcgagaccagcctggccagcgcggtgaaaccccgtctttactaaaaatacaaaaattagccggggatggtggcaggcgcctgtaattccagctactcgggaagccgaggcagaagaattgcttgaacccgggaggcagaggttgcagtgagccgagattacgccattgcactccagcctgggaaacagagcgagactctgtctcaaaaaaaaaaaaaaaaaaaaaaaaaaaaaaaaaaaaaaaaaggtcgggcgcggtggctcacgcctgtaatcccagcactttgggaggccgaggcgggcagatcacgaggtcaggagaccgtcctggctaacacacggtgaaaccccatctctactaaaaatacaaaaaaatcagccaggggtggtggcggacgcctgtagtcccagctaattgggaggctgaggcaggagagtggcgtgaacccgggaggcagagcttgcagtgagccgagatcgcgccactgcactccagcctgggcgacagagcgggactccgtctcaaaaaaaaaaaaaaaaaaaaaaaaaaaaaacaataaaaaaaaataaagaaagcacacaatacattacataatatattagaaggtaataagccctatggaaacaattacaaagggaaggagaataaattggaaggaggggctgaaatttaaaatacggtaaagacaagaccaatgagtaaggtggcgatctaggggaagagtgaactgagcaacagcaagtgcaaaggccctgctagcaccatgagcacgatgagagatcgtccaggaggcggtgttgatgcggcaaagggcaacaggaagggcattaggacttgaaatcggagacgcacgcaggggagggagtcagtgtcggaacctggtaggccctgggagaactccggcttttcgtctgcgtgagctggagaagagccgaaggtttctgcgcacagcacggacctgcgtgcc

SEQ ID NO: 14855 - DNA, 2300 bp, Homo sapien
cctgtaatcccagcactttgggaggccaagacgggcggatcacgaggtcaagagatcgagaccatcctggctaacacggtgaaaccctgtctctactaaaaatacaaaaaattagcccggcgtgttggcgggcgcctgtagtcccagctactcaggaggctgaggcaggagaatggtgtgaacctgggaggcggagcttgcagtgagccgagatcacaccactgcactccagcctgggctacggagcaagactccatctcaaaaaaaaaaaaaaacaaagagttcactcttcccgtagtttcaaactccaaactcccacaacacagtacaaactggagtagcatgcaaacattaagactgacgtagcaccaacatattctaactgctaaaaagtaaaggtattctggccaggcgtggtggctcacgcctataatcccagcactttgggaggccaaggcaagcggatcacctgaggttgggagttcgagaccagcctggccagcgcggtgaaaccccgtctttactaaaaatacaaaaattagccggggatggtggcaggcgcctgtaattccagctactcgggaagccgaggcagaagaattgcttgaacccgggaggcagaggttgcagtgagccgagattacgccattgcactccagcctgggaaacagagcgagactctgtctcaaaaaaaaaaaaaaaaaaaaaaaaaaaaaaaaaaaaaaaaaggtcgggcgcggtggctcacgcctgtaatcccagcactttgggaggccgaggcgggcagatcacgaggtcaggagaccgtcctggctaacacacggtgaaaccccatctctactaaaaatacaaaaaaatcagccaggggtggtggcggacgcctgtagtcccagctaattgggaggctgaggcaggagagtggcgtgaacccgggaggcagagcttgcagtgagccgagatcgcgccactgcactccagcctgggcgacagagcgggactccgtctcaaaaaaaaaaaaaaaaaaaaaaaaaaaaaacaataaaaaaaaataaagaaagcacacaatacattacataatatattagaaggtaataagccctatggaaacaattacaaagggaaggagaataaattggaaggaggggctgaaatttaaaatacggtaaagacaagaccaatgagtaaggtggcgatctaggggaagagtgaactgagcaacagcaagtgcaaaggccctgctagcaccatgagcacgatgagagatcgtccaggaggcggtgttgatgcggcaaagggcaacaggaagggcattaggacttgaaatcggagacgcacgcaggggagggagtcagtgtcggaacctggtaggccctgggagaactccggcttttcgtctgcgtgagctggagaagagccgaaggtttctgcgcacagcacggacctgcgtgcctcagctttaaggaaatcaccgtggccgccgctgtgaacgcagagaagggcgcgagcgtgggagcaggaacccaaggcggtgggaaacggtggggctttctgagtgtattggaaagtagagcccacagatctgctgcagaccagaaaggggcgcgagaaagagcggacagaggcagacgccggggctggcggcgatggagcagcagtcggaggacgcggaaggcctgcgagagtcgcccgcgcccagcgccggccttcgggtcccaccttgcgggtgatgttgtgcacgtaggggcacgtgttgcaggagaagcggtggcagcgttgtccctcctccacgatcagcccgttcccgcagccggggcagaacagcagcatggtctcgaactccgcaggctccaactcccggcagctcccactgccgctcagcgccgatgcgccgcccgcctcgagctcacattggtcctggcagccttcccgccacaccaaccaaccaatagacagggcgattctgcgctcccggccctgctgcaggctgtctcgcacttgtcattggtcactgcagccgccccaccccccccggcgcgccagtggctgggcggcctcgctggggcgggccgcagttcctgcgcgtgcgcgcttggcctccctagtgcgggctggcagtgcgggcagagcccggctgagaggggcggccctggaggagacggaggccgcgggtgggcccgaggcgcaagaggaagatgaggacgaagaagaggcgctgccgcactccgaggccatggacgtgttccaggagggtctggctatggtggtgcaggacccgctgctctgcgatctgccgatccagg

SEQ ID NO: 14856 - DNA, 2300 bp, Homo sapien
acagcctccgatggcaggaaaggaaccaacacctctgtgcacagggcaggtttgtggttgccccagtacccctgggcatggcctgtgagtttctgagcaggctgaccagcactgttaggtcttcctgctgtgaaagcctggaccacataacctgaagggaggagggtagcacttacgcattacttctccatccatcttgcacactcggaccgtcattgcctggccgtattctagggctatttgggagttgacttcttccagagtaacctacaaaagaccaagggcagaagtgggaaccctggctctctttaccaccttgagcaacaacaaagaacaagccgatagtggccaaaaagtggtgctccattttacgaagggcaaggaagggtggttgcctgtacgttatggtttcccaattcatcagagccccaatctcatgttccactcacattttaatgtccatagtggacagagtctctgggggaaagaggtgctaagaaacaggcaagagaataaactcacatgaggacctgcccccaggggtgggtagaggcctgtcagttcacgctgagtatatccctgatcatcaggacccaggccaggcttcgggactgagtaaggcaggtgtgcaaaatttaccggggcagcaaaacacggtaataacaataaatattttaatacaacatttaagaaatacaaggcaattaaaatatccatgatgagcaaaatataaaacatttaaaattggccgggcgcggtggctcacgcctgtaatcccagcactttgggaggccgaggcgggcggatcatgaggtcaggagatcaagaccatcctggcccaacatggtgaagccccgtctctactaaaaatacaaaaaattagccgggcgtggtggcgcgtgcctgtagtgaacccgggagggggaggttgcagtgagtcgagatggcaccactacactccagcctggcaacggaccaagactcagtctcaaataaataaataaataaataaaaagacagtatcgtcccaaagcatgatactgacgctttgacacatgattgacgcttgaggcaaatggaacaatcagtactactaatcttgctcttatttaaaactaaatttttcttttaccgtaggctctttttttgcctcaactttgacttttaaaggtattacaggccaggcgggtggctcacacctaaatcccagcattttgggaggccgaggcaggaggatcgcctgagcccaggagtttcagatcagcctgggcaacatagtgagactccctctgtacaaaatatttaaaaattagccgggtgtggtagcgcgcacctgtggtcccaattactcgggaggctgaggtgggaggacgccgctgcactccagcccgggcaacgcagcaagaccctgtcccccgagccccctaaatacaattacattaaaatgtcatttgatgtcactcactaatgaggtttttggttcctctttaagcttcgcgccccaggcgagtgcgcccggtcaaggttaaaaccctcgtttacgcccagaggcgccttcctcagccttgggccgcagtctcccaccagcaccttcggaggctgccggcgcccggatgcccggaccccggggaacgactcccgcgcccccagcccccgcccgcacacacctggatcggcagatcgcagagcagcgggtcctgcaccaccatagccagaccctcctggaacacgtccatggcctcggagtgcggcagcgcctcttcttcgtcctcatcttcctcttgcgcctcgggcccacccgcggcctccgtctcctccagggccgcccctctcagccgggctctgcccgcactgccagcccgcactagggaggccaagcgcgcacgcgcaggaactgcggcccgccccagcgaggccgcccagccactggcgcgccggggggggtggggcggctgcagtgaccaatgacaagtgcgagacagcctgcagcagggccgggagcgcagaatcgccctgtctattggttggttggtgtggcgggaaggctgccaggaccaatgtgagctcgaggcgggcggcgcatcggcgctgagcggcagtgggagctgccgggagttggagcctgcggagttcgagaccatgctgctgttctgccccggctgcgggaacgggctgatcgtggaggagggacaacgctgccaccgcttctcctgcaacacgtgcccctacgtgcacaacatcacccgcaaggtgggacccgaaggccggcgctgggcgcgggcgactctcgcaggccttcc

SEQ ID NO: 14857 - DNA, 2300 bp, Homo sapien
atacgtgcaggcttgggctcagaggcctgacactgagcacacgtgtatcgacccccctctgatcatccttctgatgacctcactcaggaggccagggtgggctgagagcctggggattcctggacacaggctctgagctggggatttgcctgcagaggcagactggggcatgctccccactgaaggtgactcctgggtgcggggggtttcagctctgagccagctgtgactggtgctcctggcagctggcgatgagtgtctgggtcttggagcgggtctaggtggggtctgacagagtccactgcaggaggaagacctgctgacaccagatgcccagctgtggcatgctttggaggcaagcccagtccccagctttccagagaggacaccacttctggccctgccagcctagtctgggcatccaggcccgatagggcttgcttatccctggcaggtcaataatgctaagcatggagactgtcctgtctctggctgtgagcctggcatgggaggggtggcacgtgcaggctatcggagcactgagtgttggcactggggcaggctccctctcacccggtgtccgtgatgcactggcagtcatcccctggtggagttaccctccaccccctccaaagcttccattgtctccttctacatgagaattgtgttgatattgcttgtgttcagagagcacccattatgtgcaggcaccgccctatcccgtggcatggacaaggatatgggcaggggaatcttgcccaggctctgggatctaccggtaagtgtaccagcacctttagttcaaattctccccttttctgtctagccaaggagcaggccattgtctgcgtcgggccctcaagtgcaacagctcagtttggagagggctggtgccacccagacccagaggatggcactgaagcagcagcaccttgtgaccagcacagggcctgaagacacatttgtccgaggcatgggggggcaccctgtagaggggtccttagggacccatgggacgaagggatccctgcaccctctatccagaggaagccttggccacccaccactcagagctcctggacagccctgcccgtactctgctgttggcacccctgtcccccaccctgggagggtcagcccacccagtgtcaggagagaaatgctgggaaactctcaccagcagccccagcggaaagcagagtgccattttgagtccagcccagattgtgcagggatatgagcccaccccggggtggccgctgagctctgagacagtgagaagagcccagagtggacaccagacactgcgctgcctctgctgagtggcttcgggtggggccggtgcagcctggcctgagtgcctgctggtggagcggggcttctgggggtaggggcacagggcagggggaggggtaatgactgtggtcctgaactgagtgtgtgcatcggtgtgtacacgtgtgtgtgtgcacgtgtatgtacccatgaaagatgtacatgagtaggtgggtgcatgtgagcacgtgcatgtgcaggcgaatgaacgcatgaagtggaaggatgtggggacgtgtgtgtatgattgtgagtgatcggtgcacatgaatgtgtgtgagggaatgtgagtgcttagtgggattgggtgagtgtgggatacaggacttgtcagcgtgggcctctggaggaggtcgggtttaggggagccagggatacacacccatcctccgccctttaccccgtgcctgctctccctcctcaccctcttctcagcacaaatcagggcaggacagctcaagcctcaatctggagccagggagaggcggagccgcccagcgctgacactgcggtccgctcccaccaggtcctccgtcgggccgaggcgctggagaccccagccccaggtgtccccgcaggcggaccctggggagaagggagcccggcggccttccgggaggaggtgacttgggccgggcaggcgggcggcgcgcattcctgagctctgagtcagcgcgaccgccccgctccggccgggcccgcccccgggcgcacgcccctcgctccagggcattcccgggcgggccggaccggcgggcgggcggggactcggcgcgggccctcccggccagcggcggcagcctcctccccggcgccctcaggaccccccagagcccccggcggcggcagtgagtgagcgcggccgggagcgcagggctccgggggcgggcgggttccggggctgcgtccggagggcggggcgagtcctcagcacccggggccggagctgctcagagcggccgggg

SEQ ID NO: 14858 - DNA, 2300 bp, Homo sapien
cctgactctcttttcttcggactcagcccgcctgcacccaggtgaaataaacagccttgttgctcacacaaagcctgcttggtggtctcttcacacggacgcgcacgaaactcaggattgtacccagtccacatagacaagtgtgtgcacatatgtgtgctctgcctcctgcctgccctactactctctgtcctggtggaggagccccctatacggaaacccagctcccggcccctctcttcccgcgtcatgcaccctggagaaatggaaatcagctgcagttgcccagcactcccggggctggtgggcaggcgtctgagaatgggttagggttagggtctagaccaaacccagggtttgtggccctcacaccaggacacgagggaatgggagccctgaccagtaagaggagtgttcccaacagctaccccagaatcctctgctaccccagaatcctcagctcagcttctaggccacaagtaatcacccaaggggtcagaccctgggctttggggagtccctggaaggatcagaagaaaccgcccggggagcagggctccagggatgggcccatgaccagctcctggctatttggggaagaggcagaagggggccaggccagccagtgtcctgaagtcataggctatttctgaggcagctgccccctccccatatcccagggtttggcaaggggttcccataagcacctgggcccagggcctggcagcacagccccaggcagggaggatgtagctcacacacacccaacctcggcctgcccagtggctgccttctctgcccaaggaagctttggccctccagggctcatcagacacagatggccgcagagaccagtcaagaggccagcagccaccctgctgggaagctgccagctcaaagctgtgtagaggagtccatgggctctgacctgacacccacctcaacagctgtcagcacccccctccatcagagagaagacggagccagtgtgctgggcaccctggggtcataaggctgatactagaaccctggcccctgtagccaatacagccacatctctcaaagacttgtttataaaggctccagcgactgatggccacacctcctacagctggaggcagctccagcccctccacagcctgtggcctattgtggaggtcgggggtcagggctgctcaccccagcaccaatactagccttcactcctttcaaagcctcaagggtgttctcatctccatcttccactgatatccttgcctcctccaacaagcctgttccagcccagcagtgggacaaactggggacagaggaagccccaggccccctcctctcacctggcaccactttctcttgtcctggaccagcccgccagcccactctgcaggccacagttggaactctcatcccaccgcttccagcctgtggtgggagcatgagaccacaaaccaggaagtggggggggggagtgcccagagattgcgcaacccccagcactcagtccagaacatctggagaagttggttgctggcgccccggtgccggcctctccacctcctggggcaggggccaatctgctctccaagtgattctctttcctcataagaaaggtggggataaaaacacccctctgggagcctctggactccccgtgagttctgcaaggaccatgtatcacttgtaacatcagaataaatataagtacaaagtaacacccatcctctccctgcccatcaagaggacaaaggctcaactggggcctcagtttccctactagactgagggggagcactcggggggatggggggctgttcccacaggaaggagagactcattgtttgggaggcatggctgcagataagcagggagggtgtggaatcacatccagggctgctttataaacacggattgatgacacattatgcccccaccccgggaagcggcacacagtgctacaaacagctggtggcttccagccggctgatggcccctccctccccaggaagtcctggctggggcccatgggggtgggacggctggtcagaggaggagaggcagttggagaccaggtcctgccctgttagcctttctgtaggaccaggtgtcacactcatctgagggctccagacacatggcctgtgcgtctgtcctgcccagcgtctcccacctgacgcggccaggtgcccagttgctcttcaaggccttttcaggtgctcctttccaggaccagggtcacagaagtcaaagctcaggaaaagcccctcgagggtttttgtgcggcagaggtgggttgtggggtggga

SEQ ID NO: 14859 - DNA, 2300 bp, Homo sapien
gtggaggtcgggggtcagggctgctcaccccagcaccaatactagccttcactcctttcaaagcctcaagggtgttctcatctccatcttccactgatatccttgcctcctccaacaagcctgttccagcccagcagtgggacaaactggggacagaggaagccccaggccccctcctctcacctggcaccactttctcttgtcctggaccagcccgccagcccactctgcaggccacagttggaactctcatcccaccgcttccagcctgtggtgggagcatgagaccacaaaccaggaagtggggggggggagtgcccagagattgcgcaacccccagcactcagtccagaacatctggagaagttggttgctggcgccccggtgccggcctctccacctcctggggcaggggccaatctgctctccaagtgattctctttcctcataagaaaggtggggataaaaacacccctctgggagcctctggactccccgtgagttctgcaaggaccatgtatcacttgtaacatcagaataaatataagtacaaagtaacacccatcctctccctgcccatcaagaggacaaaggctcaactggggcctcagtttccctactagactgagggggagcactcggggggatggggggctgttcccacaggaaggagagactcattgtttgggaggcatggctgcagataagcagggagggtgtggaatcacatccagggctgctttataaacacggattgatgacacattatgcccccaccccgggaagcggcacacagtgctacaaacagctggtggcttccagccggctgatggcccctccctccccaggaagtcctggctggggcccatgggggtgggacggctggtcagaggaggagaggcagttggagaccaggtcctgccctgttagcctttctgtaggaccaggtgtcacactcatctgagggctccagacacatggcctgtgcgtctgtcctgcccagcgtctcccacctgacgcggccaggtgcccagttgctcttcaaggccttttcaggtgctcctttccaggaccagggtcacagaagtcaaagctcaggaaaagcccctcgagggtttttgtgcggcagaggtgggttgtggggtgggattgtgcctgccacagtggaggggccctgcagacccagataaaccttcaagtggccagaagcgggggatggctctgctgggtgctggggctgccatgggccgtgggagccagcagtgtgcccagctccctcagggcccgtcccctaggcccttccgtccactgggccaagcaccgtccctgcccctccctaggggcatggatctgacttgagaggttgtgagagcttacaggcgctgggccgtcggggaggcctcagaagcgtaggacggctgcgcactgccgggccgtgttcagccctggtctggcctcggcctctagaggaggctgcctgcgctccagcaggcccaacccagaacgtgggcgagctcccttcagcatccctgggcggaaagagggatgggggctctgctgcagaggcagaatccgcgccgctccctccttccttcccccgaccagcctgtgacaaccccggccaggggcgggggcctccgcacaagcctggcgtccacttcctggataaggactccccggcccactccggaccagggctggggcggcctcccaggcgctcactccgctggcaccccaccggaaaacacgtctgcggcccgccccctcccccaaagcacgaccactccgcccgggcccctcgaggatccactcaggttcacgacgggcccgtcctctcggtggtctgaccaccggctggtggagtgggctctggggccgccaggcgaccagggcgcaggcgggggcggacagctcattgggaggggcgccggggcacagtgcggggctcgccccacccccaggtgccccttccccgctctcgcctcgcaggcaccgcatcgggcccgggaatcggtccggacctggcggtgggcgctgggaagaggatccacctccacgtggcccgccccgccccgggggcgcagccagttcccggcgctcactgccccccttctcccggcttccgtccccttctgcgcaggcgccgctccgccccggtcctaggggtgcttccgtggtcggcggctgctgggctccgcgccggggtccgagtcccacgaagccccggcccgagccgccggatgcccgcgcgcagcggggcccaggtgagcgcgcgcctcggccgccccgcggaacagacg

SEQ ID NO: 14860 - DNA, 2300 bp, Homo sapien
ccgagtgggaaggggtgaggctggcagggccctccagatgctgttctctgtgttggccaggcaccaaaggctgtggaagccccaaggccaggctctcacttcagcctaactcctggccactagcatacccaggtcccaattctggtctggctctgtgctctgtggctctcctgtgtcccccatatgcctggccccctcctccaggctggctcttctaatccaccttgagggatcagaggtgagatgcaggatgaactgtgcccatggctcctgctgctgctcaaggggaagtgcccaggctctgtccacctggaggcctgcctggcctcataccgttctgccctcatcgcactgtcctgacccacctgccacactttgcttctctgctgcccactgaggccagtgttgagaacacggtgggggggtctgctgcactcactggcatgctcacctgcctgcaggtactccccgctggccgagcagttctcccaccagttcccatctcatgacctgccgtccgttcttgccaagttctccttgccggtctccttgtcagaatttaggaatcccctggcccccgctgtgcaggaggtgagtcacagaagctcaaggagcccagagtggcaggtgtgtagtggataggcactacctgcctggctgttggttctgatctgagagccctcagcactgccacctgcttctccttggttttgggggcttgccgtgcaagtgctacgtgcccagcaggacccaaaagtcagctgccgggccacctgcagatgcttggccagtgacccaacacttgagcagttgttccctccccatagagcccaccctggctgtggcaggcagtttttagtgttagaaccgagttaagcaggagagtgcttaccttttctgggcctacagacctgccttgtacccctttgggactggggactgcctacagatgagggtgcaaaggcagttttgttctcactgggccaggcctgaccctctgagagttctgcttctgtcttcactccctgccatggttcaggtggccacagggtctgtgggtatgagttctggggtcactggtccccagaatctcctcattcaagagagcctagagaggaccctagtgggcctggatcagggcaacgggcaggcaggttgggagctaggagtggctgggggataggaggcctcctgcaggtctgtgggatgaactggtgcacctgcatctgtggcagggccagtggcttcccctgtgggctgcaggtgtcatagccttgtgctgaggtggctttgccatcctcccctccactgagttctgggcagagactcagagcagggccagataggatacggtgttggagacagacgagctgggtgttctcaagtctttgtctccagaagtatctgagtaagtgccagatctattaggcaaaaccagtccttaaagttaaaccctttccgttctcaaattacgaatgagaacgattctggcttttcagctccgttagacgctaaacctgacagagctctcagtgcggtctttcacagagcccttggtttctgggagctgagccaggttgtaccagctgaataaaaggcactctctgcacccctgctcttggggcagtgcttagggaggagctgctggtgctcccttctcagaggcctcctgtggtctagataacggagtggcttttccaggccatgactgagtggttgctccaggccttgtcaaggggcctaggtcagccaggttctgcctgggctccagtgctgggaagcccctctgttttatttttggtttattgattttatttaattttgattgcacgtcaggctggagtgcaatggcatgatctcggctcactgcaacctttgcctcccgggttcaagcaatctcctgcctcaccctcccgagtagctgggtttacaggtgcccgccaccacgcctggctaattttttgtatttttagtagagacggggtttcaccgtgttgaccagggtggtctctaactcctgacctcaggtgatccacccacctcatcctctcaaagtgctgggattacaggcatgagccactacgcccagctttttttttattgttttgatatagaaacttgctttgttgtccaggctgaagtacagtggcgtgatcttggctcactgcaacctccgcctcccaggttcaagtgattctcctgcctcagcctcccaagtagctgggattacaggtgtgtgccaccacacccggctaatttttgtatctttagtagagatgaggtttcactgtgttggcaag

SEQ ID NO: 14861 - DNA, 2300 bp, Homo sapien
cctggcccagtgtgcctttttacttcagctcacagatttccagttggccgtctctgcagaccctggcctctagcagggaaagagccttttatttggctgttgtgagggcgccttgaagtttaggtatttataaacgcgaactgggctaccactgcttgcctctgagaatcccagggaccatctcacagccaaactaaatttggtccctggactggtgcctgagggctgaggctgagacatggctgtgactctttatgacagagcagcagtttttagtggagattttgggctgtcagagcaagggacctttctggagtggtggtggttatttttctgttacctctgtgtcccctgagtcactgggtggcagagtggaggggcactgtttagataggatgtgaggcgttggccctgggtcagttgctagagcagaagtgtttggtggcgttttaatacctcaaaccctccttcaacattaccatgtcccacagatgggagttatagaacagagtgagccatttagggtttttgaagaaagcatattatgcctgtggtgtaaggcacttgaatcctccatctctgcaggagagacctgcagtgggctgctgaggacttggctgtgggtcctgcgtttcccaggataactctaacaagattgatttcagaaggtccaactgcaacctgactgggttgagaggctatttccaaatggcacaaataggtttgaccaaaccctcgtatgtggtttgtttgtgagcctagggtgacttcggatggttagagggtcgtgccagttcaggaggaaggctggaaaacagtctgagccccacagcccatgatagacttggaaagaatcatgtagctacttgccatttgctattacagagctgagctacagtgcagttcaaagcaggccttcctttttcatcacaacatggaggagttatgtcagtctctcccatcccttcaccaagagggcctctggggaagaagcatgaccaggtttgcaccctagaatgtctgtcctcagtggtctcttctaggaccttaggggtctccctgcccaggggcagagtatggccctgcggaggctagagcttccccaagagagtgcaccctcctgacctagatattagatatatttttcctgggtggagagatatgtatgggacttctctctcttctgggtccagatcagaggtagtacatttgtgtttctagagcggaggccctcagagccctggactctgagataagagtcagcaccacccacagcacccctgcaggtgacactcccttatccagatctccccaggcaggaggcatcagcattgccagtaaggagacagaagggcacagatgaccttgaaaaggggaaaagggatgccctccctcccacaccacagctgcacccacttctccgtggcacccagttgtgtgcaacctggtatttctgccatttggaaatagctgtgatcacagtgggcttgcacatcttgcacaaagcttcttccctgataaaaaccggaaagtttaagtgtttgggataagggaacggatgggcagccatgctatgaggaaggaagtcagcgctctgcacgcatccctgtgcactgtccccttgccctccacgcggctctttgggtgaagggccgctctgtgggtgaagggcctgggtcctgggagttgaaggtgcagcacagcaaacctgagtgtaactgggagaggcccctctgcctgtgaactttaaagagcagctccgcagggcagtgccggctccagctgatcctccctttgaaagcaaactgcaactgtttctctcctgaatttaatagagcatgccaaaaaatgacagcatgtgccttcagtctgtgcttctcatgccttttaccttgtaattctggtgatcttacatccataacctctgggattgctacagaagggcaactgttagtagcttccaccagcagtcggggcagagcaactccatgaaggtgcagtttactgagacccttccgctctggggccagcagggcatggtgctgtggtattttgttaacttatttttattctacctctcttaaattttaaggttttcagatgttattctggcaacaattttggcaaccaagtctgaaatgtgtggccaaaaatttgaactgaagattgataatgtgcgatttgttgggcacccaacactgctacagcatgctctggggcaggtatggctctccctgggcaggtggggctctccctgggcagatgtggctctccttgggcaggtgtggctctccttgggc

SEQ ID NO: 14862 - DNA, 2300 bp, Homo sapien
gatccgcctgccttggcctcccaaagcgctgggattacaggcatgagccactgcgcccggcacttccatgtcttttagtgtattcgcgttctcagagctgtccaaccattaccacagtcaacgttagaacattttcatcactccccttcaaaaaacccatgaatcgctccatatttcccctgaccccctggaagccctaggcagccactaatcattctgtctctatggatttgcctattctgggcatcttatataaatggaatcatatattagtgtgtcttcaagatggattcatgtgccgtacttcattcctttttatggctgaatagtattcccttaaacaaactataccatattcacccattcatcaattgatataccctaggattgcttccactttgggctattatgaataatattactaagaacacacatgtttttgtgtggacatatgctttcatttctcttggctatatatctaaaagggggatttgccgagtgttgtgttaactctaacctttcaggaactgccagcctgttttccatagcgagtgtagcctcttacattcccaccagcaggagagagattcccgtttctccacacccctgctgacgcttgtctttttgattacagccatcgtaggaggtgtgatgtggcatctatttgtagttttgatttgcatctccctaatgcctaataatgttgagcatttttaatttctgttttgcccaggctggtctggagttcctggcctctcagcgctggggtcacaggcgtaagcctctaccagttgagctgagcatcttctggtgcttattggccatttgcataatgcactggaaaaatattcatatcctttgtgcatttttcaattgtctttttattgttgagttgtaagtttcctccattctagatacaattcccttatcagatatgtaacttacaaatattttctcccgttctgtgggtggacttttaattttcttgatggtgtcctttaaagcaccgaagtttttgttttgttttgagatggagtctcgctctgtcgccaggccagagttcagtggcacgatctcggctcactgcaacctccgcctcccggcttcaagcgattctcctgcctcagcctcccgagtagctgggattagaagcaggcgccgccaaacccagctaatttttgtatttttagtagagagacggggttttaccatgttggccaggatggtctagatctcctgatctcatgatctgcccacctcggcctcccaaagtgctgggatttcaggcgtgagccaccgcgcccggccgcagtaaagtttttaatctgatgaagtttaatttattcttctgtagtcgctcctgcctttagtgtcactgcctcgcccaaggtctcaaagatctcctgtcggcttccaagtgttttttttttttttttttttttttgagacggagtctcgctctgtcgcctaggctgtagtgcagtggcgcaatctcggctcaccgcaagctccgcctcccgggttcaagcgattttcctgtctcagcctcccgagtagctgggattacaggcgcccgccaccacgcccggctaatttttttttttttttttgtagagacggggtttcaccatgttggccaggatggtctcgaactcctgacctcgtgattcacccgcctcggcctcccaaagtgctgggattacaggcgtgagccaccgcgcccggccttttttttttcttttttctttctttctttcttttttttttttttgatacggggtctcgtcgctctgtcgcccagggtggagtgcaatggcgtgatcttggctcaatgcaacctccgcctcccgggttcaagcgattctcctctaggattacgggcgcctgccaccacgcccggataatttcttctaatttttagtagagatggggtttcactatgttagctaggatggtctcgatctcctgacctcgtgatccgcccgcctcggcctcccaaaatgctgggattacaggcgtgagccaccgcgccccgcccaagtgttatttgtaaaacgaagaaaccaacatcgagagggacgctgactcgaccccgcgcctttcccatccgcaccagcaagaggggcccctgtgccccaaacgcgaaccgtacggctccagacagcaccgcggaactcggtggcttccagaaggccccgcgcctgcgcattccgctgcctgcgcctgcgcctgcgcctgcgccgttctcccggccgccgccttagcacctcctccggacggtgtcgccgaagtctcgcgag

SEQ ID NO: 14863 - DNA, 2300 bp, Homo sapien
aaaaaaacaaaaacaaaaaagatattttgtatgtgtttggataacttccctatcagatatatgatttgcaaatatgtttctctcattctgtgagacatcattcaattttaagacatcacagagctatgttaatcaaggcactgtggctgtggtaaaggatagacacacagaacagaacagagagcccagaaatggacccgcaaacctatgccccattcattttttacaaataagtgcgagaagccaactgaatagaaagcgtatagctttttcaaaaaacagtgctggaacaattggacatctgtaggcaaaaaaacaaacaagcaaacagaagaatctggacctgcccttcacacctcagacaaaagtcatctcaaaatggattgtagatctcaatataaacataaactatacaactttagaagaaaatataggtgaaactctttgtgttctgtggttaggcagacagttcctaggcatggcactaagtaagattcatttaaaattttttgacaaattggactttattaaaacttttgctctacaaaagacaatattaagagaatgaactaacaagctacaaactaagagaaaacatttgcaaattgcatatctgacaagggattgcttccagacgatacacagaattctaaaaattcatccttaagagaataaaccacccaatttttaaatgggcaaaacaggccaggcgtggtggtgcacgcctgtaatcctagcactttgggaggccgaggcaggcggatcacaaggtcaggagattgagaccatcctagctaacacggtgaaaccctgtctctactaaaaatacaaaaaattagccaggcatggtggcaggtgcctgtagtcccagctactcgggaggctgaggcaggagaatggcgtgaacctgggaggcggagcttgcagtgagtggagatcgcaccactgcgctccagcctgggcaacagagcgagactccgtctcaaaaaaaagacaaaatacttgaaaagatattggctaggcgcgctggctcatgcctgtaatcccagcactttgggaggccaaggcgggtggatcacaaggtcaggagttcaagcagcctggccaagatggtgaaaccccgtctctactaaaaaaaaaaaaaaaaaaaaaaaaaaaattggccgggcacagtggctcatgcctgtaatcccagcactttgggaggctgaggcaggtggatcaggagtcaggagatcgagaccatcctggccaacatggtgaaaccccatctctatgaaaatacaaaaattagccagagatgatgccgggtgcctgtaatcccagctactcatgaggctgaggcagaagaatcacttgaaccagggagtcagaggttgcagtgagctgagatcgcaccactgcactccaccctgggcgacaaatcgagattccatctcaaaaaaagaaaaaaaaattaaaaggaatatttgcctcattatgttacaataactaatatggaaagcaatattgcaatgcctattagcacatgacattaggtgaattctcctttgtccccggacctgctgcctcctcctgcttgtcaggggacagatccagtacatctcccctcagcgctgggtggacctaacccttgctttcttggaggaaacccaggaatccagagacaaagtggaagggtactggcatgtggttgggcagggctgcctgaggtcggtgtcagccgaccgtggggcttggtcccaggaggctgcttactgggccctgctcctctggtttcccccaagtcgtgattctgaaatgaataaggacggtgcagaactggactacaaatgcaggagtgacttcctgggagggtggggcccctatctctcctagactctgtggtcagactctggccaacaccccctgtaaggccacaggagaggaacaggagtgatagcccccaaaccccagtcccaccaggccctgagggcccctttgtcactggatctgataagaaacaccacccctgcagccccctcccctcacctgaccaatggccacagcctggctgggcccagctccctgtatataaggggaccctgggggctgagcactaccaaggccagtcctgagcaggcccaactccagtgcagctgcccaccctgccgccatgtctctgaccaagactgagaggaccatcattgtgtccatgtgggccaagatctccacgcaggccgacaccatcggcaccgagactctggagaggtgagtgtcagacgggactgccagagggactgggtgggaggccaggtatg

SEQ ID NO: 14864 - DNA, 2300 bp, Homo sapien
tgcacaaccatctgggctcgctgagacctgggcaggcacaggcccaggttctgacaagcagagggtgaaaggtttcgttctaggcctgaagggccttacagggcagccagggcactacagcctctaaagtcccagcatctgggatcagggcactgtcccagcttcaaattcccagcatctgatcccctgggaggggccagggagcttttccttccctggaacgctgctgggaggtcatgagcctgcagaaggggtggcgggcaacccagtctggggctgggagggaggtcctgtggccagaggagacggtggaggggctgggggcaccaggcgtgctggaggcggagggcgggagatttggggaccaggctgcacagaacccgtcggaagcagggcgatcagccgggagctgcagaggcctggggggcctctagcccagggcagcctgggaggggcagctgcctgggcacccgggccccgcgaggaggggctggggcctgctgcggggtcgcagatgtgtcccggtgctcggagagggccgcagggcgcgtgggccgtggcgggaggccgcgctgctgggagctcacggcccccgccccccgtcccaggctcttcctcagccacccgcagaccaagacctacttcccgcacttcgacctgcacccggggtccgcgcagttgcgcgcgcacggctccaaggtggtggccgccgtgggcgacgcggtgaagagcatcgacgacatcggcggcgccctgtccaagctgagcgagctgcacgcctacatcctgcgcgtggacccggtcaacttcaaggtgcgcggggcgcggtgcgggcggggcggggcggggccgcggggcgggcggggccgcggggcggggtcgcggggcggggcggggtggggtcgcggggcggggcggggtcgcggggcggggcggggcggggcggggcgggcggggcggccggggcccggcggggcggggcggggcggggaggggctgggcggggcggggcgcggggcggggcgggccgggccggggcggggtcgcggggcggggtcgcggggcggggcgcggggcggggcggggcggggtggggtcgcggggcggggcccgggctaggccccgcccccgcactgagccgcccccgcccccagctcctgtcccactgcctgctggtcaccctggccgcgcgcttccccgccgacttcacggccgaggcccacgccgcctgggccaagttcctatcggtcgtatcctctgtcctgaccgagaagtaccgctgagcgccgcctccgggacccccaggacaggctgcggcccctcccctgcccttcaccctcccacagttcctgccctgactccaataaatggatgaggacggagcgatctgggctctgtgttctcagtattggagggaaggaggggagaagctgagtgatgggtccgggggcttcgcaggaactcggtcgtccccactgtcgtcgcggcctggggttcacttggggggcgccttggggaggttctagcccctgagcaccggagctgcggcccgggtggagcggagcagtcccgggccggcccgcggcgtctcctggggtccttgagtcggacgggcgtttgtgcgtctcccggcttcccatatcgcacaaagattgtcacttcactaagcgtattggaagcgtgtcggggctcagggaacttttccacaaagcctgacgtccgaatcccgggactctggcagctacgggggtccctgaggccggtccctccccgactcctaagagagtagggggtttcctgcccggtgttctctctccggttcctcccatgtgctccctcctggcagagcagtaactttacccgaggggagtaaacagatgcccctaaagtctgcagtaaaggtgcccacgcgcaacggcgtgggtcaatgccagaaaccctgggatcccggaggtcgaggcctccacacagacgggaacccgggctggttacgttccccggcgcaggccgagggtccccgcgttcccgccgcgctcgggccgataaggacgggcggggtgcccggaggctctataaggaggccagggcggcgggcgcggcccccagagcacgtcaggcggcgccatgctcagcgcccaggagcgcgcccaaatcgcgcaggtctgggacctgattgcgggccacgaggcgcaattcggggcggagctgctgctcaggtcggtagaggcggggtctccgggagctcagggaggtggagatgagggttttgggcgcgtgggccgccaacgccatccaaggtc

SEQ ID NO: 14865 - DNA, 2300 bp, Homo sapien
ctccagcctgggcaacaagagcaaaactccgtctcaaaaaataaataaataaataaataaataaactaaaatctatccatgctttcacacacacacacacacacacacacacacacccttttttgtgttacttaaagtaggagagtgtctctctttcctgtctcctcacacccacccccagaagagaccaaaatgaagggtttggaactcagcccatgggccccatcccatgctgagggaacacagctacatctacaactactgccacaggctctctttttggacaaaaataccatcatactgtagatacctgtgtacaacttcctattctcagtgaagtgtctcccctgcatccctttcagccagttcattcagctctgcgccattccacagtctcactgattattactatgtttccatcatgatccccccaaaaaatcatgactttatttttttatttttattattattatttttttttttttttttgtgacggagtctcgctctgtcacccaggctggagtgcagtggcacaatctcggctcactgcaagctccacctcgcaggttcacgccattctcctccctcagcctcccgagtagctgagtagctgggactacaggcgccccccactacgcctggctaattttttctatttttaatagagacagagtttcactgcattagcgaggatggtctcgatctcctgacctcgcatctgcccgcctcagcctcccaatgtgctgggattacaggcgtgagccaccgcgcccggccttatgtatttatttttttgagacagagtctcgctgtgtcgtcaggctagagtgctgtggcacgatctcggctcactgcaacctccaactccctggttcaaaggattctccagcctccacctcccgagtagctgggattacaggcgtgcaccaccacacccagctaatttttgtatttttagtagagacggggtttctccatgttggtcagcctggtctcgaactcccgacctcagctgatccacccgccttggcctcccaaagtgctgggattacaggcgtgagccaccgagcctggccaaaccatcacttttcatgagcagggatgcacccactggcactcctgcacctcccaccctccccctcgccaagtccaccccttccttcctcaccccacatcccctcacctacattctgcaaccacaggggccttctctcccctgtcctttccctacccagagccaagtttgtttatctgtttacaaccagtatttacctagcaagtcttccatcagatagcatttggagagctgggggtgtcacagtgaaccacgacctctaggccagtgggagagtcagtcacacaaactgtgagtccatgacttggggcttagccagcacccaccaccccacgcgccaccccacaaccccgggtagaggagtctgaatctggagccgcccccagcccagccccgtgctttttgcgtcctggtgtttgttccttcccggtgcctgtcactcaagcacactagtgactatcgccagagggaaagggagctgcaggaagcgaggctggagagcaggaggggctctgcgcagaaattcttttgagttcctatgggccagggcgtccgggtgcgcgcattcctctccgccccaggattgggcgaagccctccggctcgcactcgctcgcccgtgtgttccccgatcccgctggagtcgatgcgcgtccagcgcgtgccaggccggggcgggggtgcgggctgactttctccctcgctagggacgctccggcgcccgaaaggaaagggtggcgctgcgctccggggtgcacgagccgacagcgcccgaccccaacgggccggccccgccagcgccgctaccgccctgcccccgggcgagcgggatgggcgggagtggagtggcgggtggagggtggagacgtcctggcccccgccccgcgtgcacccccaggggaggccgagcccgccgcccggccccgcgcaggccccgcccgggactcccctgcggtccaggccgcgccccgggctccgcgccagccaatgagcgccgcccggccgggcgtgcccccgcgccccaagcataaaccctggcgcgctcgcgggccggcactcttctggtccccacagactcagagagaacccaccatggtgctgtctcctgccgacaagaccaacgtcaaggccgcctggggtaaggtcggcgcgcacgctggcgagtatggtgcggaggccctggagaggtgaggctccctcccctgctccgacccgggctcctcgcc

SEQ ID NO: 14866 - DNA, 2300 bp, Homo sapien
ctggattgagctttggggagggtggagaggaccctgtcactgctttccttctggacatggacctctctgaattgttggggagttccctcccctctccaccacccgctcttcctgcgcctcacagcccagagcattgttatttcagcagaaacactttaaaaaataaactaaaatccgacaggcacggtggctcacgcctgtaatcccagcactttgggaggccgaggtgggaggatcacctgaggtcgggagtttgagaccaccctgatcaacatgtagaaaccccatctatactaaaaatacaaaatcagccgggcatggtggcccatgcctgtaaacccacctactccggaggctgaggcaggagaatcattttaaccaaggaggcagaggttgcagtgagctaagatcacaccattgcactccagcctggaaaacaacagcgaaactccgcctcaaaaaaaaaaaagcccccacatcttatcttttttttttccttcaggctgtgggcagagtcagaagagggtggcagacagggaggggaaatgagaagatccaacgggggaagcattgctaagctggtcggagctacttccttctctgcccaaggcagcttaccctggcttgctcctggacacccagggcagggcctgagtaagggcctggggagacagggcagggagcaggctgaagggtgctgacctgatgcactcctcaaagcaagatcttctgccagacccccaggaaatgacttatcagtgatttctcaggctgttttctcctcagtaccatccccccaaaaaacatcacttttcatgcacagggatgcacccactggcactcctgcacctcccacccttccccagaagtccaccccttccttcctcaccctgcaggagctggccagcctcatcaccccaacatctccccacctccattctccaaccacagggcccttgtctcctctgtcctttcccctccccgagccaagcctcctccctcctccacctcctccacctaatacatatccttaagtctcacctcctccaggaagccctcagactaaccctggtcaccttgaatgcctcgtccacacctccagacttcctcagggcctgtgatgaggtctgcacctctgtgtgtacttgtgtgatggttagaggactgcctacctcccagaggaggttgaatgctccagccggttccagctattgctttgtttacctgtttaaccagtatttacctagcaagtcttccatcagatagcatttggagagctgggggtgtcacagtgaaccacgacctctaggccagtgggagagtcagtcacacaaactgtgagtccatgacttggggcttagccagcacccaccaccccacgcgccaccccacaaccccgggtagaggagtctgaatctggagccgcccccagcccagccccgtgctttttgcgtcctggtgtttattccttcccggtgcctgtcactcaagcacactagtgactatcgccagagggaaagggagctgcaggaagcgaggctggagagcaggaggggctctgcgcagaaattcttttgagttcctatgggccagggcgtccgggtgcgcgcattcctctccgccccaggattgggcgaagcctcccggctcgcactcgctcgcccgtgtgttccccgatcccgctggagtcgatgcgcgtccagcgcgtgccaggccggggcgggggtgcgggctgactttctccctcgctagggacgctccggcgcccgaaaggaaagggtggcgctgcgctccggggtgcacgagccgacagcgcccgaccccaacgggccggccccgccagcgccgctaccgccctgcccccgggcgagcgggatgggcgggagtggagtggcgggtggagggtggagacgtcctggcccccgccccgcgtgcacccccaggggaggccgagcccgccgcccggccccgcgcaggccccgcccgggactcccctgcggtccaggccgcgccccgggctccgcgccagccaatgagcgccgcccggccgggcgtgcccccgcgccccaagcataaaccctggcgcgctcgcggcccggcactcttctggtccccacagactcagagagaacccaccatggtgctgtctcctgccgacaagaccaacgtcaaggccgcctggggtaaggtcggcgcgcacgctggcgagtatggtgcggaggccctggagaggtgaggctccctcccctgctccgacccgggctcctcgcccgcccggacccacaggccaccctcaaccg

SEQ ID NO: 14867 - DNA, 2300 bp, Homo sapien
ctagaaggtcccttctccctggtgtgtgttttctctctgctgagcaggcttgcagtgcctggggtatcagagggagggttcccggagctggtagccataaagccctggccctcaactgataggaatatcttttattccctgagcccatgaatcacccttggtaaacacctatggcaggccctctgcctgcgtttgtgatgtccttcccgcagcctgtgggtacagtatcaactgtcaggaagacggtgtcttcgttatttcatcaggaagaatggaggtctgacctaaaggtagaaatatgtcaaatgtacagcagagggctggttggagtgcagcgctttttacaattaattgatcagaaccagttataaatttatcatttccttctccactcctgctgcttcagttgactaagcctaagaaaaaattataaaaattggccgggcgcggtggctcacacctgtaattgcagcactttgccaggcttaggcaggtggatcacctgaagtcaggggttcgagaccagcctagccaacatagtgaaaccctgtctctactaaaaagacaaaaattgtccaggtgtgatgactcatgcctgtaaacctggcactttgggaggcggaggttgtagtgagtcaagatcgcgccatcgcactccagcttgggcaacaagagcgaaactctgtctcaaaaaaaaatttaatctaatttaatttaatttaaaaattagcacggtggttgggcacagtggctcacgcctgtaatcccagcactttgggaagccaaggtgggcagatcacaaggtcaggaattcgagaccagcctggccaatatggggaaaccccatctctactaaaaatacaaaaaattagccgggtgtggtggcgcacgcctgtaatcccagctactcgggaggttgaggtaggagaatcacttgaacccaggaggcagaggttgcagtgacccgagatcacaccattgcactctagcctgggcaacaagagcaaaactccatctcaaaaaaaattataaaaattatacatcagtagatgaatgggtaaacaaaatgtggtggtctatacacacaatggaatattatttggccacaaaaagaaatgaagcactgataggatgtagctgcaccctgaaaatatttgacaagtaaaagaagccggacaccaaaggtcacaaactgcatgaccccatctatatgcaatatccgctacagccaaatccatagggaccaaaagcggattagtggctgccggggccagagttactgttaatgagtaccgaggtggcgtttgggatgatgaaaaagttctgacctagatagtggtgatggctgcataacactaagtgttcttaatatcaccaaattttatacctgaaaaatggctacaatggtaatttatgtctattttatcaccttttttaaaacaaaaaagatataaggggtacagcagagtgagtgctgcatatgcatttactattattcttgggttacatcccaggtactcaataaatgttcactgccctgaagaaacacctgctacgagtcaggcacctcacagttgttatccgtttaattctcacaatctgagaagaaactgtcaccctcattttatataataaatgagaaaacagactcgggcaagtgtcacaatagaatcaagaggcagaataaactgacttccaatgccaaatccatgccgaaattcagtgctataataatgtacatggccgggcgcggtggttcacgcctgtaatcccagaactttgggaggctgaggcgggaggatcacctgaggtcgggagtttgagatcagcctaacacggtgaaaccctgtctctactaaaaatacaaaattggcatggtggcatgcacctgtgatcccagttactcgggaggctgaggcaggagaatcgtttgaacccgggaggcggaggttgcagtgagccggaatggcgccactgcactcaccgcacccggccaatttttgtgtttttagtagagactaaataccatatagtgaacacctaagacggggggccttggatccagggcgattcagagggccccggtcggagctgtcggagattgagcgcgcgcggtcccgggatctccgacgaggccctggacccccgggcggcgaagctgcggcgcggcgccccctggaggccgcgggacccctggccggtccgcgcaggcgcagcggggtcgcagggcgcggcgggttccagcgcggggatggcgctgtccgcggaggaccgggcgctggtgcgcgccctgtggaaga

SEQ ID NO: 14868 - DNA, 2300 bp, Homo sapien
cgggagagctggtaacagcaccaggcagtccgtgtgtggagggacagcctcctcagtggagatgacgtgtgctgatattgtccagttttgccatactgttaggacacaagtctttgtgctggtgctgtctgtgctcaggggcttttagggtttatgtttcataacgctactcagagatagagagagattgggtgactttctagtaagtggtaggttgtgattaggacttaatttttggaatcgaatgtcttttttttatcatttagatctgctcttttaagaaacaggctaaagttgagaaacactttgaagggagagggcagtagaacagaaagccaccttttaaagaacttggcagctcttggttggcttgttctctgttgtgaagtttaccatttatagttgttgttttctgtttgagccagtcttgctctgtcgcccaggctggagtgcagtggcgtgatcttggctcactgcaacctccgcctcccaggttcaagcgattctcctgcctcagcctcccttgtagctgggattcacctcgtaaggcgaattaaccttagcatatgatagttcttttagtgtttcccaccacccttttcagagtaagcaattagacgtctagagtttcttttcctctatctctttgggtaaatagcaaccagtggtgcccgccaccacgcctggctaattttttgtatttttagtagagatggggtttcaccatactggccaggctggtctcagactcccaaagtgttgggattacaggcgtgagccaccgtgctgggcctaccatttagtgttctttttttttttttgagacggagtgttgccctgtcacccaggctggagtgcagtggcacacagtctctgctcactgcaagctctacctcccgggttcatgccattgtcctgcctcagcctcccgggtacctgggactataggcgcccgccaccacgcccggctaattttttgtatttttagtagagacggggtttcactgtgttagccagggtggtctcgatctcctgaccccgtgatccgcccacctcagcctcccaaagtgctgggattacaggcgtgagccaccacgcccggccaccatttagtttttaggttatcagacatctgagtccatagccaatttggattctgcttaaggtgcaggtaattgctttgatgggtttaggtattgggagagttgtcagctgcctatttcccatttgacccctcgagtgaatccctgaatctgtctcaggttggtgattgattgctcagcttgagcagacagtacagggccactgtgtgggtgaacctggagcatctcagactggtctgttaggggctgttgtctgaggtaagcacagaagagaaggcacagtgacccttgtcagctccttaatacttggatcctgatgagctccagccagctcttcacctttccagaaagtccagtgtacaggtgcatagaagcagtcaaatgccggatcatttgttttcctgattctttgatttgaacatactgaaatgttgactagagaatatctgggtgaccaacaagaagcagtttatgtatttttttgagagggagtctcgctcttgttgcccaggctggagtgcaatggcgcgatctcagttcactgcaacctctgcttcccaggttcaagcagttctcctgcctcagcctccgaagtagctgggattacaggcatgcaccaccactcgtggctaattttgtatttttagtagagatggggtttctccatgttggtcaagctggtctcgaactcctgacctcaagtgatccacccgccttggcctcccaaagtgctgggattacaggcgtgagctaccacgcctggccaagaggcagtttttgaattccaaaattatggagtgatatctgggagtcagccttcatcagtgatgctgcttgtgctttctccagcttcttgggagactgggcaccaggagacttggaggttcttccctatcttacctactcccaagtatgcatgtttttgaaaaaaatatttaagatttctagagaagatcacaatcttctccagtgtctgtgtaatccattgtggagcagtttattacagctgacctactgtctcctgtctgttttaggagcggtgacttaggttatcaccccttagtgttttcctgtcatctgccttctcatctccacctaaaatttagtttttggtaaaagatcatgctatctaaccttgtcatcattgcaaaacaaacttatttatgtttatcatgatgctgacattagcaagctgac

SEQ ID NO: 14869 - DNA, 2300 bp, Homo sapien
ggtcatcctatacgtgtggtacacgtacaaatatgacataagaagaagtatgaattattgcagtcattattaaacaacgaagtatgccaaattagtcatcaggtttcaaagaatcatagccttctttccataggtcccgccacgttttaaggaaacgtgccttttctgtacatttgaaggcaagttcttccacttgagctgatactgcagatgtggcttcaagaagtttggttaatgaaaaggctgcgtctccgatctgcagccccacttcctccagcgggtccaccgttcggccgctgctcctgctcggaactggccagcccaaactcactgggctgccagggtaagatgctgcagaggcgtctgaagaggagggagaaggaggcggcgggggcggcgaagaaacctgcaacttctcagggtcggccatggggaagggctggcaccgcggaatccgacccgagcagcccaacggacaccctatttatttattttaaatagagagcaggggcctggcgttctggctcacagctgtaatccgaggactttgggaggctgaggtgggcggatcacctgaggttaggagtttaagaccagcctggccaacatggcggaaccccgtctctgcaaaagtacaaaaaaaaagttagtcgggaatgatggcgggtgcctgtaatcccagctactggggagactgagacaagagaatcgcttgaacccaggagtcagaggatgcaggaagccgagatcgcgccactgcactccaggctgggcgacagagggagactccgtctcaaaaataaataaaatacggcagggcgcggtggctcacgcctgtaatctcagcactttgggaggccgaggcaggcagatcacaaggtcagaagttcaagaccagcctggccaatacggtacaacaccgtgtctaccgaaaatacaaaaatcagctgggcatggtggctggctacttgaggtcaagactttgagaccagcctggccagcatggtgaaaccccgtctctacttaacattcaaaaattagccggagggggtggcgggcgcctgaaattccagctactggggagactgaggcaggagaatcgcttcaacccgggaggcggagcttacagtgagccgagatcgcgccacagcattccagcctgggtgacagagcaagactccgtctcaaaaaaaaaataaacaaataaaaaataaagaccgggcgtggtggctcatgcctgtaatcccagcactttgggaggttgaggcaggagaatcgcttgaacccaggaggcggaggttgcggagagccaagatcgcgccattgcactctagcctgggcgaaactccgtctcaaaaataaataaataaataatagaggtttaatataatagaagtatatgccagactatgcacacataagtgcatgctataattctattatcacataaaataactgcttacatatgccttttctttagtccctgggacagtagaccatgagctcacaaaaggacgaccacgaggttgtaatcatagaacctaatattaatgccatgactgatggccaaacgtggtggttcacaccagtaatcccaatactttgccgggctgaggcgggaggataaggagccggggaggtcgaggctgcagtgagcggtaatcgcgccactgcattccagcctgggcgacggagcaagaccctcgctctaaataaataaataaataaataaataaaattccatgctttatttaactttcacaaaaatcatatgaggggcacctttagaaccctcatttcacagatttaaaaaaacgagcgtcggggagctaaataatatgctcacggtttcatggctagcttagaaaaagcacggattcatcttgtttttgattgactgtatttcattttattgtagtttaccctccgtagagactcgtttgaggtcctgggggtctagagtaaaatcagggttgggattttggttccgccgttggacaacttgcgaccactcagagcctcagcctccctaagcacccaccccagaaactacatttcccagcagggcgtgcgccggcgccgtcgtacttcctcccggcgtcccccgcggcgggaaagagccgagtgggctcgaggccgacgcgaccatcgtttgtcgacgccgctgccaccgcctgcctgagagaagtcgtcgcggccgaccccgtcgcctccgccggctaccatgtccgcccaggcgcagatgcgggccctgctggaccagctcatgggcacggctcgggacggtgagtcagagcggc

SEQ ID NO: 14870 - DNA, 2300 bp, Homo sapien
taaaaatacaaaaaaactagcctggtgtggtggcacacgcctgtagttccagctactcaggaggctgaggcaggagaatcacttgaacccaggaagcggaggttgcagtgagccaagattgtgccgcggcactccagcctgggcgataaagggagactccatctcaaaaaaaaaacaggccgggagtggtctattttgacactccacctcaaaaaaattaattaattaaaaaataaaatttaaattttaaaaaatcatttcacaaatgataatttaatatgattgctgccctggaagggggaaaaaagacttactctaagaatacaacaaagactgttcatgggctagaagcatcaaaagtccagacacggttagacaagttttgttttcatttattttgagacagagtctcactctgtcgcccaggctggagtgcagtggcgcgatctcagctcactgcaagctccgcctccgaggttcacaccattctcctgcctcagcctcccaagtagctgggactataggcgcccgtcaccacgcctggctaattttcttgtatttttaatagagacggggtttcacagtgttagccaggatggtctagatttcctgaccttgagatccacccacctcggcctcccaaagtgctgggattataggcatgagccactgtgcccggctgacaagttttaaataatgttttaaggcatgactttgcttccaattggccatttgaacaaagcaattaaatcatctgaattacgcacctaccaaactgccacagttactagaaatcagacaactgccaggcacagtggcccatgcttgaaatcccagcactttgggaggccaaagcaggagatcacttgagtccaggagttcaagaccagcctggttaatatggcaaaaccccatgtctacaagaaaggaaaaaaattagctgggcatggtggcttacagctgtagtcctagctactccggaggctgaggtgagaagatcacttgtgcctgggaagcagaggttgcagtaagctgtgatcccgccactgcacttgagcctgagggacagagggagaccccatccttttttttttttttttgagacggagtttcactctagttgcccaggctggagtgcaatggcaagatctcagttcaccgcaaactcttgcctcccaggttgaagcaactctcctgcctcagcctcccgagtagctatgattacaagcacgcgccaccaagtccagctaattttggatttttagtagagactgggtttatacatgttggtcaggctggtcttgaactcccgacctcaggtgatccacctgcctcggcctcccaaagtgctgggattacaggcatgagcccctagccttttttttttttttttttttttttttttttgagacacggtctggctctgtcgcccaggctggagtgcagtggcgcagtctaagctcactgcaacctccgcctcctgggttcacgccattctcctgcctcagcctcctgagtagctgggactacaggcgcccgccaccacgcctggctaattttttgtatttttagtagagacggggtttcacagtgttagccaggatggtctcgatctcctgaccttgtaatccgcccgcctcggcctcccaaagtgctggaattacaggcgtgagccaccgcccccggccctggcaccgtatttcaaggccgaaaattcgcatcctcagtgccagcaattctcctcgtggtcaaagaggagaaacactggggagagcacccggaagcgggggcgaggacgcagatcgggggtcgacgtcaagaaagaaggcgggaagaggacaaggtcgggagaggaggaggaggggagcgaggacgcagagaaggaggggaaagaggacggagaggagcgaggacggaggggggacgggaacgaagaggggcgaggacgttcagcatccattgcgacagcgacaaacaggacaccgccaggttcccggcggaggcagcgcccaagatccccgttgccgagcaaccgaagcatggcggtggggcggggtcggagcctgcgcatttccgcccccgcccgcccggctggtcggaagtgacgccagggggcggggccagcggcgcggtcgggtgagaggccgcggcggcaggtgagtgagcgcggcctcgtactcgcgcgtgcacgccgcaggggcgccgcaggccgccccttcgctctgggaccccggcccccaggttccccagtccctcggcccctggaggaccccgccgtgctgccccctagctcctccgcc

SEQ ID NO: 14871 - DNA, 2300 bp, Homo sapien
ttttaagagaagtcttgctgttgtccctcaggcttgagtgcgatggctcaatctcggctgactgcaacctctgcctcccaggttcaaacaattctcctgcccttgactcccaagtgactgggattaaggtgcccgccaccacgcccgactaatttttgtattttttagtagagatggggtttcaccatgttggccaggctggtctcgaactcctgacctcaggtactccgcctgccttggcctcccaaagggctgggattataggcgtgagccaccgcgcctggccttattaatgatttttaaatcagtttctcacaaactcttttgatcttagatcagtctgtgtttttcataaatgcctcaacggctggctcggttttagaaacctgtgtttgtcagttaaaatgatgatcctcccaaaaatgttcagtgccattttctaccctgacctgggttcgcccaagtggtgggagagtccccatggaggcactgcggggcctgactgtctgggaaccctctcagagtggagcccagtgctgggttcaggtgggtgctcatctggttaagtcaattgcctgcattgttttgcgtcccgtaatggggctttgccttctgaagcctctgtttctgtcttccctcacacgtatgtgatatgtcttatttcattctgctctgcaggtgaggacactggaccaattgtagatgctcacaagacacagatgacccaaatccccaaccgtgttactaatgagcatttagagagttttttccctttgtccttctaaatcttgttacagagatggtccgtgcatgggggaaatgtttgtcctttcggccaggctctccaattcaaaaggcaggaattgagaaaatgacagtactttctctgtccctgccacagaatgtccagtttggtctgatttaacatgacaaatcatgctgtagagataagtaagtagtttgaattttatttttcctttaatttttagaagccaccttataactcgaccattctagtcacatttttttcatatagattgtatactttatatactccatgcttatccacatagagaatacttctggaaggacccatatgaaactggtaccatgcttcccctcttgagcctgggagccacaagatgaaaggagatttacccttttatagtttttaagttttgtgggtttttttgaaacagggtcttgttctgttgcccaggatggagtgcagtgtcctggccatcgctcactgcagccttgacctcccgggctcaagcaatcctcctgcctcagcctcctgagtagttgggactataggtgcccaccaccacacctggctgatttttgtatttttgggtagagaagaagtgtcccctgttgcccaggctggtctcaaactcctaggctcaagcgacccacctgcctcagtcccccaaagtgctgggattacaggtgtgaggcagtgcacctggcccttttaaatgttgtatatatttattactgattttttaaaattataaatccaaactacattaatagtaattgtcttgcagggtcctttggtcatagcttacatattagaagaaggattaagaaagggagtgatataatttactagcttgaggtctgcatttggattgactttactaagcttgctgtgaactccaaggaacagaaaacccagaatacaggccgggcggcatcttcagaggaagaggccctttcccctttgccttgcttgcttccaggctggctgtggggggatgcagtctccccttgagggtcaggagatgtctggccatcatctggtagttagagtgggatgaaccgaacaagggcagacttctcggtctgttcttctctgcttggctccaccctggaatcagctggagagtgccagcagctgctcctgactgggaccccacacccaaagtggccaacttagtccttctgggggtggcatcaggattgcgaaagcacccaagttattttcatgtggagccaccactgagagtcatgtctttgggaggatctaagttcctgacctgccaccttcgcaggctgcctgagctgcacttgacaagtggctttatgatccctaggtccacctgggcttgcgaaggcacagattccccgtccacagctcacgaccagatgcaccagcaggagtccacatcgaggacgtcctccgggcactcccacgaccaggtaggtgaggactggtgggcccgtggctggatgggtggtgttttcagattcctggtggtggcggttgatgcccctccttgagtagtgctttc

SEQ ID NO: 14872 - DNA, 2300 bp, Homo sapien
aggatggtctcaatctcttgaccttgtgatctgcctgcctcggcctctcaaaagtgctgggattacagccgtgagccaccgtgcccggccggaaagtctgtttttaattcttgtgggtgtacacctaggactggacttgctggagagtatggtagttctgtgtttaactttttgaggatctgccagactgtgtttcacagcagcggcatcattttacagtcccaccagcaacgtacgatgttctgatttctccacatcctcacccagactcgtcgtttttcccttttaaaattaaagccattctagtgtcatacacaggttattaagtgagttacttttattatataattaggcaaagacaaagtccgagtgaacagtttaaaacaaaagccagcagtcccttatctctctgtcttcctgacccttccccagagggtgcggctttcagctcagcttttcctcgccttccctcgctgacctccgcacgccctctttcatctttcacccctccctttgctgtgaactgttgacttcctttttgggtaggtgaaggttttacctcaaatctgcatgatcacgtccagtctctcagtatgatgtgttaggacatcggtttggttgtttaaaaggaaccaaaataacaaaaatcttgcctgagacaaaatggaagtttgtttttttctcgttttatacagtcgaagcagctcaggctgggtggtggtggttggcagatatcaggggccctgtgcctttcccatgttcaaatgtgttttccgttttggtttctaagacggcgactgccggtttccccaccgcatccacccccggtccggccagcaggaaccaggggaaggagagggcatgtttttcccctcagaattggggctcagaagttactcccagcaccgagctcactcaacacagctgtcccctgtcctcccctgcggacttctgtttgaatatattttattttatttttttctagttagtctgtgcttatccatgaacatattttattaataataattaggtagtgtttgaatgtttactgtgtatcatatgatcttataagtactttatatgcatttaatttttttttttgagacggagtgtcactctgtcgcccaggctggagtgcactggcgtgatctcggctcactgcaagctccgcctcccgggttcacgccattctccagcctcagcctcccaagtagctgggactacaggtgcccgccaccgtgccctgctaattttttgtatttttagtagagatggggtttcaccgagttagccaggatggtcttgatctcctgacctcgtgatccgcacgcctcggcctgccaaagtactgggattacaggtgtgagccaccacgcccggctacatttaattatttaatccttagaacaggcttctaaagtagatattgtttgttttacagataaggaaactgaggcacagttcagtcaaagcacatgtcctggtcacacagctagggaggtgcaagcctgcccgcccagagcccatcttcactccgggtactttgaattttgggtctgtggccctccagggagtccatgtgtgcgcacctgggtcaccttttccatctgtgcttgaggctggtggaaggtggctcagatatgctcagaggctgagtaggtggggcttagttaacactgccctggagctcattgagcatttcctgggttcggcaggcaggaagcaccagcgtgttctggatgaaaatagttcctgcctgctggctctccacagctaactcgcctttccacactaattagagaccttcttaagtataatctgttaagactgacaccctaaacatttatttagcttttatttcctgggctggtggcccatagttagagctgcagccagtccccaagaagccgacgccagcagacccctctgtgctgcagctttgtgccgtgggactgctggcctcgccgacctcttgctttatcgacacagtgaccaggagttaaactttgggatgtgcccgtgatgttggaccacaaggacttagaggccgaaatccaccccttgaaaaatgaagaaagaaaatcgcaggaaaatctgggaaatccatcaaaaaatgaggataacgtgaaaagcgcgcctccacagtcccggctctcccggtgccgagcggcggcgttttttctttcattgtttctctgcctttttgtggtgttcgtcgtctcattcgtcatcccgtgtccagaccggccggcgtcacagcgaatgtggaggatagactacagtgccgctggtgagcctcg

SEQ ID NO: 14873 - DNA, 2300 bp, Homo sapien
ttgcagtgacccgagattgcaccattgcactccagcctaggcaacaagagtgaaactccatctcaaaataaataaataaataatttaaaaaataaagaaagcaagcagaaatagatgcatttgcaccttttaaaaatggtgctgaggctgggctcggtggctcaggcctgtaatcccagcacttcgggaggccgaggtgggcagatcgcctaaggtcaggagttcaagaccagcctggccaacaaggtgaaatgctgtctctactaaaaatacaaaaattagccaagcgtggtggcgggggcctgtaatctcagctactcaggaggctgaggcaggagaattgcttgaatctgggaggaggaggttgcagtgagacgagattgcgccattgcactccagcctgacagagcaagactcagtctcaaaaaaaaaaaaaaaaaaaagatgctggctgggcatgcctttaatcccagcacgctgggaagctgaggcaggaggatggactgagcccaggagtttgtgaccaccttgggcaacatagtgagacctcgacttagtttttaaaaaatgatccgaccgggtgtggtggctcacacctgtcatcccagaactttgggaggccaaggcaggtggatcacctgaagtcaggagtttgagaccagcctggccaacatggtgaaaccccatctctactaaacataccaaaatcggccaggcacagtggctcacacctataagcctagcactttgggaggccaaggcaggcacatcacctgaggtcaggagttcgaaaccagcctggccaacgtggtgaatccctatctctactaaaaatacaaaaattagctgggtgtggtggcgcgtgcctgtaatcccagctacctaggaggctgagacaggagaatcgctggaacccaggaggcggaggctgcagtgagccaagaccgcatcactgcactccagcttgggtgacacagtgagactccgtctcaaaaacaaaaacaaaaataaaaattagccaggcgtggtggtgggagcctgtaatcccagctactcaggaggctgaggcatgagaattgcttgaattcaggaggcggaggttgcagtgagccgagactgcccggtggggcctgaagatcctgggcctggctcggggtgcacctgggggacaggcatagccattggaggagggagagagctgggagtggagtggggcctgaagcctggcggccgccggtgacactaagtgggtgtgtgttgagggcctccctgcagtaaagctcctctccaacagtgtcagggtgccctgggcagggtttctgctcattccccagcgggccacccaggcctgcgtggagctgagggaagtgagccatgagccatcagccactttcccggaaggaccccggataagggacccacagcaggagatggggacagctgggtcacactctgcagcagccacgtgctccactgacagccggcatccggcccatgtagaaagctgacccaatctctcatgcaccctgcccctaaccagccaccgtcacagcaatgtatgcagtcttggccacaagcatcgcaggacacaaggcctcgggcagtcataccgctggccctggccccggccccacagccaggcctctagtccctgtatgtcctcagggccccacacataggaccggggttacagtgggccctaaaccacgtttcccaccccagttcactctccctacgggtctcctctactcacggaacccctctccctctctgaacccccatcccctccgctgccctccctgagaccctccccatagtaaccccccctcgctgatgagcccctctgcctctcccagagaccaccccctgctccagctgagctccatcccctcacatcccccctcggcccccggcccacaccctcccccgtcccacttcgccttcacccacgagggcctcagcgtcccgggacctgggtcgggggggtgactcgggtcgctcgtggggggccggctcgtttgcctctgggccgtggccgtgtctcttaaaacccgaaccggggcctgggcgactctggcctcgcggcccgagggttaacccgggcgcggcgcggcgcggggcggggccgggcgggacgtcggtcatccccgccggcctcgccccgcagccatggccgccggccccgcgccgccccccggccgcccccgggcgcagatgccgcatctgaggaaggtgcgaggcgggtgggtgtcccgccgtcccccgatttcccggcgcccgaggccgggaggggccggaga

SEQ ID NO: 14874 - DNA, 2300 bp, Homo sapien
gcacctggctatgtatttattttttgagagatggcagtctcattctgtcacccaggctggagtgcagtggtgcaatcataaactcattgcagcctcaaactcctgagctcaagtgattctcccaccccagcgtcctgagtagctgggactacagatgtgtaccaccgcatctggtctatttctgctttcttggaggcagagtacctctccccatccttacccactcagagggtgctaggggctgggcagggtgggcggttggccttgggctgggagcccctaacatagtggtctgagtccatttccattgccggagaggccacgttcagcatgagctggggcagggggcttgtggggtctcttactccagggtaccatctcgcttggatcccagtgagccctcccatgccccacacccaggtggggtgaggtggcccaggtctggctgccctgtctgcaggggtgggcacccatggtagctgtgaggcagaatagggaatgagggtagccaagggttgggcataagaaacggaacagcaggtgcagccagttctaggcaggattgggcagctcacaagccacatcctggctgctgtgataacaagacagaaatttccacttcacctctgattggtctcgggccaatccttcatagggtgtagccaattggaggcctctaaagggcacaagggctgtggtcaggtttctttgcttaataaaaatcctaattacagaggctctggagctacttgctccagcccactcccactctgtgaattgccttccgttaaatctgtgctttccttactccgttcttctgactcagttttgtttccttgtgtttcgttgttcttttgttactttgtgcgttttgttcaattctttgttcaacccaccaagaacctggacaactcacctccaagaccttctatctggtaacagctgcaggagctggagctgtgggcctggggacaagtgtcctaacagcccccgctccctgcagcgaagggtcagcagaggtggcgctctaggggggcctgggcacaagttcataggatcctgccctggaaaggttgtgggcagttggggggcaagggagacagtccccacccaaaccccaatgccccctagcacccaaggtggtcttctctcaattgaggagctctttggcaagggcgggtctaatttctggtgtccctggaaccggccaggggtgtctaagaaagggactcaggctggtgttcggaccccttctcccttatccagacgcaggcctttggtccagctgtcccagccagggcctgctcacccctgtcccctgccgggtcccatcccccccacccacccacaggtctcagtttaggtgtcaatatcagaagccccctctgtgctccggtctctgtactccgcccccttgtcagtgtcctctccctgaggacagggggctcggtaactgggtttccaagagccctgcagggacaccccctcttgggaactcacacagcgcagccaggtcgctaagcctttgaggggcccttgttgcctcctgggtgtgcgtgcgacccgcgcccactgtggtcccgccctactgatgaccgtgaacctgtagggtgttgggccagcccctcaccccaaggctgggcaggcccccggagtccccctcggcccagacagaagctccctcaggagcgggggaggggaagggggcgcgcggtccggccccaggtgtggccgcggataatgagaccctggggatgggggcgcacctgcgccacggcgccccgcagagggtttcccaggagaccccctcgggctcccgccgcgccgtgggggtggggcagccctgctggccagagccgggcacgggccgggcgggcggcggggatcgtgaccgcggctgcgtgcgtccgcgtccgggcgcttctgtgcggggtcctggcacgccggcgggggcgacccgggtgccggcccgtgcgggcgacacgcgcgtctctgcggggctgcgcggggtccggagcggctgggggctctctgccgggcgcggctgggcgcggggggcgctcccggccgggatgagctcaccgcagtcgcgccggggctgagcgccgagcggggcggcggcggggcgggcggcggctcctcggcggctccgcggcgcccgggccgcgcgccgccatgctgggcctggacgcgtgcgagctgggggcgcagctgctggagctgctccggctggcgctgtgcgcccgaggtgagcgggccgggcaggggcggggggctcggctggtctcagccccgggcgg

SEQ ID NO: 14875 - DNA, 2300 bp, Homo sapien
cgagaagacgggagcgaagtgggcagggactcagaaacccctgcccagggcaccagggagaggggcttcaggaggccaccagcccggggcgccatgggaggcggcgcagagcctgagcccagggatttggagacagccgcccccggcacccgagcaccatggggaggaactcctagactgtgggaaagtgttcagagaccccagtccagagcagggtggtggagggccctagagggtcagtaggcttggggggccgccgagggccctagagggtcagtaggtttgggggccgccgagggccctagagggtcagtaggtttgggggccgccgagggccgctgctctctagcaggtagcccctgaccctgggctgccctcatctgaagtcttcgctcccccgccctttggtctccgagtcagggagggggcccttgtggacatctgggccagaggagctgcaggcctggcggtctctggaggcccctcctgaaggtctgggtgcggtgcggcacctccccaggccgccctgctctctctgctcgctctctccctgagcccccagaggcttcccttgagtccctttggatagtgggaggtacagctggccagagggggctccagcctggtgctcgaatgccagggtccgctagtggctgctgctcacgcccctccccacccccagtcctcctggctgacaaggagggtgggccgccggcagtggacgaggtgttggatgaggctgtgcccgagtaccgggcgccggggaggaagagcctcttggagatccggcagctggacccggacgacaggagcctggccaagtacaagcgggtgctgctggggcccctgccaccggccgtgggtatggcaggggtctaggcttggagggctgggtctggggggctggtgaggagcctggtgggggtggggggcatcctgcagacttccagtttctcctcagacccaagcctgcccaatgtgcaggtgaccaggctgacactcctgtcggaacaggctccggggcccgtcgtcatggatctcacaggtaactcgcaggatgctgcaccctgaacacaggtagggccctcccaggcacgcttctgcacccctgagttccgagccctgggccatcacagtcgcacacctcatgggtaccacaccctacgtgggggctcctggagcaggtctcagcctgtaggggagttccgaccctagctgaggtttccccaataggggacctggctgttctgaaggaccaggtgtttgtcctgaaggaaggtgttgattacagagtgaagatctccttcaaggtgagagccggggcaatgggcggaggggatgggggtgggggcaacagccagaggcctggcccccagaggaacccctaatgcctctgttcccaggtccacagggagattgtcagcggcctcaagtgtctgcaccacacctaccgccggggcctgcgcggtgagggcagcggtggggggaacggggcgggggggggaagcgggggcagacagaggacagctctgatgccctcgccctccctagtggacaagaccgtctacatggtgggcagctatggcccgagcgcccaggagtatgagtttgtgactccggtggaggaagcgccgaggggtgcgctggtgcggggcccctatctggtggtgtccctcttcaccgacgatgacaggacgcaccacctgtcctgggagtggggtctctgcatctgccaggactggaaggactgaacccccagtccgtgtctcccctacctccctcagttgttgcacagggacccccaagcatccccagcaccccccgtgagtgaccagaccctcccctgctgcccctgctgcccctgctgcccctgctctgtcccgggaccccctggcctggcgctgtcccctgagctgtcccattaaacatggccctgtctctctcggtgccctgggtgtcgtctctttctgcctcccctcccctgggggccgggggcggccgcatgggccttgtctttgctgggactgggcctgtgtgccacgtggcagctgctgcttggcttctggcccccttatctgcccccgccccacgcgccctggcagcaccatgagccgccagcttctgcctgtactgctgctgctgctgctcagggcttcgtgcccatggggtcaggaacagggagcgaggagcccctcggaggagcctccagaggaggaaatccccaaggaggatgggatcttggtgctgagccgccacaccctgggcctggccctgcgggagcaccctgccctgctggtgga

SEQ ID NO: 14876 - DNA, 2300 bp, Homo sapien
gccaaggtgggtggatcacctgaggtcaggagttcgagaccagcctggcaaacagggtgaaacccagtctctactaaaaatacaaaaaatttagctgggcatggtggtgggtgcctgtaatcccagctacccgggaggctgaggcaggagaattacttgaacccgggaggcggagattgcactacagcctgggacacaagagtgaaactccgtctcaaaaaaaaattaaataaataaaaataggccgggcacggtggctcacacttgtaatcccagcactttgggaggccgaggtgggcagatcacgaggtcgggagatcgagaccatcctggctaacacggtgaaactccatctctactaaaaatataaaaaattagccgggcgtggtggcgggcacctgtagtcccagctactgggcaggctgaggcaggagaatggtgtgaacccgggagacggaggttgcagtgagccgagatcgtgccactgcactccagcctgggtgacagagcgagactctgtctcaaaaaaatgaaaataaataggccggttgtggtggctcactcctgtaatcccagcactttgggaggccgagggtggtggattacctgaggttaggagtttgagaccagcctggccaacatggtgaaaccccgtctctactaaaaatacaaaaaaattaggcaggcatggtggcacactcctataatcccagctactcggtaggctgaggcaggaggattgcttgagcccgggaggtggaggttgcagtgagccaagatcgtgccactgcactccagcctggctgacagagcgactctgactctaaataaataaatacatacatagatacatggtaacttagttccctctctttcttttgtattgacaccagatttactcaatactgttttagtttgtcagtccaataagatgagaaaataagtatgagatgcaacttggaattaaagtgatcaaatgtttgctctgacagataagcttcagcacctgttaacttggagaatcaagtgaaactccaccggcttcatgtggaagctcgtcaggcagcatcacaacatgtacataacccaagagccgttctgtacaaggttctccttaaaatataatgggaggccgggcgcggcggctcatgcctgtcatcccaacactttgggaggccgaggtgggtggatcatgaggtcaggagttcgagaccagcctggccaacatagtgaaatcctgtctctactaaaaatacaaaaattagctgggtgtggtggcgcacacctgtagtctcagctacttgggaggctgaaggaggagaatcacttgaacccaggaggcagaggttgcagggagccgagatggcaccattgcactccagcctgggtaacagagcaagactctgtctcaaaaaatatatatatatacaggccaaggcaggcagattgcttgagctcaggcattcgagaccagcctggccaatatggtgagaatcgcatctgtccccaaagtacaaaaaaattagctgggcgtggtggcacacggctgtggtctccgctattctggaggctgaggtgggaggatcgcttgagcctaggaggcggaggctgcagtgagctgagatcacaccactgttctccagcctgggcaacagagcaagaacttgtctcaaaaaaagaataaaactaaactaaatctgtgcagagctctgcccacagccgatacatacgctgcattccttgaggccttgctgtctccgctccttctgtctatgccccgtcctgcctctccatcctcagggacaggaccggtggcgaggggcccccggccaccctgggctgggacggcatctgctggggctgctgggtcaggcctgatgctttttgttttccccaagtgtgcagctggtgctgagaggtgatggtgctgcttgtccccacacaggaggaggaaggtgaggacggcgatccatcgtcagggcccccagggccgtgtcacaagctgcctcccgcccccgcttggcaccacttcccgccccgctgtgtggacatgggctgtgccgggctccgggatgcacacgaggagaaccctgagagcatcctggacgagcacgtacagcgtgtgctgaggacacctggccgccagtcgcctgggcctggccatcgctccccggacagtgggcacgtggccaagatgccagtggcactggggggtgccgcctcggggcacgggaagcacgtacccaagtcaggggcgaagctggacgcggccggcctgcaccaccaccgacacgtccacc

SEQ ID NO: 14877 - DNA, 2300 bp, Homo sapien
tacaggtgcgtgacaccacgcctggctctgtggatccttcgtgcttccagccgtgagcagctgttggctggtaaagtgtgtgcaatgtgaggaagttggtgtgggggacagattccacatagacaagggacagcagtgtggagtggtggctgggggatagatcccccttcagttggtcctgggttttagggttttatttgtttgctgtgacttgttcagcactctaggcttttgaacccaacatgcttctctaaagccctctctccagccccttttagccaggaccacttacatcatggcaggctgttgtttcagtcacctgcatggccgggttgacaggcatagccagagctcctgggctcctgtaggacgtggcaggaaggaccatagaccatggcaggggttctgttggagcccttatctactctcttttgcacaccccttgcaggcttgtagcagcagcagcagtagtagcagcaaattctatagttccctgatgtctaagagggtgggtggtttggttttcagcttaaggagtgaagtcacatgaactatagcttccttagctaaaaattgtatttgcatttccttttattctgtaccttctctgttccttgaagtacccatttactatttgctatctgaatcctcatcagagaggcttttcagagtcaagtgcagcattctgacagagcattttaagattgtctccagtgacggtgtccgagcgcctctgtgggcctgggtggtgtccttgatccctcggtcgatggggctgaaggtgacccatgattatctctctttgaggcgtgtgttgagagtcggaggaacaccctgcagtgtgttctcatgtgtcggaaggtgtaccacgcgtgacgtgatgcagcaggtagaaaacagtggccgtgggcctggaggacgtggggttcagaagacgcccaccaccttcggggctgtagcgcaccttcctttctctctgagtgttgctggggctggtggagcgattgtctccatcttacttgtgagggtccagccctcactcaggtttgtacacatagtcaggactagaggcagctttccttcctccggtcttcctgccttccctgtccctcagctctgcagctgaggtgggaggtgctcaagctgccagcctccgtgatgtttgtgcagtgagacttgtggggagtggcattcccatgtcctgggcatcccttcttagcatgagaggcattcctgtagttgtaaaagtttccagaaattgctttaaagtagaactatgcttgtggccaaaatatatcttgattgaacatttaaactgagtttcttgctttgagtttgagcgggagggcgtcatcgtgagtcttgtcttgagaaaacctctggtcgtgtttcatggacccacctttcctaatccttgtcctcttaatggtttcaacaggacagattgattcactttggagctgtaagtactgatgtattagggtgcagcgctcattgttccttgacgcagagtcccaaaatgaatatccaagagcagggtttccccttggacctcggagcaagtttcaccgaagatgctccccgacccccagtgcctggtgaggagggagaactggtgtccacagacccgaggcccgccagctacagtttctgctccgggaaaggtgttggcattaaaggtgagacttcgacggccactccgaggcgctcggatctggacctggggtatgagcctgagggcagtgcctcccccaccccaccatacttgaagtgggctgagtcactgcattccctgctggatgaccaagatgggataagcctgttcaggactttcctgaagcaggagggctgtgccgacttgctggacttctggtttgcctgcactggcttcaggaagctggagccctgtgactcgaacgaggagaagaggctgaagctggcgagagccatctaccgaaagtacattcttgataacaatggcatcgtgtcccggcagaccaagccagccaccaagagcttcataaagggctgcatcatgaagcagctgatcgatcctgccatgtttgaccaggcccagaccgaaatccaggccactatggaggaaaacacctatccctccttccttaagtctgatatttatttggaatatacgaggacaggctcggagagccccaaagtctgtagtgaccagagctctgggtcagggacagggaagggcatatctggatacctgccgaccttaaatgaagatgaggaatggaagtgtgaccaggacatggatgaggacgatggcagagacg

SEQ ID NO: 14878 - DNA, 2300 bp, Homo sapien
tggttgggggtaggctggaagctcggggagcctggagctgggacttctgtgcttgcctgggagctctgaagggtgaggctgggcatccagggtgacacagcccagggaaagacatgggggtgacgtgagaggtgcctggagggagctggcaggtatggacatgatggacacggaagcacggaggcgggcaagtggccagacgcatctaggggaaggtgtgggggaggcgcccttaggaagggccctgaagggctgtgggcagcagggagccctgggaggcctaaagcagagggcagatagatgagggctgttgtctcaggtgtggggcggacgaggtggggagccctcacccaacaggaggcgagctggtcctgtgtggcctgaactgcagctgtctcctctgtgaaacgggggtatagctgaccccagggggctgcctggagcatcccgggaggtgccaggcccaatagtgctctgggaaggacagggccctgggctgttgtgggaggcggcagatcctggtactcacatcctcctccttggggagggcctgatggttggctgaggcctgggtggagagcagagggttggttctgacagggttgggctggccagagctggtgctggggctgctgctgggggcccgtgcctctctgccgtggggtgcctggggctgtgacctcatgctctgtggcctgcagggcaagtgacacggatctgggcagccagggtggcaggatcggactggaccccttggcagggccgctgtggagacagcccaggggaaggggtgcaggggtctggacactccaatggccttgctctcgggctggcctgggcagcggagggaaggagaacccttctctgatactagatggtgcctgggagaaatcaaggcagagggtcctagccggtgggctctttggaggttgtggctcctgtccgggtgagagccaccatatattggggcctaacgtgttccctggcgctgtgagtccaggctgccttgggactcaggagggtggagcccaccccaccttccaagggccctggccatccctgcctgccgaccaccccactcctgggagcctgcttccctcacggcggcgggcaggccgtggcggtccccacgagggcctcctctccagggccggctgggcagggagccccgaggcctgcagccccctgactgccctccgatgtactggcggcagaaaagggctgcgccccacgtgcgcccttcggggcgcgcagtccgcccagtgctccccacggccgcggccattccaaggacctgcaacgccgcctctcccactccgctctctgggaagccaaagcctcccgggctccgcttccgcaccgcccctcgggaagacggcgcgaccgcgcccccggcacgccccgcccccggcaggcactgaccacgccctctcccggccatgcagagaccccggcccatgtttctcaactcgtcttctcgcttccggccccgccccgcgccggaggccccgccccacgctctttacctcttctgctcgaggcgggccccgccttactccctggtccccgccccacgcccgaggccccgccccgagctcttcacctcgtcttctcgcttccggccccgcccacgccccggccccgccccgcgctcctcacctgtcccctcgctgtcggccccgccccacgctcctcactttatcctcgcgctttcagccccgccccgcgcctgaagccccgccccacaccctttacctcgtccccgcgctgccggccccgccccgtgttgaggccccgccccgcgctctcacctcgtccccgcgccccggccccgcccccgcacttccggacgccgccggcgggggcgctcgggcctgggcttcggcgctctggctcgggctctggctcgggaggcgatcgtggccgctgccgccgccagagccggccggagtcggcccggagccgcgtccacgcggagcgggcgggtgggagctggcggctgggcccctgcggcgcccccgcggcctgccccgcgtccgcctccgggccgccgagccgcagccgccgagatgggggccgccccgggccgcgcccccgccgggtcccgcccgccgcgctgccgctgagcgcatgggcccggaccgcgccgcgccgctccgggagccgggcccggggtcccgccaccaccgcgcgcgggtgagtagggccgggctccggggcgggctaggccgcggtaggccgggcgggcgggacccggaagcggcggggggcgcgggtggctgacgcgcgtgggaccgagg

SEQ ID NO: 14879 - DNA, 2300 bp, Homo sapien
cctgcctctttgccttcgtgatcatggcctccatgtgggtaaggagccgggctggctggcactgctgcccaggtgctcggagaagagagcctggccccttgctctagccacgttcctggtcctgctccaaccagtgaatgcccatatctgctgggggttgccatggcacccacagaggcccagcatggctgtgtccctgaggcctgggcctgaggaccagtggccttgagccccctcgaagcagcccacccttgtcgttctgctgcccagacctgggcaggcccccagtaaccaccgtatctgggccctgggagctgcagccgcggccccacctgcactgatacctgcgtggctgttttctccaggcttaccgctgcgggcaccggcgccagtgctaccccacctcgtggcagcgctgggccttctacctcctgcccggcgtctctatggcctctgtgggcatcgccatctacacctccatgatgactagcgacaactactactacacccacagcatctggcacatcctgctggccgggagcgcagccttgctgctgccgccacctgaccagcccgccgagccctgggcctgctcgcagaaattcccctgccactatcagatctgcaagaacgatcgggaggaactgtacgcagtgacgtgacactggcctggggacagctgctgctctgatgacctcttcagccaggagctgtatcgagggggaggcgcctggtccagccctggacagattgatttccagctgaataaattggcctagataccctcttacttcctcctactgaggagagggccacccctccctcacacgcacctctcctcgccagctgcctgctcgctgctgagatccctctgcagatcccagctgctgtctgcagtggcccctggggcctgggcttggttacttggagaccacaggtgcctgtgcgagggtggggctgtgtgctctgctggcctgtgggtggctagagatggggagaaggactccctatggtcctgttccctggcgaggctgtggtgagacccatggcgcccaggagccctgagcccaccactggggccgggagctgtggactccgagacccctgctcctggcccctgtgtggccctgatgccagcctgcctggggcatggaggatccccctctgctgctgtggtcaccatagggacgggagacggaggtttcccccagagctgatgggcactggggatgcaggctcccgccccgcccctccctttttcctggctctggagccttgggtccctgagaagagcttccttggactggggtgctctgctgctctgggggtttggcccagaaggaacccctacccagccctgtccacccaccccagcgttcctgggcccccctctgggagcttcctcttggtcccaggagctgcggtggtgtctgccccctgcactgggctctgtgccctgtgggtgttcaggagactggactgtctctgctcctcatgcaaaccttgtgggggaagcaatgaccaggagcagcacctggcccctccctgaggcctgtgagtgtctcggatccgccctggagaagtgagtggctgagacccgggtggggccctcctacccttggctctgggggcttcccttctgggtcttgtccgggatatggccttcctgaaggtcttacctcccccagccgccctgcacttgaccaccaaagcaatctctaagcttataaaggagaaacatatatatatggggttttttggagtaaaggaaaattctaagatattaagacatatttttatgtagatctgatctatctgtgtttggtgaatttaatattctacattgatttttcaaactaaacgagtttttacattttttctgtgctccttcccgggtagggtaagtggggcccgggagaacaagcaccgccccgcccgtgccgcccttcgcggaaacgccggggccgcacgtagctaacggtgccttgagctgctgctgctgtatgtggggtgttttttacggtccctaaagacggaagcggggcgggacgagggggtagacggatggcttttacagccagtcagcggtgggaggagggccaggcgcggcagatcggcttccggttccggtgggctctgaaccctgaaaggtgggcgcgggcaggtggggtgtgggggggcgccggggcagaaggggaggggcaggtgggtgcgggacaggggccggagtgagaaccgggggccggggtagggggtagcgggtgagagccgggggccggggtagcgggtgagagccgggg

SEQ ID NO: 14880 - DNA, 2300 bp, Homo sapien
caccatctccctgcgggccaacaaggtacctgctgtctgcaagcggcctgtggcctgggctcgggcagggcgccgggcaacccctgcagcgcctcctcatttaccttggcacgggacaggcggcacagtgacaccagcaggcacgggccaagacaggggcccatgttggggggcctcccctgctgggcagccttgttcctgtcaacaggccccggggctgtggggtagctcgggtcagaggtggggtggaggcaggatgtcccagggcccggggaggaaggtcccggtgcaccgtgggcctgcaggagtctcagagaaaggcaccagcaccggccgggcgcggtggctcacgcctgtaatcccagcactttgggaggccgaggagggtggatcacgaggtcaggagattgggaccatcctggctaacacggtgaaaccccgtctctactgaaaatacaaaaattagccgggcgtggtggcgggcgcctgtagtcccagctactcgggaggctgaggcgggagaatggcatgaacccaggggcggaggttgcagtgagccgagatcgcggcactgccctccagcctgggcgacagagcaagactccatctcagaaaaaaaaaaaaaaagaaaggcaccagcaccaggctgagctggcacgtggggcagatgaccccactgcggccaggggctgctggagctgagccggcaccgcctccctttccagacagagatgcggaacgagaccgtcgtagtggcctgcgtgaatgctgcctcgcccttccttggcttcaatacttcgctcaactgcaccacaggtatgatgggcaggcgtcaccgtcagcgtggccccggccagccccccgccccggcctcctctgatggggccctctggctcccctgcagccttcttccagggctaccctttgtctctgagcgcctggtctcgcagggccaacctcatcatcccctacccagagacagacaactggtacctctccctgcagctcatgtgccctgagaatgctgagtaagtaaacctagggcagagacgggggccaggcaccctgtcatttcactcaggaccacaggccgggctgcctgaggttggcgttcggagtgacccagctagaggggtgcttcctccagggctgctgaaagctgggggccctaatgctgcgttctcatgtctgtcagcctgttgggagcgctggtggcagctgggctgtcagatcactgcaccagctttcctgtggccccttcctcaaagggactgtgagcaggctgtggtccacgtggagaccaccttgtacctggtgccctgtttgaacgattgtggaccctatggccagtgcctcctgctccgcagacacagctacctgtatgccagctgcagctgcaaggcaggtgagtgccagggccccgcccgccccgagacgctgctgctgttggcttccagtgctgtgctgtgcctttcccctgggggagcgccgcaaggggctggagagagacccttgcagagcaatgcaggggcaaagcctcctccccactcccccattccccaccaacaatccgtctgcctggcacaggcaccaggtatccccggggggtggtactgcctcctgaccttggaccccgcccgccgtgcctaccctgcttgctcctgggtgaggaaggggcttctctgcagggtcctgggtgaggggtgggccctgaggttcagcagtgcccccagcctccgcgtcggggttttgtgaccgcaggctggcgtgggtggagctgcacggacaacagcacagcccagacggtggcccagcagagggcggccacactgctgctcacgctcagcaacctcatgttcctggcccccatcgccgtctcagtgcggcgattcttcctggtggaggcctccgtctacgcctacaccatgttcttctccacggtaggctggcccctcctgcagggatgtggggtgggagggcaggaccgcgctcatggagcctccccacagttctaccacgcctgcgaccagcccggggaggcggtgctgtgcatcctcagctacgacacgctgcagtactgcgacttcttgggctccggggcggccatctgggtcaccatcctgtgcatggcacggctcaagacagtcctgaaatacgtgagtggccctcgacgtggggtgtgggctccgggggagcagggcccccaagtgcagcctgcgaaaggcagtaccgtgggagaggccggacctggcgttgggcacggcccctggaaacctcacatctcggccgagcatggtggc

SEQ ID NO: 14881 - DNA, 2300 bp, Homo sapien
cgctcctgagtgtgtggggagggggagctgcagcagaggggagggtcccgccccctgctgtgtccactgtgcttttccttctgaagcctttgtcgttaattaacctcggagggaggggcccccaaagggatgtgccctccgccctgacctacccaggagaaggctgggacccagggagggaaggatgcccaaggtcgcaagggcacgaggctggagctggcacggggggctgggggtgagagcctgagtcctcgcctggggccatgagcaggatgtctcccacgggcccttctccatccccgcaccaggcgtgggtgcgttccctgaggacagttaggagccttgcccgcttggaacgcagagggcagctgtccccttgttctcatgactggccaggcttctggcctgggtccctcccacatgcagtatctccctctgggtaaggggaatttgggctccggtctcgccgtgtccaaagtcatcatagcccaagcaggcagccaacccatccagggatggagatgtgggaggctgagaggaggtgggaggaccgtgccttgatatccagggcatctgtgatgaggggcgggggctccttcctgacacctgctgggtccttcggcttcgacctgggttggccatggggagtgtagtcttctaaggttggagggggtccgggtggcagtgcgggtggggatggcagtcagagtggcgatggcagtgcgggtggcgatggcagtgtgggtggcgatggcagtgcgggtggggatggcagtgtgggtggcgatggcagtgcgggtggcgatggcagtcagggtggcgatggcagtgcgggtggggatggcagtcagagtggcgatggcagtgcgggtggcgatggcagtgcgggtggcgatggcagtgcgggtggcgatggcagtgtgggtggggatggcagtgcgggtggggatggcagtgcgggtggcgatggcagtcagggtggcgatggcagtcagggtggcgatggcagtgcgggtggggatggcagtgcgggtggcgatggcagtcagggtggcgatggctgctgaggtaccctgcggcttgtttggaagctgctgcagtgaggcggcagctgtgaaaagacccagatgccaggagggtgggatgtaggccatctggggagggacagcagaggatctggctgaggggccagagggtgtcggtgacctttgccaaggtcagagttggtgtgccaagatctccaggtgggtccccgggggcttccagccctttccatctgggggactcgtcctccccatctgcggccctggaggagggtcccggcctggctgacacctccttctcctcacagaggtggggctggtgtccgagcacttctcgcaggccccgcagaggctgtccttctacagctggtacggcagtgccaggctcttccgcttccgcgtgcccccagatgctgtgcttctacgctggctcctgcaggtctcccgggagagcggcgctgcctgcaccgacgcggagatcaccgtgtaggtggctgcccgcccgcctgcccaccctcccgcgcctggccaagccctgtgcctgaacccggtgctgctctcccgtctccaggcacttccgttccggcgcccctccggtcatcaacccgctgggcaccagcttcccggacgacaccgcggtacagccctccttccaggtcggggtgccgctgagcaccacaccgagaagcaatgcctccgtcaacgtttcccacccggcccccggggactggttcgtggccgcccacctgcccccctcatcccagaagatcgagttgaaggtgaggggggctgccctccgggatggaggcagagaaccttgcggcgatggcctgtccctgccgttcacctctttggggtggtcctcgctctaggctccacgctgcactctggggccagccctgctccctgcatgccgggggcgtctggtgagaccatgccctcacacctgcattctctgacaccgcccccgcccacacctgttctttccctagggcttggctcccacctgtgcctacgtcttccagcctgaactgctggtcacgcgggtggtcgagatttccatcatggagccggacgtgccccttcctcagaccctcctctcccatcccagctacctcaagtgagcgggggcctggggggcagcccggctctgccctccggccccttctcagattcggtggagtgggtgcgagagcctggccctgagtcctggggttgggctgggaagtggtccagatgcctggcccccaccagagt

SEQ ID NO: 14882 - DNA, 2300 bp, Homo sapien
ggggttccatctcccaggaacccctcaccaggcctgagttctgggacaggagaatttcctttgccagtttccaacggagtaaggttttggtatttctgagggtctcactctgtcacccaggctagagtgcagtgccatgaacacggctcaccgcagcctcagcttcctatgtaactggaaccgcaggcttacattaccacacccaggttatttttttttctttctgtctttcttttttttttttgagatggagtctcgctctgttgtccaggctggagtgcaatggagcgacttcggctcaccgcaacctctgcctcccgggttcaagcgattctcctgcctcagcctcccgagtggctgggattacaggcatgcgccaccactgccggctaattttgtattcttagtagagaagggggtttctccatgttggtcaggctggtctcgaactcctgacctcaggtgatccacccgcctcagcctcccaaagtgcgggattgcaggcgtgagcttcgcgcctggccatggagcaatttaatccggggcacggtcctcggggaaaactgcctttcatctctacctgtgccaagctcagaaagcaggaggcacagcccccgaaagaaacaggagctcaaaggagcattatttcaggggcaggggaggggaggggctgggggccgggaagtcggggaacagcaccgcatcagctgccgggcacctgggcacccgcgtggctggggacgtgtgggaacttccagccggccagaaaggacacggcccctccagagtcccaggccacagaggccggggcaagtcctcaccatctcagggtggccaaggcctgacggtctccacacccacgtccctaccccgtggaagggctacgccttctccctggtccagccgcctccttggacctcagtcagggacggggaccctcagggaacagaaatgcaaagggagcccggcgagtttcccaacaagaggggagaggggcgccctttcctcagcccctcttccgccagctgggagtccctcctcccagaagccgggccggcggcaggaagcggccgtaccagggctgggggtcactgcggaagggctggagccatgacgcccacgggcccccgctacagggtctaacaactttctcccggctctgcccctctctcaggccggacccggccggtgagctcacggcccagccactcctcccagctggagtcccgggcagagtcccctgggcccctccacttccccgcgccgggcgcgccggacctgggcgctctgggaggaggagggaggggagggggcgctccaggggccgatgtggcccaaccccgatcgggggaccgaggaggaagcgcggggtcccgtccgcctcgacccctaggacacgaagcgccccaaagggccactgtgcacccccaacccgcggcggggacccccaaccccgcgccggcgccagatgagcgcacaggtgcgcccggggtgtcacaatcccgccccgcccgcagccccggccccacgcccccgatggcgcccgcgcctcccgctcaccgctcttcccgctgtagccggcggaggcaggcgggggccgggcaagcagcagcagcagcagcggccccgccaccaccgcggccaccgcctcgcccccggtcccggtgccagcccggcccatggctccgcgctcggcccggcgctacccggcccgcgtcccgcgccgccggcccccgccgccgcccgggcagcctctgccgcctccgcctctgccgcctccgcctctgcccccggcgcccatggcccggccggtccccgccgccgtcgccccgggcacttccgcccgcaggccccgccccgcaggccgagccgggaaggcgagggcggggtcggggggcgggaccggggggggcgcggacgccggggggaggggtcacgtggggcgccggtaggggggaggggtcacgtggggcgcgcgggggacggaccggggcgcgcgcggtccggggggacgctggagggagggcgcgggatggagggatcgcgggggtcccaggacggagaggtcgcgccgggcgcgctcggaacacgcaggaaattctccccgaggcgtgggctccgcggggcttccccgccggttcgctgagtcccagctccgctcggccgggacctccgtggcaggctcggggagcccgcggggggcagaggcgccgacctccgcctgggaccgagaggaacccgcgccctgccctgccccgcccggcgcgcgtgggcctgagtcaggcgcctcagcacgggga

SEQ ID NO: 14883 - DNA, 2300 bp, Homo sapien
cagcaaaatctgcaatctgacctccgtgcctttaaaatgagaacccctgggagcccccctttcccctcagtcggggctgaggacggcccagctgggattcccgggaaacaaagggtctctttaaggctcagccggggcttccttcctccccggccaacaccctccacctccgctgctctggccttcaggggtctgggctcgtggagtcagcttcccctcccccgctccgtaaaccctcaccacccgctgcggcgttcaaaaggtacaaacaggtatggtccctgcggccatccccatccccaccccgcctctcctcctccaaggtcaaccagtgtagccggtgctggatcattccagacattcgatgcctttgacacacacaaaggaaacgtgtttttctcccttttctacacaaatggtagagctttgaacacaccgttcttcctgttcctttcttgcagctactgctgcacctggtggaccatttccaagcagcacagcgcttcctgtctttcctgtctcggccacgctctgtctcgtttagaccccgtatgaatgatttgaatgtcccaccggccagtgacacgcatgtaggcggtgccacattgactcactggacgcatgcagtgtgccacttccgtgaacgtacctggagggaaaaacgcagaggtggaattcccgagggaaggtcattgctgctgttacttcagtggacaagtcgggggggttcccacgaggctcccacatcctctgcctgctgcaagcagtgtctgtgggccacagtctcacctgttagtacagtttttatttgccaatgtgttaggtgaaaggaaaaagaagtcactttaatggggttttcctttaattttttttttttttaaactttttaccctcacatcctgggaaggacactttagtgttttgttttttgtttttgtttttgtttttgtgtttttgttttttgagacggagtctcgctctgtcgcccaggctggagtgcggtggcgcgatctcggctcactgcaacctccgcttcccgggttcaggcgattctctggcctcagcctccggagtagctggagtagtttttaatttgcatttctgcgctgagggaggaggatcagcgtatccctggcagctgtccttcagtattttctaggggagcgtttctgtgattgatttagagctgtttattactgcactgttactagtcttattaaggtgagctctgcggtgtgagctgcaagctgtgtcccccacctcccagtcgggggctcgtcttttggacttcgcttatgcagtttggctttgcagacgcccccacccccctcccacccacgacgcggcggaacttctggactctgtgccacgcttggaaaagccgacttggccctaagacggaaaaagcttccccgagttttctaggctttatcgcttccttttttcggctcaaatcttacatggtgggaatccatccaggtgcaaagcgccgggagttgatgccacgcacccgtgtgaaccgccaccccgatcgggtactacagtccctaaacacaagcagccttctcgtctgtgcataaaagcgtggatctgacacgcacctgcagcggctctgcggcgtgaaggccggcccgggggtccccgtgctgaggcgcctgactcaggcccacgcgcgccgggcggggcagggcagggcgcgggttcctctcggtcccaggcggaggtcggcgcctctgccccccgcgggctccccgagcctgccacggaggtcccggccgagcggagctgggactcagcgaaccggcggggaagccccgcggagcccacgcctcggggagaatttcctgcgtgttccgagcgcgcccggcgcgacctctccgtcctgggacccccgcgatccctccatcccgcgccctccctccagcgtccccccggaccgcgcgcgccccggtccgtcccccgcgcgccccacgtgacccctcccccctaccggcgccccacgtgacccctccccccggcgtccgcgccccccccggtcccgccccccgaccccgccctcgccttcccggctcggcctgcggggcggggcctgcgggcggaagtgcccggggcgacggcggcggggaccggccgggccatgggcgccgggggcagaggcggaggcggcagaggcggaggcggcagaggctgcccgggcggcggcgggggccggcggcgcgggacgcgggccgggtagcgccgggccgagcgcggagccatgggccgggctggcaccgggaccgggggcgaggcggtggccg

SEQ ID NO: 14884 - DNA, 2300 bp, Homo sapien
aataaaacattaaaaaatgtacgatatagtggccgggcgcggtggctcatgcctgtaatcccagcactttgggaggctgaggcgggcagatcacaaggtcaggagatcgagaccatcctggctaacatggtgaaaccccgtctctactaaaaatacaaaaaaaaaaaaaaattagccaggcgtggtggcaggcgcctatagtcccagctggaggctgaggcaggaggatggcgtgaacccgggaggcggagcttgcagtgagccgagatcgcgccactgcactccaacctgggtgacagagtgagacttcgtctcaaaaaaaaaacagagtacgctatagtaatatctgctttttcctttttgcaatagctttattgggatacaattgacatactatacacttcactcatatattttttgtttatttactattttttttcaagagacagggtcttgctatattgccctggctagtctcaaactcctgggcttatgtgatcctcctgcctcagcttcccaaattgttgggataataggcctgagcaagagtccagcctctaaaaagaaagaaagtcacttctttataccatagtactgcaaattctagtcagagcaactagacaagaaaataaaataaaaggcattcagattggaaagaaagaactgaaaccgtctctattcccatatgacatgatgttttttcttttctttttttttttttttttgagacagagtcttgctctgttgcccaggctggagtgcagtggcatgctctcggctcattgtgagctccacctcctgggttcaagccattctcctgcctcagcctcctgagtagctgggattacaggcatgcaccaccatgtccagctaatttttgtatttttagtagagacggggtttcaccacgttgaccaggctggtcttgaactcctgacctcgtgatccgctcgcctcgggctcccaaagtgctgggattacagacatgagccagtgtgccccgctccatatgacacaatcttatacaaagaaattcccaaggaattaattaaaaactattagaactaataaatgcatttggaaggcttgcaggatacaagatcaatacacaaagctcaattgttggccaggcgtggtggctcacgcctgtaatcccagccctttgggaggccaaggcgggtggatcacctgaggccacgagtttgagaccagcctggccaacatggcgaaaccccgtctctactaaaaataaaaaaaaacaccagccaggtgtggtggcaagctcctgtaattccatctactcgggagcctgaggcaggataactgcttgaacctgggaggcggaggctgcagtgagcagagatatgccattattgcactccagcctgggcaacaagagcgacactctgtctgaaaacaaacaaacctcaattgtctgttatacacttgcaatggacaattcaaataagaaaacaattccattcacaatagcagcaaaaagaacaggctttttcaagactcattaagtaagttctagcagtgggagacctaaccatttcaaatagtagcatgctgtgctatctacccaaatattaccgtacctgtgaattctgttggtgacaaagtcacaggccctgcaactatgaatgtggcttcttccttatatccgcaattgaatgaattagaggaatgcagtcacatcagaggccatttgagaataaaggtcggatttttccccattcaaattcacagaccaggctcacatctgtaatcccagcaccttgggaagccaaggcaggaggatttcttgatcccaggagtttgagaccagcatgggcaacatagggaggccccatctctacaaaaaattaaaatattagctggttgtggtggcgcgggtctgtagtcccgcctactcgtcctggccgcagagtcagcgtctccggagcgcctccttctcccgccctggggctcacgtgggaatttcaccctccattggagggggctcagaccagggcttctagacctccttttggtccgtgaatttatttttgagacagagtcttgctctattgctcaggctggagtgcagcggtgcagtcacagctcactgcagcctcaatctcctgggctcacgcgatcctcctgcctcagcctcccgagtgggccttcctccgtgggaaagcgttaaaacgatagttaacggttgcgtcggtgtaaagacgaatgcaattcgagaaggattcattattattttgttttttcttctgatttttaacagaaattggcgttgaacattt

SEQ ID NO: 14885 - DNA, 2300 bp, Homo sapien
aaaaaaaacagagtacgctatagtaatatctgctttttcctttttgcaatagctttattgggatacaattgacatactatacacttcactcatatattttttgtttatttactattttttttcaagagacagggtcttgctatattgccctggctagtctcaaactcctgggcttatgtgatcctcctgcctcagcttcccaaattgttgggataataggcctgagcaagagtccagcctctaaaaagaaagaaagtcacttctttataccatagtactgcaaattctagtcagagcaactagacaagaaaataaaataaaaggcattcagattggaaagaaagaactgaaaccgtctctattcccatatgacatgatgttttttcttttctttttttttttttttttgagacagagtcttgctctgttgcccaggctggagtgcagtggcatgctctcggctcattgtgagctccacctcctgggttcaagccattctcctgcctcagcctcctgagtagctgggattacaggcatgcaccaccatgtccagctaatttttgtatttttagtagagacggggtttcaccacgttgaccaggctggtcttgaactcctgacctcgtgatccgctcgcctcgggctcccaaagtgctgggattacagacatgagccagtgtgccccgctccatatgacacaatcttatacaaagaaattcccaaggaattaattaaaaactattagaactaataaatgcatttggaaggcttgcaggatacaagatcaatacacaaagctcaattgttggccaggcgtggtggctcacgcctgtaatcccagccctttgggaggccaaggcgggtggatcacctgaggccacgagtttgagaccagcctggccaacatggcgaaaccccgtctctactaaaaataaaaaaaaacaccagccaggtgtggtggcaagctcctgtaattccatctactcgggagcctgaggcaggataactgcttgaacctgggaggcggaggctgcagtgagcagagatatgccattattgcactccagcctgggcaacaagagcgacactctgtctgaaaacaaacaaacctcaattgtctgttatacacttgcaatggacaattcaaataagaaaacaattccattcacaatagcagcaaaaagaacaggctttttcaagactcattaagtaagttctagcagtgggagacctaaccatttcaaatagtagcatgctgtgctatctacccaaatattaccgtacctgtgaattctgttggtgacaaagtcacaggccctgcaactatgaatgtggcttcttccttatatccgcaattgaatgaattagaggaatgcagtcacatcagaggccatttgagaataaaggtcggatttttccccattcaaattcacagaccaggctcacatctgtaatcccagcaccttgggaagccaaggcaggaggatttcttgatcccaggagtttgagaccagcatgggcaacatagggaggccccatctctacaaaaaattaaaatattagctggttgtggtggcgcgggtctgtagtcccgcctactcgtcctggccgcagagtcagcgtctccggagcgcctccttctcccgccctggggctcacgtgggaatttcaccctccattggagggggctcagaccagggcttctagacctccttttggtccgtgaatttatttttgagacagagtcttgctctattgctcaggctggagtgcagcggtgcagtcacagctcactgcagcctcaatctcctgggctcacgcgatcctcctgcctcagcctcccgagtgggccttcctccgtgggaaagcgttaaaacgatagttaacggttgcgtcggtgtaaagacgaatgcaattcgagaaggattcattattattttgttttttcttctgatttttaacagaaattggcgttgaacatttcccccgtgagcgccgggccacgggggtccggggcggcggggggctccggggcggcggggggctcccgggcgggcgggggcgggtctcgggctggcaccgccctccgcgcccgctcctcgcgctcacagcggcccgcgggccgggcgtcatgggcggcctcttctggcgctccgcgctgcgggggctgcgctgcggcccgcgggccccgggcccgagcctgctagtgcgccacggctcgggtgagtggggccgcgcgccccggcggggacgcggaggggaggaaggggcgcgcgccgctcggcctttgtgcgcgcacg

SEQ ID NO: 14886 - DNA, 2300 bp, Homo sapien
ggtttcaccacgttgaccaggctggtcttgaactcctgacctcgtgatccgctcgcctcgggctcccaaagtgctgggattacagacatgagccagtgtgccccgctccatatgacacaatcttatacaaagaaattcccaaggaattaattaaaaactattagaactaataaatgcatttggaaggcttgcaggatacaagatcaatacacaaagctcaattgttggccaggcgtggtggctcacgcctgtaatcccagccctttgggaggccaaggcgggtggatcacctgaggccacgagtttgagaccagcctggccaacatggcgaaaccccgtctctactaaaaataaaaaaaaacaccagccaggtgtggtggcaagctcctgtaattccatctactcgggagcctgaggcaggataactgcttgaacctgggaggcggaggctgcagtgagcagagatatgccattattgcactccagcctgggcaacaagagcgacactctgtctgaaaacaaacaaacctcaattgtctgttatacacttgcaatggacaattcaaataagaaaacaattccattcacaatagcagcaaaaagaacaggctttttcaagactcattaagtaagttctagcagtgggagacctaaccatttcaaatagtagcatgctgtgctatctacccaaatattaccgtacctgtgaattctgttggtgacaaagtcacaggccctgcaactatgaatgtggcttcttccttatatccgcaattgaatgaattagaggaatgcagtcacatcagaggccatttgagaataaaggtcggatttttccccattcaaattcacagaccaggctcacatctgtaatcccagcaccttgggaagccaaggcaggaggatttcttgatcccaggagtttgagaccagcatgggcaacatagggaggccccatctctacaaaaaattaaaatattagctggttgtggtggcgcgggtctgtagtcccgcctactcgtcctggccgcagagtcagcgtctccggagcgcctccttctcccgccctggggctcacgtgggaatttcaccctccattggagggggctcagaccagggcttctagacctccttttggtccgtgaatttatttttgagacagagtcttgctctattgctcaggctggagtgcagcggtgcagtcacagctcactgcagcctcaatctcctgggctcacgcgatcctcctgcctcagcctcccgagtgggccttcctccgtgggaaagcgttaaaacgatagttaacggttgcgtcggtgtaaagacgaatgcaattcgagaaggattcattattattttgttttttcttctgatttttaacagaaattggcgttgaacatttcccccgtgagcgccgggccacgggggtccggggcggcggggggctccggggcggcggggggctcccgggcgggcgggggcgggtctcgggctggcaccgccctccgcgcccgctcctcgcgctcacagcggcccgcgggccgggcgtcatgggcggcctcttctggcgctccgcgctgcgggggctgcgctgcggcccgcgggccccgggcccgagcctgctagtgcgccacggctcgggtgagtggggccgcgcgccccggcggggacgcggaggggaggaaggggcgcgcgccgctcggcctttgtgcgcgcacgtgcgggctggggtccgactcccccagaggcctcggggcgcgggctgcggggtccgtccgagttggggaaggcgccggctcgcacccgcacgcccctccagtgcccgtccggctctgcggctccttctcgcctccccaggccccaggctgcaggcgcccggcgagttggcagcctgggcgggtccggggcgaccgagggcccgggagcgcaaggaaggcagaggccggctgcagcactgggcggggagggggtctcccggccggggtgggggtgggggtgtgggggggtgagggagtcggggggtgggggtgggggtgtgggggggtgagggagtcggggggtgggggtggggggagccgctccgctggggcgttcgctgaaggccaagttaggccagaatctgactgggacgtcaggccccaagtccccggccccgccgctgcccggcccccccagctgccacctcacaggacgatccatgtcccagggctccctccatcggctctgaaaagtgagccgccgcctgcaatgcccgcaccagccgcagcagagccccaggctacacaaggcgccctgcaaac

SEQ ID NO: 14887 - DNA, 2300 bp, Homo sapien
agcagtgggagacctaaccatttcaaatagtagcatgctgtgctatctacccaaatattaccgtacctgtgaattctgttggtgacaaagtcacaggccctgcaactatgaatgtggcttcttccttatatccgcaattgaatgaattagaggaatgcagtcacatcagaggccatttgagaataaaggtcggatttttccccattcaaattcacagaccaggctcacatctgtaatcccagcaccttgggaagccaaggcaggaggatttcttgatcccaggagtttgagaccagcatgggcaacatagggaggccccatctctacaaaaaattaaaatattagctggttgtggtggcgcgggtctgtagtcccgcctactcgtcctggccgcagagtcagcgtctccggagcgcctccttctcccgccctggggctcacgtgggaatttcaccctccattggagggggctcagaccagggcttctagacctccttttggtccgtgaatttatttttgagacagagtcttgctctattgctcaggctggagtgcagcggtgcagtcacagctcactgcagcctcaatctcctgggctcacgcgatcctcctgcctcagcctcccgagtgggccttcctccgtgggaaagcgttaaaacgatagttaacggttgcgtcggtgtaaagacgaatgcaattcgagaaggattcattattattttgttttttcttctgatttttaacagaaattggcgttgaacatttcccccgtgagcgccgggccacgggggtccggggcggcggggggctccggggcggcggggggctcccgggcgggcgggggcgggtctcgggctggcaccgccctccgcgcccgctcctcgcgctcacagcggcccgcgggccgggcgtcatgggcggcctcttctggcgctccgcgctgcgggggctgcgctgcggcccgcgggccccgggcccgagcctgctagtgcgccacggctcgggtgagtggggccgcgcgccccggcggggacgcggaggggaggaaggggcgcgcgccgctcggcctttgtgcgcgcacgtgcgggctggggtccgactcccccagaggcctcggggcgcgggctgcggggtccgtccgagttggggaaggcgccggctcgcacccgcacgcccctccagtgcccgtccggctctgcggctccttctcgcctccccaggccccaggctgcaggcgcccggcgagttggcagcctgggcgggtccggggcgaccgagggcccgggagcgcaaggaaggcagaggccggctgcagcactgggcggggagggggtctcccggccggggtgggggtgggggtgtgggggggtgagggagtcggggggtgggggtgggggtgtgggggggtgagggagtcggggggtgggggtggggggagccgctccgctggggcgttcgctgaaggccaagttaggccagaatctgactgggacgtcaggccccaagtccccggccccgccgctgcccggcccccccagctgccacctcacaggacgatccatgtcccagggctccctccatcggctctgaaaagtgagccgccgcctgcaatgcccgcaccagccgcagcagagccccaggctacacaaggcgccctgcaaactgggttttgggggaacaaaccaaccagggggtcttcctcccgtgggcttcagccgcctgctggggttaacttttcctcctggcctggcggagcccctttggctctgtccagattctgtgggacatacagggtctgggctcctctggaaaccagggacccgatgccggagggtagcttggctctggagcagcctgggactataggaaggtgaggacgtcttctgtttccctggcagcgtcccctccagaggaggacggctggggcggagctcagcgctgaccctgggtctggaagcgacaggccttgaaactccacagcagcacaggccccgtctcctggctcggacagaaccctgctaccttccctcttcaatcttcaggcccctttttgtccgtgtttccagggctcacctggtggggaaagtgtgtttctccctggttccctgccactcattcacctcagacacagggtgggctctgggttcttcctcatgtggaaagtcggggcttcagaccatgtctgtcgtcatccagaagggatggagtcaaaagtgaggctggagttttgcaggatctccagacttccctgaggccactgagctgggctgtgcctctgtggacctcagggtggtcgctga

SEQ ID NO: 14888 - DNA, 2300 bp, Homo sapien
gtccacatcagcaggtacgggggtcctgatacaccaggctgctgctgggggcaaggagggccatcacttggggtggtggcagatccacgagacctggctgtcttgctgtgctaggatgaagccaggtcggacatgacagctcacactggtgagagccgtgttctcccagggcacacagggcaatgaggtgttccctttgtgttgtgtgtaccgtgccatcgttgcctgttacctgacaccccaaggggttggcacggggcaacttggggggaaatgaggctcccaaaagctggggcctgggcgggtccacgaggctgtaagaggccgaggccaggctggaacccggtttcccagctccactgttactccttccctgtctgcagtcacaggcttgctcccctagacagagggcaacgggagcagcagatggtccctgggattcctcagggtgcacatgaagcctgagcctcacattgctcctgtcctggcacaggaatgtcatccacgccagcgactccgtggagggggcccagcgggagatccagctgtggttccagagcagtgagctggtgagctgggcagacgggggccagcacagcagcatccacccagcctgaggctcaagctgcccttaccaccccatcccccacgcaggaccaactacctccgtcagcaagaacccaagcccacatccaaacctgcctgtcccaaaccacttacttccctgttcacctctgccccaccccagcccagaggagtttgagccaccaacttcagtgcctttctgtaccccaagccagcacaagattggaccaatcctttttgcaccaaagtgccggacaacctttgtggtgggggggggtcttcacattatcataacctctcctctaaaggggaggcattaaaattcactgtgcccagcacatgggtggtacactaattatgacttcccccagctctgaggtagaaatgacgcctttatgcaagttgtaaggagttgaacagtaaagaggaagttttgcacacccagttccataacgttgttggatgtatgagccaggcaggggtccagagaccaccagcctgcaatccggagaacccaagctaggcgcgagccggtgctgtgatcccgccaaaggagaagctgccttcccggggaaggggcagagaggggccggcgggctgaggccaaccagcgcagaaagggcctggcagccattactgtagcgctggcggctctgtcacgcccctgaagccgctggcccgcgggtgtgttcagctcaggagcggccctgcgtgtttttcccccgtggccgtcgcggacccccgtcttccaacagtggtgcgggcggggcgccccgtcctgggttcgcggcatagccccgcccgggcccccacgcggaacagaagtaacggacccttttttttttgtttttgtttttgaaacggagtgtcgctctgtcgcccaggatagagtgcagtggcgcgatctcggctcactgcaacctccgcctcccgggttcaagcgattctcctgcctcagcctcccgagtagatggaactacaggcacccgccacaatgcccggctaatttttgtatttttagtaaagagggggtttcgccatgttgtccaggatggtctcgaactcctgacctcgtgatccgcccgcctcggcctcccaaagtgttgggattacaggcgtgagccaccgcgcccggccccggacccttctttattggcctcaaaacgggtcattttgggaagcggcgcggggctggccgcgcttccctgggccccggccctccccatggtgtttacggggaggcgaacggggagcccagaggctgcgagcctggcctggacccaggagccaggggtatcccacaagtcctggaggctctgaacgcggcgctgacgccgaatacctgtgaaaaagactcggggaggagacccgcagaccgccgagcttctgccgcgggaaccgcgcccccggccccgcaatgcgcctgcgcctcgcgcgccgacttccagtcccagcaggccgcgggcgggggcggggcctccggggagaattcgggggaggggcggggcctccgggaagcaatcagggcaggggcggggcgtccggggagtggggcggggctcccggttccaggcgagttcgcagctgcgcgccgggtcctggaggccgaggccgctcccgcccgttgtccccgcagtccccgacgggagcgccatggcccagccgccgcccgacgtggagggggacgactgtctccccgcgtaccgccacctctt

SEQ ID NO: 14889 - DNA, 2300 bp, Homo sapien
tgtcatggccgccgtggaccaggctctgaaggagtttggcagaatcgacattctcattaactgtgagtcggtgctgagtgaggttggtggcttctcacaggttggtggtaccatttggaggccctagaactctggtcatggggtggggaccatgccagggaacctagctgcctgtgctggggtgggctgcaccccatccaggtacctgaggccaagactcaggctccggccccctgtctccggccccatctccggccccctgtctccgggcccctgtctccgggcctctgtctccgggctctgtctccgggcctctgtcttcggccgcatctccggccccctgtctctgggcctctgtctccgggcgtctctctccggccccatctccggccccctgtctccgggcctctgtctccggccccatctccggccccctgtctccgggcccctgtctccaggcctctgtctccggccccctgtctccgggcccctgtctccgggcctctgtctccggccccctgtctccgggcccctgtctccgggcctctgtctccggccctctgtctccgggcccctgtctccgggcccctgtctccagccccctgtctccggacctctgtctccgggcccctgtctccgggcctctgtctccggccccctgtctccgggcctctgtctccgggcctctgtctccggccccctgtctccggccccctgtctccgggcctctgtctccgggcctctgtctccggccccctgtctctgggcctctgtctccggccccatctccggccccctgtctccgggcttctgtctctggccctctgtctctggccctctgtctccaggcctttgtgtcccgccttctgtctctggccctctgtctccggcctgactccgcttctctgggtggcagcaggtcagcacagctgcagcccaagtggacgccatgaacacagctcaatggtagagtcgggtgcccttgtgtcctgaaattccgtctttaaaaaaaaaagtaatagccttttttttttttttagacagcatctcactctgtcacccaggctggtgtgatcatggcttactgcagcctccaccttctgggctcaagccatcctcctgccccagcctcctgaggagctgggactacagacgtgtgccatcacgcctggctaatttttatattttttattttttgtagagacagggtcttagtgtgtgttgctcaggccagtctcaaactcctaggctcaagcaatcttcctgccttggcctcccaaaatgctgggattacaagcaagagtcatcaataaaatagaagctagcctggcctagctttttttttttttttagagggagtttcgctcttgttgcccaggctggagtaccatggtacaatctcagcttacagcaccctccgcctcccgggttcaagcaattctcccgtctcagcctcccaagtagctgggattacaggcgcccgctaccacacctggctaatttttgtatttttaatagagatggggtttcatcatattgtttagactggtctcgaactcttgatctcaggtgatccgcccgccttggcttccgaaagtgctgggattacaggcgtgagccgccgcgcctggcccccagcttttatttttatttctttattttttatttttattgatttttatttttattttttgagagagtcttgctgtgtcgcccaggctggagtgcagtggcgcaatcttggctcactgcaagctccgcctcccgggttcatgccattctcctgcctcagtcccccagtagctgggactacaggtgcctgccaccacgcctggctaactttttgtatttttactagagatggggtttcaccatgttagccaggatggtctcgatctcctgacctcgtgatccgcccgcctcagcctcccaaagtgctgggattacaggcgtgagccaccacgcctggccgatttttttttttaaatcacagttttaggtttatagaataattaatagtatatggaattccatactcccacctacagttttccctgttaacatcttgcgtttgttacaattgatgaaccaacactggtttcactctgcagaaattcccttttaaaaacatcctgtgtattagtttcctgggctaacagagtactacgacctgtgtgggtaaaacaaccgaaatataatctcccagttctggaggccagaacgtccaaggggaaggcgtcggcagagctatgctctctgaaggccccaggggagagcctcttcctgccttctgcgtggct

SEQ ID NO: 14890 - DNA, 2300 bp, Homo sapien
ggagtgcaatggtgcaatcttggctcgctgcaagctctgcctcccgggttcacgcctttctcctgcctcagcctcccaaatagctgggactacaggtgcctgccaccacacctggctaatttttgtttttttgtatttttagtagagacggggtttcaccgtgttagccaggatggtctccattttctgacctcgtgatccgcccgcctcagcctcccacagtcctgggattacaggcatgagctaccacacctggcctaaggtgggaggatctcttgagcctaggaggttgaggctgccgtgagctatggtcgcaccactgcactgcagcctgggcaacagagcaaaaccctgtctcggggaaaaaaaagaaaagaaaagaaaagaaggaactgctacagcccacagcctacaaaggggacacagatagtagctctgaacagcagacggatagacgggaacttgtccctttagtctttcatgaacagcctctaactggtccaggcagggaggtgcaggcttccaggctgtggttccatggaggacaccagccgggcacgcaatggacgttttccagccctagcacagacagagcgtgcgggcccctgctctcagaaagccagccttctgcctctggcagcgccggcacataaaagcagagggagcctgctgtctctgcctcgcccacactaacacccctatttagaaaggttgacacatcactatcactgcttctgaaaattttatccggccgaaggcatcagcccaaatttgaattcttgccaaagctgctggtgatttcgttctttgaatgcagtatcttcctcatgaacacgtacagctcttacaagaaaatgagaatacggtttggggaggaggatccctcacattccttttcctaatgccagcctcgcgaagtctggtcccatgtaccctgggattctgccacggaagatgactcacttaattaacacgctgctcctgaccgtacacttggaagcagaggttccgttcctttggttcttgccaaagctgcttacgaaaccatatcttgtgttggtgcccatggtgtgtaaaaatacaagttcatcatttccctgatacaaattatgacaggctaaatttagtgcctcacctgtcctaactagctttcccaccatcatgcctgccgccgggctgtggtcctttctgaggtcccgtgtccctctgaggacagggacacccagacacagaggtcagttgtcagacgcggccacggtgctcgggaggctggctgcagacgggcgattcaccctgggtgtcttcttgagtcttattttttgtagagacgaggtctcgctttggtgctcaggctggtctcaatctcctgggcgcaagcgatcctcccgcttgggcgtgggccagcgcgcccgtcccaacgctgggagtcccggagatcttggtcacaggcttaagggaaaggcctagcgcgtggccgcgcgtgcctctggtttcaagggacatggactgcgtgtctggggcccctccgcactccgtgtcagaccctgcgtcccccgggtccgcgcgggacccgggcagggcgtcgccctctgcggcgtctgcgccccgcgaaccctggggcacctgcaacccctgggccgcggagccaggcgtgcgccgcctcctggtctcatcaacgtgagaacgctttacccccgaagagctcagctcctagggggctatgtccctttgcgtctctcgctcgccaggcggtgccgtttactcgaccgcaccatgcgtgggtagcggtcgcgcccgctggtagctgtgcggcgggaacacgttctaagtaaggcctgactccgcgcgcctcttgccagggacgtcacgtcacgcctccactcgcagcctcggagcacccccgcgtcccgcgcccgaagctcgggacccccgctctggcgaaacgaggaatatgacatacagcaaaacaccccttcgcggccgctgcactgccgcgacacacccggcgcctgcctctacagcaagccggcgaggggctgggaccccgccgggacgtgctgacgtcaggcccgacggggggcggggcctgggcggcggcggcgttagttctccgggtacctcaggcgcctcagcctccttagtctcctcatcctgcttcacaggctccgcggcctccggcctcctcggcccccgtcccccggcctcctcggcccccgtcccccgccatccgccgcccggatcctcgccgccctccctaggccgccccgccgccatgggcctgcgcccgccgcgccgccggg

SEQ ID NO: 14891 - DNA, 2300 bp, Homo sapien
agtgcagtggcgcgatcttggttcactgcaacctctgcctcccgggtcccggttcaagctattctcctgcctcagcctccctcccaagtagctgggattacaggcacataccaccatgcccagctaatttttgtatttttagtacagacgggttttcaccatgttggccactatggtctcgaactcctgaactcgtgatctgcccacctcagcctcccaaagtgctgggattgtaggcgtgagccaccatgcccggcctattttttattattttaaatgtattatttatgtatttatgagacagggactcactttgtcacccaggttggagtatagtggcatgatctcagctcactgcagcctccacctcccaggctcaagtgattcttgtgcctcagcctcccgagtagatgggactacaggcatgcccccaccacacctggctaattgtttttgtggagatggggtttcactgtgttggctgggatggtctagaactcctgaccttaagtgatccgcccgcctcggcctcccaaagtgctaggattacaggcgtgagccaccacacccggccttatctttattttttgtagacataggatctttgctatattgcccaggccagtcttgaactcctggacttaagcaatcctctagtgtcagtcttccaaagtgctgggattacaggtgtgagccaccatgcctggtctccacttttcttttttcttcgagacagggtcttgctctgtcactcaggctggaatgtagtggtgcagtcttggccaactgcatcctctgcctccctggctcaagccttcagagtagctaagactacaggtgtgtcccacaatgtccagctgatttttttcttttcttttctttctttcttttttttttgagatggagtcttgctctgtcgcccaggctggagtgcagagtggtgtgatttcggctccctgaaacatccgcctcccaggttcaagtgattctcctgcctcagcctcccaattagctgaaattacaggtgttcgccactatgcccagctaatttttactatttttagtagagatggggtttcaccatgttggtcaggctggtcttgaactcctgacctcaaatgatcctcctgcctcagcctgccaaagtgctgggattacgagtgtgagccactgcacccgacctaatttttgtatttttgtggagatggggtttcaccatgttgcccaggctggtctcaatcacctgggctgaagcaatccacctgcctcagcctcccaaagtgctgggattacaggcataggccaccgtgcctggccccaaccttcacttttaaaataagtgattgacattagaatagattgtgttaaaggtattaagtaatgctattttataagtagctggtctattttaggcaagtagttgaattaatagtgagacagtgtgaagacacctaagtgtcttctgtcactcacaggccctggaaggtgctttgacctgtgaatatcactgagacgctggaagccagtgccttttcctacaggaggagaggcaggtgctgcgggattggttgtgtttgcaaagtgatgactgtagctgacgtaagaattatagcctgtctctcatgagaagatagcttttcctttaaagtttttctcatagaacattgattatagaagataagcaaaaaaagaaaataaaatgaaaactgcgcgtgaacccagcacccaggaaaagatgttgtttttgtattatttcatcatacctacaccttctcatgtaaatgtttttaaaggtttaaatctgattggtacctaacactttttaaaggccatggacagttttatggagctcaatgtcttgctctttttttttttgcagtgctgtctgcttcttttaagaaataaaaagtttatctcctacctctgcatctcctcctcagaattctctccagaagccttgttcctgtgggcaacgcatctctgacccgttggcaaggctgttttctctccctggatttctcatgctcactcccttgcttgtcttgaccccccccagggcccccaactcccacacatctgtccctgggggcctccttcccagggagtcccgaggccgccaggggtcccgtcactgggtggctatgggtggcctgttgagcacgaggtcttctccctgcagatcctgatggccagtgctacggtggtgtcgcttctgcccaagatgaggagcccctggcctgcccggacgagttcgatgacttcgtcacctatgaggcaagtggttttcacccaggagcttg

SEQ ID NO: 14892 - DNA, 2300 bp, Homo sapien
ctcacggaggcacgagtgactcatttctctcatcgcacccattccctccagcactctccttgtgcggggaaacctcagtcaccttgaagacgcctcctgaggccctcttctgggtgaatgggcttcctccttcaccatgacaggctactggggagagctggggtgctcccaccctctcctcaccccaaatgggcctggcctagcaaaactggccagaactggccactctgcagtgagctggcagggccctcagcatcagatcaacaggttcaactgcagctgcctctctggtggggaggttataaggcctgctggctagaccactggcccctggccagggagccacctaggcagtgccagggaaggactgggaagggaagagaacctgcggtccctgagtgaggccttgactgcaccctctcctgtggttcgaaagccacacttggccagtatcctgccatgcaggtgaggaagctggggaggacagggtcccagagccttgtccaagttgcagagaggagagccagctctcactctgcagccctctgtgcccccagacccccactggcccccggggacacatttcctgcccttgggatgctttggcatggatatagtctgggaacaaacggcacatccagctgccctgcctgtctccacagagggggcagcagacctagggggaggtgtccaagacacaggaatgaagtgtccttaccaaaagcttccgaggacagaaataaacccctcctgccagcttctgcactgactgcagctagaagccgagctccacgtgggacacaggtgtccctgctgcggcatctcagcatgacggaggcccatccttggctttcctggagcatgaatatcctctgaggagcactggccctggccttgtaggtcttgctgagactggcttagattttctggcccaggagcaatcgtcacccaacctcccacttgtaaatctcgccacagaatcggcccacaaccgtctctccggaatctcggcggaccagccctgctcctgtgtctccctctcccgcagagccactgccttctcaggctcctcaagtgcacctaagagcgggagtctggctgccctcagcactcgcgtcccgccctgcagcctgataagcttgacgccaaggcattctcccgagagccggcccagcagctgctggcaggagagtggcctcagggcagcgggaaggggacctccggggagagaatgaggcctgcgcaagggtcctggaaggacccaggagtcgccccggcttccctcccccaggccctggttgggcgccgtgggccgcgtcccagttgagcccggcgtggccgtttaatggcgtccctccgcgaccgaggacgaaggggcctagagaggctgtgcccaagcgacgctgcgaggccaggccgcgtctcgggccagggcggtccccttgccaccgccgctcttggccgccaggaccaagcacagcacgcagcgtcgcgaaaggggcggtcctggaaggcgcgaaggggtctccgggtctcgcgaacacggcggggtcggggcggagtcgtgggtcctcggtcgagcggccgcccagagccccgcgggacacggacggccccagcccggctccccgcgagccccacgcgtctgtgacgccgctgatgcgcagacgccgcggctgcaggccccgcccctccgtgcccctcgcaaggccctctgggagttgtagttccagctcctcctcgggccgccccactccctgataatcctggagcgcggcgcctcccggggaccgaggcctcgggcccggccgtctccagcagcgagggcaggagaagtggcccgggcggtcggcggactgggagggcgccacccgaggactacaactcccggcctgcctcgcgcaggcaccgccccgagcttccgccccgtcggcgccgcgcagccctgtgggagccgtagtccgggcgcgcgattcacagcgccgcgtgcgccccgggcgcgccgtagccgcggggcccgggccgggcgctacgctacgaaggcagcgtaaggcgggcgccggacgcgggcaggggccggggccggagccgggtcggggcgccccgcggctgaggagcgggaggccgtccgggcagcgcggccggcggcgagaggggccccgccgctctccggaggcagaagttgtggatcggccggcgggggcgagcgggcccgggggccggggccgcgctgcccgggccgcgaggacgaggcggcgccgccgggctgtggaggtgagtcccgtcggccgggcccggcc

SEQ ID NO: 14893 - DNA, 2300 bp, Homo sapien
tgggcaaggaggcctgcgaggtgtgcggcttcaccccggagcctgcgcctggggctgccttcctgccagtcctcaacggggtcctccccaagccacccgccatcctgggggagcccaagggcagctgccaggaggaagcaggtccagtgaggactgcggggctggtggccacggagcccgccagggggcagtgcgaggacaaggacgaggaggagaaggaggagcaggaggaggaggagggagcggcggagcccagagggggctgggcgtgtccgcgttgcacgctgcacaacacgcccgtggccagctcctgctccgtctgcgggggcccacgcaggctctcgctgccacggatccctcctgaggccctggtggtcccggaagtggtggccccggccggcttccacgtcgtgcctgccgcgcctccacctggcctccccggggaaggtgccgaggccaaccccccagccaccagccagggcccagctgccgaaccagagccgcccagggtcccgcccttcagccccttctcgtccaccctgcagaacaaccccgtgccgcgcagccgacgcgaggttcccccccagctgcagccaccggtgcctgaggctgcccagccgtcaccctctgccggctgcaggggagccccccagggctcgggctgggctggggcctcccgcctagcagagttgctgtctggcaagcggctgagtgtgctggaggaagaggccacggagggtggcaccagccgcgtagaggccggcagctccacctcgggcagtgacatcattgacctggccggagacaccgtgcgttacacgcccgccagcccctccagccccgacttcaccacctggtcatgtgccaagtgcacgctcagaaaccccacagtggcccccaggtgctcggcctgcggctgctccaaactgcacggcttccaggagcatggcgagccccccacccactgccccgactgtggggccgacaagcccagcccctgcggcagaagctgcggacgggtgtcctcggcccagaaggccgcccgcgtcctgcccgagcgcccgggccagtgggcctgccctgcctgtaccctgctcaacgcactgcgggccaagcactgcgccgcctgccacacgcctcagctcctggtggcccagcggcggggggccgcgcccctgaggcgcagggagagcatgcacgtggagcagcggcggcagacagacgagggcgaggccaaggcactctgggagaacatcgtggccttctgccgggaggtgaggcgccccctcgccctcttcctgctcctgagcctcctgctcccgccctccccttcctaggctttgggctctggcgatgggctggggaggagcccacaaggcctaagacgtgatggggagggcagcaccctccgccccgaggctccaagctcccaatggccctggggtccagcttggcctcctgacccttggtccttgctggtgaccgagatgcacgaccttcacccccctcaaccctccaccgtggccaggagggccccgagccccgtctgatgtgccgcaggaggcgagggcttcccaggggcagcgtggagaccccgctgaagtgcgaggtcgggatgtacccgtgctccgccctctagagtccaggatggcatcacccacgggtcaactggggcgcagcctgcaccctccccagcagggccagggccagagtcgtgctgccacccactgggggctgcgctgtccccctgggcccacacgtcccctgctcctcacctgtcgccagccggtggcctctccactagggctgagggcttcctcgacacagggccggcgccaggtctgtggctgtccacgctccacccgtccctttggggctcaggcagtgcttttgggcgctctcctgggtggggtcttgtccctgccaggtggagcgaggccaccctgcccagcctgagcacatggccgtggtctctgcagaacaatgtgagcttcgtggatgacagcttccctcccgggcccgagtctgtcggcttccccgcgggtgacagcgtgcagcagcgtgtgaggcagtggctgcgaccccaggagatcaactgctccgtcttcagggaccacagggccacgtggtctgtgttccacacactgcggccctcagacatcctgcaggggctgctggggaactgctggtgaggccttctccaaggccggggtggggcgggtgggcgggcgaccggccgcggtccccgcgaggtcaccctgaggctctgcgcaggttcctgagcgccctggcggtgctgg

SEQ ID NO: 14894 - DNA, 2300 bp, Homo sapien
tctggtcagcgggtctgtgcctcgacccccaggggcctcctcggagtgccccggtgcgagcaccttgaagctcccggagccctcctctcagctgaccctgggcagtgctgctgcccaccccccacccgcccgggagccacagagcccagagccagccccacaaggcctccaggggacccaggcctgccacccctgactcaggccctgtgcgcttcaggcatggtggagggggctggtccagaccctcctgaacacttcacgtggtccctacaggcaggagtgggcccttctctgctgcgcctgcctgtcttggtggcaaggtcgcggccagcgagggcactggtcagcaaggccccggtcagtgagggccccgctcagccatgcccccagtcggtgagggccccactcagccatgcccctggttagtgagaccccctgtcagtgagggttccctgtcggtgagggtccccggtcggtgagggcccccagtcggtgagggtcccggtcggtgagggtcccctgtcggtgagggtccccgtcggtgagggtcccggtcggtgagggtcccctgccggtgagggtcccggtcggtgagggtcccggtcggtgagggccccggtcggtgagggtgccccgtcggtgatggccccggtcggtgagggtcccggtcggtgagggtcccctgtcggtgaggtccctggtcggtgagggtcccggtcagtgagggtcccctttcggtgagggtcccctgtctgtgagggccccggtcggtgagggtcccctgttggtgagggtcccggtcggtgagggtcccctgtcggtgagggccccggtcggtgagggccccggtcggtgagggtccccggtcggtgaggtccccggtcggtgagggccccggtcggtgagggtccccggtcggtgagggcccctgttggtgagggccccggtcggtgagggcgccccgtcggtgagggtcccggtcggtgagggccccggtcggtgagggtccccagtcggtgagggtcccggtcagtgagggtccccggtcggtgagggtcccctgtcggtgagggtcccggtcggtgagggccgctctgccacacaggttcctcatgggtgcctcctgtggcgggggcaacatgaaggtggacgattcggcctacgagagcctgggcctgcgcccccggcatgcctactccatcctggatgtccgagatgtccagggcaccaggtagggccggcctggctgagggtgggtggggtgccggtgagactcgggcagtgtggttcagatcctcacccctgtggtctgcaggcttctgcggctccgaaacccgtggggccgtttctcctggaacggcagctggtccgacgagtggccacactggccggggcacctgcgtggcgagctcatgccgcacggcagcagtgagggtgtcttctggatggagtacggcgactttgtcaggtatcggcaccgtggggcggtgtgcacgccgcccccgccctcctagggccgagtccttctctggagaacaagcctgtccctcctgctgacctggggtggggcggcttgttcgtggcccaaatgggacctggagcttcagctccaaggtgccaacctcagaattcaggtccacccaggtcagcagattccagcgccctgaagagccggccctggagggcttcctattataggcctcagggatgggcccccgggggccgggctgcaagaggacggtgacggagcagctggcacctgctggggtcaccggcctgtggttgcggtaggcgctgagccacggaggtgtgggccgtggtaggctcagggccccgtcctcccgccacctgcaggtacttcgactccgtggacatctgtaaggtgcactcggactggcaggaggcgcgggtgcagggctgctttcccagctcggccagcgcgcccgtgggggtaacagcgctcacggtgctggagcgggcctcgctggagttcgcgctcttccaggagggcagcaggtgggtgctgcggggccccatcgggctgggctgggctaggctggcggccgtgaccacgcgtgaccctggcccgtggtgtctggcgcaggcgctcggacgccgtggacagccacctgctggacctgtgcatcctggtgttccgggccacgttcggcagcggcggccacctcagcctgggccgcctcctggcccacagtaagcgcgcggtcaagaagttcgtcagctgcgacgtcatgctggagcctggcgagtacgctgtggtgtgctgcgccttcaaccactgg

SEQ ID NO: 14895 - DNA, 2300 bp, Homo sapien
ggtgagggtcccggtcggtgagggtcccggtcggtgagggccccggtcggtgagggtgccccgtcggtgatggccccggtcggtgagggtcccggtcggtgagggtcccctgtcggtgaggtccctggtcggtgagggtcccggtcagtgagggtcccctttcggtgagggtcccctgtctgtgagggccccggtcggtgagggtcccctgttggtgagggtcccggtcggtgagggtcccctgtcggtgagggccccggtcggtgagggccccggtcggtgagggtccccggtcggtgaggtccccggtcggtgagggccccggtcggtgagggtccccggtcggtgagggcccctgttggtgagggccccggtcggtgagggcgccccgtcggtgagggtcccggtcggtgagggccccggtcggtgagggtccccagtcggtgagggtcccggtcagtgagggtccccggtcggtgagggtcccctgtcggtgagggtcccggtcggtgagggccgctctgccacacaggttcctcatgggtgcctcctgtggcgggggcaacatgaaggtggacgattcggcctacgagagcctgggcctgcgcccccggcatgcctactccatcctggatgtccgagatgtccagggcaccaggtagggccggcctggctgagggtgggtggggtgccggtgagactcgggcagtgtggttcagatcctcacccctgtggtctgcaggcttctgcggctccgaaacccgtggggccgtttctcctggaacggcagctggtccgacgagtggccacactggccggggcacctgcgtggcgagctcatgccgcacggcagcagtgagggtgtcttctggatggagtacggcgactttgtcaggtatcggcaccgtggggcggtgtgcacgccgcccccgccctcctagggccgagtccttctctggagaacaagcctgtccctcctgctgacctggggtggggcggcttgttcgtggcccaaatgggacctggagcttcagctccaaggtgccaacctcagaattcaggtccacccaggtcagcagattccagcgccctgaagagccggccctggagggcttcctattataggcctcagggatgggcccccgggggccgggctgcaagaggacggtgacggagcagctggcacctgctggggtcaccggcctgtggttgcggtaggcgctgagccacggaggtgtgggccgtggtaggctcagggccccgtcctcccgccacctgcaggtacttcgactccgtggacatctgtaaggtgcactcggactggcaggaggcgcgggtgcagggctgctttcccagctcggccagcgcgcccgtgggggtaacagcgctcacggtgctggagcgggcctcgctggagttcgcgctcttccaggagggcagcaggtgggtgctgcggggccccatcgggctgggctgggctaggctggcggccgtgaccacgcgtgaccctggcccgtggtgtctggcgcaggcgctcggacgccgtggacagccacctgctggacctgtgcatcctggtgttccgggccacgttcggcagcggcggccacctcagcctgggccgcctcctggcccacagtaagcgcgcggtcaagaagttcgtcagctgcgacgtcatgctggagcctggcgagtacgctgtggtgtgctgcgccttcaaccactgggggccgcccctgccgggcacccctgccccccagggtacgtggcccctaccccaggctcatgccccaggcccacggggagggctgcggttcacacgcccgtccttgtagcctccagcccctcggcaggggtcccgagagcctccccagagccgccgggccacgtgctggctgtgtacagctcgaggctggtcatggtggagcccgtggaagcccagccgaccacgctggccgacgccatcatcctgctcaccgagagccgcggagagcggcacgaggtgggtgggggtcccgggggagggtggcgtggggcagggggagtatgccccagcacctcccctgccccacaactgccattcctgtgcccagggccgtgagggcatgacctgctactacctgacacacggttgggcggggctcatcgtggtggtggagaaccgacaccccaaggcctacctgcacgtgcagtgtgactgcaccgacagcttcaacgtggtgtccacacgcggcagcctgcgtacccaggatagcgtgccacccctgcacaggtgcgcccccgcccctgcccccccaccc

SEQ ID NO: 14896 - DNA, 2300 bp, Homo sapien
gtccttccgggaggccagaaacacgtccaagttgtgccccggggcccctctcgaggctgcccctcttctcttctcatgcaaacttctgcaaaggcccatcggtggtgaggggtggaggtgctccttcagcctgctcagcgctagacacggccttgttccccctctggggctccttggtcccctgagcttcactgggctttatttcctgtatgctgacatctaggtgctccaagaccaggcctccctgctccctactttcctcccctggacaatggccagagcctccagccagttggtctcctgtgctgtcagctgtggcctcttccagaccttcaaaggggtcagtctcgggctggccactgagggactactggtgtcagggtgaccttggaccctagtctcccggggcagtgctcagctgaacacgtccagagtagagtctatgtacagaagcagccggcctcctggcccccgctctccacggggctgctggcgtgacggcagcccaagctgtctcccggcccggagctgcctgcacggtcagctggtcagctgggccaggccaggtgggcagagagaaggctggcatgctctgccatccacagcacccctcccagtcccctgccccgccccagggacttccctcagacgggcgtgtgcggctgtgtcagggaaggtggcatggaggcaggagggagacagagccccacgcccaccccagaaccaggggctgttcctcatggaccctgggtgtgctctaccagggggctctgccagcagccggaccggggccacggagatgctgctgagctctcttctctgccccattcgaggggtgacacccagaagccccgtggggtcctcccttcttccccaaggcacccctgaccccgacctgagctggggacagcccgggagcctgcggctgagcctgcagagagccccaggtcctggggagctatgtgggccgggctccctgtgctgtttcagagtcagcagggagtagcacactcccctctggctggagaccccgagacgcccgcctaccgcaagtgtcgggtttaggacgtctcccctgagcgaagtcaggggctctgccccagccatgcctgtgtccgggagggagcaggccggtcaggcgaacctcccctaggccccagctgagcagtggggctccaggcctttacgttctggcagctcagggagctgcttggaacttggtgcagcccgggaggtggggctgggagcagccctggccctgcttctctcctccaccgccccaggtcctctcaggaggggactcccgtggggagggggtctttcaaacagcagggaagtgcgtggcctcgtggggcagcgctgaggcacctcccacaggagccgggagtgagggctggaggggtccgcatccaggaagggggagggtgctggagaccagccccaggtggaggcggtcagccggcagggcggggtgcgaggggccggtccgggcagcctccggtttagaggaaaagagaacggagggcagggctcgcccagggagggcaaggaagggagcccggctccgctggctcagtccgcggcacccctgtcccccaggacagcccccaggggccctggctcgggtgggccggcggctgtcaggggccagagccctgatggataagcgctgacggcccctctcccgcgccccgcgccgctgacacccatcacgccgcggcggggacccgggagacctggcggcctctgtgcacccccgcggcagcctgcgggcaacgggggcgggaggcgccgggcgcccctgactcggccgcacacctgcgccgcagtccgctctccgtccgctgcctcccgggttcccggccgctccaccgcgcgccccgagagctgagccggtcccggcgcacgaggccggtgagtgcgcgccagggggcggcggggggcgcgcgggcggcgggggcgcggggttcgggccgggggctgctccttccctcccgccgcgagcgcggtcggaggtcgcagcgccccccggagcccggagcccaggcgcacgcgcgcccgcctctgccgccaacttcgggaggtgcgagcggcgtcggggggacgcgggcggcggcggaggctgcgggagtcgctgccgctcgagggaccgcggacccgggaggtccggctcccggcgccgggcctcagtttcccccacgggagccgcatcccacccccagagccccagcgcgtccgcggggtccgagtcgcggccggcgcggggcggggaggggcgggaagtttgcgccctacacgcg

SEQ ID NO: 14897 - DNA, 2300 bp, Homo sapien
ggcaagatccgcctggagctgctcaccattcaccaggcgctggagcaggccgtgaggccgccagacgcacccctcgacctctctgtgaaacgtgcgcccgccaaggggccccaggctcttggagaggcgtgggggcggcccgagctgggtcccgtgttgaccgggggcacccccgagccacccggcatgctgggccctgcagcgccccaacccttctctggccacaccaccaagtgtgaggccgactccagcgtcccacccccagggctccccctcgcagccccagatgaccctgtcattcctggcagtggctggggcacctgtgttgcgacgaggagttcccagacccctgaggctgtctgtggcctgcagagcccccagggcgccgaggtctgacctgcagcgcctgaggtctgactgtctctgcctgcagcatgccggcccctctcctgcagcccctgcccctcacctgcctgggacctgccccgcctccgcatgcatgtggatagacccccacgggccgtggccaacgcttgtccctggggccacacagggacactggaggtcacagttatttattgatcacaattgtggacattaaaacagaaactgttcacacacgccgtctgtgcctccttcctttggggccctagtgtagccacctggacacccccctaaggaagtgtcctggcctgggaggcctgggtgggcagcagtcctgctgggcctctgtcttcagactcggccctctcctgtgggctgggccctccccgcggggctggggtctgggggtggggcgggacatcggcgacgggagctgagccaggagagccgtgtggactgggctgctcggcctgtgtcttggtgtgtcgggggtggagaggcgtgtggactgggctgctcggcctgtgtcttggtgtgtcgggggtgggcacggacccctgaacatcctctagcctctgaatccagcaaggccgcgctcatatcagctctcctgcggttaaacggtggccccggggctctgtggctggaggctgctcacccagcgtgggctctgctggcccctgccagcccctgcagccgtgataggtatcagccttcacagctcactgcctccctcccagcagggcctggcttggccctcccacgggcaggggatgggcagacagggaggggcacccgggacccccacagcaaatcacttctctcctgggagagctggccacaccctccacgcccaccctggaatgggctctggagcccacatcgcccccccaggaggagaagcagttcctgcctgcgtccagccgggctggggccagtccaagcaggctggcagcggccccattaactaccagggagatagcatcagccccgaccctgcctcggggcagctagagctggggtgctgcctggccaggcgcggagtgctgtggggacaggtcccagccgggcccctctacccagaggcttcctggaggggctgcagggggctctgggcagccaggaactgttcccaagtcccgagtctgagggagactccctgtcctcagcccccgccccccatatgtccactgcaccccatatgtccactgcacctcagtttctcacccccactgagcagacaggtgagcatggccttgctgggggcaacagcacccgtctcccaggtgtggagacacgacctccttcgctgtcacccgtggggagcaggacaggcctcatggagggtgcctcagccagcaggtcacccgcctgtggtccagacccaaggaccctgcttgggggtggcagcctggggctgccttgccacttggagtaatgaacttgctggttgtggggggaccatgggggacccctggaggggggtgggctgcatggcatctggccgtgtaggggacgtgggaatagtgtccgggcagagggcgcagcctgcaacaaggcgcggaggcaggaacaccacagcatggggagtcctcaggggacctggtttttctttcatagaagcttcaggggccaaggccggagactgcactctccctcctccacccggcccagctgcgtccctgccagtggctcctcccacttcctccagttctagtttccaacaacagaggctgcagccacccagccccgaagcagggcccagcgagacagggcccaggtaagagacccctccccccggcctctctcggtggggcaggtggaggccctcggaataggctgcctcgcccctaaggggtcagaagtctccctgacctaggggctcgggtagaagggctgtgtgtgggtgaccgccc

SEQ ID NO: 14898 - DNA, 2300 bp, Homo sapien
cactgggtgacagtgggcaccttcctgtctccccgagggctggctgtggatgccctcaaccgcctcctggtgacggactacttgcctggggctgtgcacagcttctcgttgggtcctgcttgggagcccctggccccagcctccatgctgggtctggagggcccctgctgggtgggcccagggcctgatgggggccttgctgtgagtgaggagtttggggatgtgaggctgtttggcagtgcccgccaacccctgggctccctggggggctggacggggcacactttcggctgcccagcgggcatctgctccaactcagagggcaatgttattgtggcagacgagcagaggcgccaggtgaccctgtttccccgggctgggccacccatctgcctggtgtcagaggggcttgggcagcccttgggagtggcctgtgcaccccagggccagctcctggtggctgatgccaaggacaactccatcaaggtgtaccagggcctcaaggagctggcctgacctgaggctgggttggagcagccctcctgtgcctgaggccagctcccaggcccttggatcaccgcgggaggaaccctcaggatgggtggagcctccaggctatgggcattgcctgcctgatgccagcaccacctgggctgggccctgggcttggctcgagttctcctgctggtgaggctccggatctcaggagcagccctgagtctgcttcccaggctgcccctgccaggcctgcagcctccccagccagggctgctctctgctgtccccattcagtgccctggcccctgcattcatgccccccacaccccctcaggccctgtgcctggactttggggctggcagctgaagccttgagatcctgggccagctgccggcacacagctaggcagactctcccaccaggtgcccctgcccaggcctcctaatcgggggcagacaggcagggagggtgtggctgggctgggctgggcggggcggcctggggcaggggtgtggcccctaaatgtccccaacctcagagggacctagagtcctgagcctccagtagcttctctgggcctggcagaggtaagggggaggcaaccctggagtgtctggaggcccatggctggctgaaccctggatgccttttcttccgcgtccccatgaatgaaagctgtctgggccttcattctgcagacagggacaaacagctccatgctgtttgtcctcccagtgcagccgtgctgggagggtctgggggagcttcctacaaggagagactcctgctgctttggaaaactgagaaaaaataggggtctaaccctctcctcccattttacaagtggggaaatgaggcgtgaaaggagaggcgtctgggttactccgtgggtctggggtccagggaagggcctgtatgggggagggagctgggaggggacggtgtctggctctacccctgtggggtggggaggtggggctcccctgtatcacaggacatcccccctgagaggtccctcatatgtctgggtcctgtgggtgggggactaactgcgcaatgtagttaggtgctcaataaacggagttgccgctgaggtctgggctggggtcttgttcctgggatcgggaggggctggacgcctgtgtgttctctcctgacgatcgctggcggcagcctctgggctggtcctaccagggctcaaaattcccggcaccactggccttggggatctgggggcggcccctctgcagacaacagagtgacgggggcgggaccgggctggggctggggccttcctggaatcccgcagggcctggggacctgttcacttggggaggctgggagccaggcggggtccgggttccacgaaggccaggtccagtcagtttctcaggtgaggaaaccgagctgacgcggggctggcggcccggaggcaggctcgggaggtccgggcctggggactgggcgggcacgctgcgccgcggaacgctcgggtcgggcgggcgggcgggcagcccgggcgcctttgggggccggaccgtcgcgcggcaacgcgcggagccggcggaagtggggctcgggtcccgcggcggggctggaggcagcgagcgccgtcgtctgcccgggcccgcccatcggggtccccaaccccatccggaccccgccgcccgagcgcgcggccccggaagcacccggtgagcagggggggtgggcggcgcgcggcgggacctcgggcagcgcccctgcggctccgggcctgggctgggggctccgcactcccgcccgcggcgccgctgctttc

SEQ ID NO: 14899 - DNA, 2300 bp, Homo sapien
gccttcagcttctctgtcttcctccctcagcaccaaagccccgtctcttccattaggagcttgtcttcctgctgggggtggtacctgactctttggcccaccctcgggcctctgtggaggcctccttgaggcctgactgggtgggtcttgtgtgggctgcaggtgtgcactgggcctgcttgtggccaggccaggcctctgggggcagcatcaggcacgtctgtgtggctgtgggggtgcagggagctccagcccagaaggaaggaggggcggggctggggaaggggctcggcagctttgcctgtggtcgtccgcacctgccaccggcctactttgtcctagacctcccttttgcaaaagtgctcagaaatataaatatttaatttaaaaatgaaagtctcttcctgctgccaagctcttatcctttaaatattaaataagctctatttataaagaatgttcttttctcagccgggggtggtggctcatgcctgtaatcccagcactttgggaggccaaggcgggcggatcatgaggtcaggagatcgagaccatcctggctaacacagtgaaatcccgtctctactaaaaatacaaaaaattagccaggtatggtggtgggcacctgtagtcccagctaattgggaggctgaggcaagagaatggcgtgaacccgggaggcagagcttgcagtgagccgagatctcaccactgcactccagcctgggcgacaaaacaagactccgtctcagaaaaaaaaaaaaaaaaaagtgttcttttctccttcttgccagtcctgctgtggctgaggccttggcccaggcttggaaggggcctgcgcaatgggcaagtgggggccaaggtgtcactcactgtctccttagtggggaggctgaggctcccttggggtctgcccgctggggcacagcctctggatgctgagtttcttcctgggcggccaagaccctgcttccctgtttgctcttgggggtgcctgtgccctcaacttgacgccatcctccctctggggacctgtcctcctgcctggtcgctgtggccctgatgggcttggcactgtctcgctcacctgtggtcatcccgggcagcccccagcctctgcgatggggtggggcctctggaggggactgtgtcagctgtgggcttccctgcagggctggagccgaatcagggtctgccaggcctcagtgcgtccacgtgtttggggccgagggctccagtgggtcctgtggccgaggtagtgagaggggaggaagatggtagaggtgggtgcaggcagggggccacgcggatgccctgtgggcccggccatgtcacccaggcctgcagagagaggcctccagaccagcctcctcagaccccaatcccggagccatctgtgaaggggagcccgtgtgctgtccacgctaggacgcggtagaccctggaggagggaaggctggccaaggtgggagcccatcacgaaagagcctggggagatgcaggtgctgagcctggctgcccccgccccagcgtggcccctgtgtccctgcagcacgtggccgaggagctccagcatctgctgcagtggctgatgggtgctcccgccgggctcaagatgaaccgtgcactggaccaggtgctgggccgcttcttcctctaccacatccacctgtggatcagtgagtgcagggcaggcgggggccccagggaccccagagcttgctgaagagggtagggacccagccagaccccgccccctgtgcccccaactctgctccccagcgtcctgtgtgtgtgaggcctgctgtgctcagctgagggctggggcctgggcacctcccgagggctgaccccaccctgccaggctacacgcacctcatgtcctgtgtgtgtgagggttgtgctgggccgagggctggggtctgagcgcctcctgagggcctaccccaccctgccaggctacatccacctcatgtcccccttcgtggagcacatcctttggcacgtgggcctctcggcctgcctgggcctgacggtggccctgtccctcctctcggacattatcgccctcctcaccttccacatctactgcttttacgtctatggagccaggtgggcgtgggcttccccctccccaccgccccctgggaggtgcagaggctccggctgggcgggcgttcgagtggggcgggggcggggcggggcggggcggggccgggcccgacagcactgcgtcctgtaggctgtactgcctgaagatccatggcctgtcctcactgtggcgtctgttccgggggaag

SEQ ID NO: 14900 - DNA, 2300 bp, Homo sapien
ccggagactagaggtgccccgggcccggagacttgaggtgccccgggcccggagactagaggtgccccgggcccggagacttgaggtgccccgggcccggagactagaggtgccccgggcccggagactagaggtgccccgggcccggagacttgaggtgccccgggcccggagactagaggtgcccgggctcggagactagagttgcccgggcccgtctgctgctcacacttgccgcagccgctggatgctgccatgcagagcatgttcttggtgactgtgtggccacgcaccgtcttgggtggtctggcccccacctgtctccctgcgagtcccctagtccgtggggtgtgggtggacagccctcctgctactgggactgcttctgagcaggccatcccgagttccctcaggaagccgcaaggtcccgactgcagctccgggatgggggagggcacagtgctgggccgtccctgggcgcggggtcctgctgatgcccggtgtgctggcccctccctacagctgttcatcgggactctgctcttcaccatcctgctcttcctcctgcctaccacagccctgtactacctggtgttcaccctggtgagctgagcacccacaggctgggcctggctgcagtgctctgtgtggcttctgccagcgctgcctgggagcagtcagctgtggggcgggctgtctcctgctgcaggccacgtgggtggcctttcaggaccctctgggcagtgagtgctgcgctctggagtgggcgaggccctatcctggccagtaagacaccctcactgccctggagcacgcagctgggtgcgtggtggaaggaccccacggcaggtggggtcacgcaagaggcctcccctggtgcctggcactggggcagacagtgggaggtgagcagaaccacctccagcacctgcttgattcccaggcctcgatcccctctgcatgtgaggctgtggggaggcacctctgacctggtgagagggccgggtgctccgcctccagctttgctccagagcaaggcccaatggcagactccgtgccctgctcagggtggggtccctgctctccccaggaccctgcagcctctgggcccccttcatcgtggcccaggatggggtcggactgctctgcccccaggcgcgtctggccgggccggtcctaaatgctcctctgccacagctccggctcctggtggtcgccgtgcagggcctgatccatctgctcgtggacctcatcaactccctgccgctgtactcactgggtcttcggctctgccggccctacaggctggcgggtaagtgctgcgtattgggcagctggccctgggtaggtggaggggaaccacacctgtgggccctgcagaagcaaggacagcatgggccactgtgcctccagcctggaagccgtggtatgcatgcgcaagcgggcagggaggacagggcctcctagtcccagaggtctgcaggaccagctgcctccagggaggtggagagagactcagagactcacctgccgcgcaggttcagaaccctggagacctgaggccacaggcctttgttcttctgccttgggattttctgggcttgggagtctgaactgcaggccaggggccaagcgcggcaaagtcagaggcactaggagccagcagggcggccaccatccagtaagtgccccgtccgctgtgccggaaaaccccgtccactcaacagcacagcctgcgcccgtccctcactggggctcttccctgcttgccggacacctggcttctttcagtggagtctgcaggaggcttttttttttttgagacggagtctcactttgtcgcccaggctggagtgcaatggcgcaatctcggctcactgtaatctctgcctcctgggttcaagcgattctcctgcctcagcctcccgagtagctaggattacaggtgtgtgccaccacgcccagctaattttttgtattttagtagagatgggggtttcaccattttggccacgctggtctcgaactcctgacctcgtgatcctcccacctcagcctcccaaagtgctgggattacaggcacgagccaccgtgcccggcttttttttttttttttttttgagatggagtcttgctctttttgcccaggctggagtgcaatggtgtgatctcagctcactgcaaccttcgcctccctggttgaagcgattctcctgcctcagcctcccaagtagctgagattacaggcacacgccatcacacccggctaatttttgtatttttagtacgtatggggtttc

SEQ ID NO: 14901 - DNA, 2300 bp, Homo sapien
cgatgttggccaagctggtcctgacctcaggtgatccacccacctcagcctcccaaagtgctgggattacaggcatgacccaccgtgcccggcctcagaaagcgtttctgatttatgttctcaggaaaggaggagacggctgctcaccactatccaccccccgcttccaggcagtctcagaaaccgaggaggaaacatcacatctttggtgcttcccgtccctggagtgaggggcctcagggacttcacagccagggctcaagtctgggcacaatgacctctgagcagaagaggctctccctgacccgccaggttgtttccgggttaatgcctggggaacttggcaaggcgccatctctacaaaaaatacaaaaggtagccgggcatggtggcgcctgtagtcccagctactcgggaggctgaggctggaggatcgcttgtgccggggaggtagaggctgcagtgagccgagatcgcgctactgcactgcagcctgggcgacaaagggagaccctgtttcaaaaaagaaaaaactggtgcgtcgatgtggtcgccgcttagtcaggccatgtcttcagctctgggggacgggaggtcactggaggtgtggggctgcccgtcctggcgtccctctgtgtaagcagcacctgctcccggaggcacagccctggtcggggcccctctggaggagggttcttgccgggctctgctcctcgccggcggggcagacgtgacgggctccgcacccggtctggagagggctgcgctgggtcggcgctgacgttactgcttttacttacgactgtaacagcgctactgaacgcagagcacgtatcacaaagctcacccgttccgagtgagtaacttcaccgagagaggcaggaccatccccacgacggtaggaccttctcgtcaccccagaaagaaccacgtgcccactcaacccccgaccccacgccggggcccgcggacgcagccgcctcgctcgcccacgcacctgcggcagccgggcccggcagggacgagggctcggcggcgcccccgggaagagcgcggtccgggccctgggtccccgtccaggaggcgccgctgccgcagtgagcacgtcgggccgggtcttgagctcgcgccggccgcgctccccgcgtcccgagctgtggcggccgcgtccccgggcggaaggctcacgctcggtgacgccgcgctgtcccagaacctcagcgactttgcagactcactggtgacccaacggtgcgccccgccgccgccgggcggaagtcccgcccctgccccggagaggaagttccgcctcatcgagcgccgattggccgcaccgccttagagaggacgcgcccggggccaccccgccgctccctccgagggttctgcggaagcaggcggcacagcctgcgaggggctttcgtttcccggactcagccgcatcgcctcggctcgggcgcgcctgcatcctgccgcccgtccgcgcgttgaaggggcggatacaaacaacgtggacttccgagcccctgattggcgagcgtgtaggaaaggggcggggttagcagagccgtgatggacatgcaagcgacccaatggcgccggcgacggggcgggcgaggacaacggcgttgtgggccgggggcggggcggccggcggctctgggatttctctgggaggcagccgcagggaagggaatgatcttggtgaacttataatcgaaccaatggttccgggaaagcaggaggcgagtggccaatggcgacggcgatgaggcaggcgtccgctgtctccgcaacgccgtgtgggaaaggcgggggaggggcggtcatgacagacgtgcagacaggccaatggctgagggaaggagggcggcgggcgacctctggtgactacgggaaggcagggcggggtggtgaagaggcggtgcgaccggaggtctggcggcgccgtgtggaacgccgtgagggcggggaagtcgtgacggacgggcgggtgggccaatgggctcgggagggcgggcgaagggtggccaatggcggcggcgcggccgggggtggggcggcgcggcggccctggtggtgcgggaagcggcggggcggcggcgaggctgaggtgcgcccgggcgcgggcggggcggggccggcgctgggcttcgggcgcgcccactcggccgccgtggggcggacgcaacgggcgcaggtgcggggcgcgggctctctcacgccgcggcctcacccggcggtgcttcggcaggcggccggcgcggggcgcaggcggcgcggccatgggctcgcagggc

SEQ ID NO: 14902 - DNA, 2300 bp, Homo sapien
aaaaatcatgctgggccgggcgcggtggctcacgcctgtcatcccagcactttgggaggccgaggtgggcagatcgggaggtcaggagatcaagaccatcctggctaacacggtgaaaccctgtctctactaaaaaaaaatacaaaaaaattagccgggcatggtggcgggcgcctgtagtcccagctactcaggagactgaggcaggagaatggcgtgaacccggaagcggagatcgtgcggctgcactccagcctgggcgacagagtgagactccgtctcaaaaaaaaaaaaaaaagaaatcatgctgggctgggcacagtggctcacacctctgatcccagcactttaggaagttgaggcaggaggatcacttgaggccaggggttcaagaccagcctgggcaacatagcaagatcccatctctaaaaaatgtttaaaaaaacttagccagatgtggtggttcacacctgtattcccagccactcaggaagctgaggctcagaatatcaggctgcagtgagccatgatcgtgccactgcatgaaccccagcctggctgacagagtgagaccctgtttcaaaaaaaaagaaaatgccatccgcagtgctgggacctgcgttcttacctcacctgggttgcacatctctccttggccagcatgcacgcttttacatgcactgctgctgtcttcagcatctgcacggtacatttcactgccgcttactcagctgtcccctgaggctggacatttaatttgtgtctggcttgtcgttgttatcagcgccactgtgacacacatcctcagttacttctgagttgtgggcttgccatgcgggaggttgccatgcgggaggttgccactagggagagtgggctgtgttgtacgctttggtggcccactccccagtctctccacctcccccagcagcaaatgagccagccccagtccctgtgccccaacctccagggttaacccctgggtgtgcatttgtttattctgaatcttatcatttatcgcccaccagactgacttggccatctctggcctcgaagggtctccctcagcgagaggtgtccttcctgagctgtcgctccatcctgagcaaggccttcgccctgggagcttagtaatgtcaaccttgttctaaacaggacctggggctacacttcagtcttccagatatcgaaagatggttctaagaggctctaaaaaccctaattttcagatggacagtgccctcttctttcagcctcagcctcttgtgtgataggctcttccattacgtgaaggttttgtcagcctaggagtagggtggatcacagctcattggctggatctggttgcagaattgtagggtgggagtggacgttggggagaggcgggcataggggaatgggcctgtgatgtcaccgtttcgcccgacagggctctgagtgtgagcagtgtgctcccctgtgctgctggagagccatgactgtcactgccgagatatttagggcaggtggaaacagcccagagctgagctccaagtaattggtctctaagggatgtggcaaaaagtccccgtggcaaaacctgctctgcctggctgggggagcttcacagaaactgtcctggagggactggcattctgctctgcaagttttaggttggaaaactcagaaatgcccccactcagctctgtcccaggtactcccggggggattcactgatggactggccgagaggacacttagcttccacagctgcacgtcccccggctgccagaaccccgcatctgcctgcccaggaaacttccacaggctgatggctccaggggagggaggggaagcggcatttctgacaccatggaaggcgcccacccccctgctgcagtcctgccaggtgagggcaggggtgaggggcagggctgcaccagctctgcctggagggcatggctcatctgcccatccgccaagtaataagcatccttggccctgcccgggaactgaggcccctgcacctgagcgtccctgggcctgggctggccatgcgtgtcagtgacccctgatgacccccaagtctctgttgcaggggatcctcttggtgtatgacatcaccaaccgctggtcctttgacggcatcgaccgctggatcaaggagatcgatgaggtaggcctgggtccggggagccctcccggggaaggcaggctggatggaggtacctgggccccgggtaggctctggattcccgcctgccgcccctcctgtggccccggctctgcaccctgcactgtcccacggcctacgcctgggc

SEQ ID NO: 14903 - DNA, 2300 bp, Homo sapien
catggccagcacgcagaaggagccctcccgggacccaggaccccccgtggtggactccgcggcacatgcttcccaaggtggtcccacggagggtgttactgggcaccagtggactcgccccatggcccgttcctgggagatgagggccgtggcctgcatgaactaccagatgagtaagggaaccccaggcaggcggccctgccacagcccccaaagacactggcctcctgctccagcttccctgtcctggccccacctgtcctgttgctgccagcagggcccttgtttgggattatgaacaaacctcacagactttgaggacctggatggtcctgcattcacggcatcaacactacccgcgctgctgttagacactccgccattcctggttctctccgaaccgttctttgtacagtaaatgtaattcagctgtggtccccacgttttgctgtgtctggtggggtgggtctggcagtggcggtgccccgtgccaggggccagtgctgcttcatacccggcaaactgacctctggcctttgttttgcctgctgttccctgcgctgaccgggctgacctgccgcggttggctgggttcgcctcaaagtgagggctggagctgggctggagcagctgggcctggtcacggccattctcctcttcccggtggatggaatcccagctgggctgtgctgagccctcgctcacagtccccggcagcagatggcctggggcggactgtccccaacagcagcaggactccagagggccaggtcctccagtcagtcggcccgctcagcagagccgcctgcacgctggccaatctggtgtctgctatgcccggcccaggggggtgtggacgccccggaggtcacagctgagctggaacggggcactccagttggtacagggaccagaccacagcctctggctcaggtgcctccctgtgctgtttcgtgggcatgtccgggccttaagcccctccttggcagctccagcccagccgcctgctgctgggtctggcctagctacccccacccccacgctatcagggcccacccccagtctccttgtagagcagggactggcgcctggagccgtctccgggtctcattctgaccagaccaggctcctgttaccctgcctcctgggtcagaggtcagacacagggtcagggggacactcccatccggtctcaagagaaccactccctgaggccccagacatctggagccacagagggtttggaagggtagattccaggcagccttttgtcctgctgcaccaggcaggccagccccctgccctccccaacgaagaggagccagcctggggatgtgtgccccgccgacggggggctggggcagggcaaggctctggtgccctgggacacttgctcttttcagctgcagacgcccttgcacttggccttccctcgggcggtgccatcccacgcggagccacgtccagggctacacggtgcgtgggccgaggctccggcatcagcgtttcgggctgttcttatgcttgtggtggccacaggcctcttcctgctgcacctgccccgccttggggacaggcctgagccccaagcccgctgcctggtttcagggatggggtctctgggaatgcagtcctgccgggttgggccccactccaacaggggcagcagagcagaggaggccgggctgtgctgggcgtcctgcagacccctgtgcccctgaaacagccatggaggggggaaggaacctcggagcggagtgaagccctcggccgcacgtgaccgttgccagcctggacctggcccgggggacccaggctgtggtcagccacgctctgcggggagggcccgtgcctgccacccccatggcataggagcctggggtccagagggcgccagggacaaaagctgggatctgctggccctgcccccaccctactgagggtcgtcaaggagattgatctcagcccaggggtggacgaaggggttcaggttacagggtcccctcccctccccctctccagccagagccagcccttccccgccccggtgaccctcatggccagtggctctgtgctcatgggcctctggcccctccccaacctcctcccctctgccctgtgctgaccagggcctgggagcccccgcacggttcagacagaggggccaggctgaagctggagaggaaccagcgtcacacagacggcctctgagaacttggagaccccgttacccacccagcaggggtgtcaggacaagcatctgctgcaggcttcagcctcaggggcaaaagggagccccg

SEQ ID NO: 14904 - DNA, 2300 bp, Homo sapien
cccttccaacgtccttgccctagccagagcgatatggggttcccattggtgaaaaacggctcagcaaaggcgctaagccagtcctgaatgcagagccaggcgcttggcactttctggagaagagcccggctctgaggctgggaccccaaccctcgggcgcacataaatcgcggcctgtgacttgatttcgggggtcaccgaccgacccctcacgctatccgtgggccctgagctggtgctgttaccccagtgtcacagagaaaccctggggcattattcgtgcccctcccgcagaccgcccagttctgcaggctgggaccgcccgccccgccctctgccgcccctgccgcccctgccgcccctgccgcccctgccgcaaccccgctctggccccgccccaacccgccagtccacactcatgtcccgccccccagccccgcctcccctctcggacccgccccgatatggccccgcccctccggcaaccccgccctaaactcggaccaacagggggccccagcccagccccgccctctccccagccccgccccgacagggcctcgcccccatcggctcacgaaggccaacggcttccacggctcaggcccgaatcgagactgtcctccagctcgcgtccttcacgcccgctccttcccctccggcactggggggcaccgcgagactcttaccctcgcggtcccgccagctgggtcctcctatgcagtcgccagctcccttgcgctgagcccggcgccagcggcggcgcacgcccggaggacttcccgcgtcacagtctcttgtctccgcgggcagcaactgtcttagacagcgccgctggtgtagtggtatcatgcaagattcccattcttgcgacccgggttcgattcccgggcggcgcacttagttttttttcccatttgaacatcgaactctcgctaacgccagaaatttaaaagtagagaaaacccgaaaccaagggaaggcgcccagtctggcgcagcgctgacacaaatttcggagagtgacacaggtgccctgaaaaccctggacggccatgggcgacagggtgcctgagctgaggcgcctgtaaaccagcaagccaagctcgccgttcagtcccctgcctgggaccgccacacaccgctgagccgctccccaccgtgcctctggcgactgctggtcctttaacaggaggcgcgcgtgctcctgggagttgtagtttatcagcttccgacgtgccccgcggtatctggactacagctcccgacgtgccccgcggaagcccggccaccgcccccgacgcgacccgcgccgcgtccgcggcggggagttgttgctgccgcgatgctggtggcggcggccgcggagcggaacaaggatcccatcttgcacgtgctgcggcagtacctggatccggcccagcgtggcgtccgcgtcctcgaggtggcctcgggctccggccagcacgcagcgcacttcgcgcgggccttccccctggccgagtggcagccgtcggacgtggaccagcgctgcctggacaggtgcggcccccggggcggccacttctatcggtgcggcggtccggggcctcaagagcccacggcccgcagccccggaggaaaaggatgcggctcgggctctgagggtgcggggtgggagcctgggggtgcccccggggcaggccctagctgtgcggcccccgcggctgcggaagtgggtggacctcggggtcccccttcccagccgctttggtctccgctcctcaacgtgccccccagcctcccctaagaaattctgtgggggcgtcggaaaggcgggtgcacaggactcggcccccacccaagcgttcgcctcctgcagcatcgcggccaccacgcaagcccagggcctgaccaacgtgaaggccccgctacacctggacgtgacgtggggctgggagcactggggcgggatcctgccacagtcgctggacctgttgctctgcatcaacatggcccatgtcagccccctgcgctgcacggaggtctgtggggagcccagcatgggtgtctgccgtggcaccactcaccctgcatgggggcagctgggatgccagatttgcccccatcacagtcggggtgagggtctccagcctcccccatcacagtcggggtgagggtctccagcctcccccatcacagtcggggtgagggtctccagcctcccccatcacagtcggggtgagggtctccagcctcagggcctggcttctgttgggggcagcacctcactgccgtcctgttcctactcaccaggggctc

SEQ ID NO: 14905 - DNA, 2300 bp, Homo sapien
cggggtgctggggggcctgtgcacagcctgagggcatatgctcctgtggaagacctggcagcaaggaccagctgagttagagtgagggcggtgctggggagggaagccccatgtggggaagggcataacccgagctcacacaggctcccgaaggcggccccccacctttggggcccactgcaggcggcaaggacaagctgggctggcccagagctcagcagagctagcgtttgcttcagccattggtggtcaagccacgaggcccaaacatccagccccaacaataggccatatctgaagtcaggcaacactaaacctgccatgcgctgggcactgtaggcagctcctgaacgcagctccattcaaggggggaagcagggaggcgcagagagactgatctcgggctcctctttcctgtgcctagggaagcccaggtgaaatctgggtgaggagaggtgcatgggccccaggagaaccactggtcatcataggtccctcctcctggggctctcctcgaggtgggggttgggggcagggtgcgcattgaaggaggcgcagggaaagtgctcagcccacagaaagagagatggaggcggccagtcaggcgaggaaagcgtgggcttgggccgcagagcctgctgcagggtctggccagtcaccaccacggcggacaccaacatctcctggcagggttgtccctgacccctgactccctgagccccccatggcccgcgttcccagtcccagactggcagcctgtaagccactctcctaccctgagccacgtgactggccctccctggtttaccccttccaacgtccttgccctagccagagcgatatggggttcccattggtgaaaaacggctcagcaaaggcgctaagccagtcctgaatgcagagccaggcgcttggcactttctggagaagagcccggctctgaggctgggaccccaaccctcgggcgcacataaatcgcggcctgtgacttgatttcgggggtcaccgaccgacccctcacgctatccgtgggccctgagctggtgctgttaccccagtgtcacagagaaaccctggggcattattcgtgcccctcccgcagaccgcccagttctgcaggctgggaccgcccgccccgccctctgccgcccctgccgcccctgccgcccctgccgcccctgccgcaaccccgctctggccccgccccaacccgccagtccacactcatgtcccgccccccagccccgcctcccctctcggacccgccccgatatggccccgcccctccggcaaccccgccctaaactcggaccaacagggggccccagcccagccccgccctctccccagccccgccccgacagggcctcgcccccatcggctcacgaaggccaacggcttccacggctcaggcccgaatcgagactgtcctccagctcgcgtccttcacgcccgctccttcccctccggcactggggggcaccgcgagactcttaccctcgcggtcccgccagctgggtcctcctatgcagtcgccagctcccttgcgctgagcccggcgccagcggcggcgcacgcccggaggacttcccgcgtcacagtctcttgtctccgcgggcagcaactgtcttagacagcgccgctggtgtagtggtatcatgcaagattcccattcttgcgacccgggttcgattcccgggcggcgcacttagttttttttcccatttgaacatcgaactctcgctaacgccagaaatttaaaagtagagaaaacccgaaaccaagggaaggcgcccagtctggcgcagcgctgacacaaatttcggagagtgacacaggtgccctgaaaaccctggacggccatgggcgacagggtgcctgagctgaggcgcctgtaaaccagcaagccaagctcgccgttcagtcccctgcctgggaccgccacacaccgctgagccgctccccaccgtgcctctggcgactgctggtcctttaacaggaggcgcgcgtgctcctgggagttgtagtttatcagcttccgacgtgccccgcggtatctggactacagctcccgacgtgccccgcggaagcccggccaccgcccccgacgcgacccgcgccgcgtccgcggcggggagttgttgctgccgcgatgctggtggcggcggccgcggagcggaacaaggatcccatcttgcacgtgctgcggcagtacctggatccggcccagcgtggcgtccgcgtcctcgaggtggcctcgggctccggccagcacgcagcgcacttcgcgcgggccttcc

SEQ ID NO: 14906 - DNA, 2300 bp, Homo sapien
ctccaataaacttgtttaatcctaaacgggtcctattaagaattccttcgttatcttgtcgcgcttcaaggcccaggagaggcctgggcacagctcttggtgggcttttgttacattccagcctttgaagaagggcactggcttttcttctttagagtcctgctctgtcgcccaggctggagtgcagtgatgtgatctcagctcactgcaacctccacctcctgggttcaagtgattctcctgtctcagcctcccgagtagctgggactacaggtgtgtgccaccacacccggcatttttttttttttttttttgagacggagtctcactcttttgcccaggctggagtgtagtggcacgatcttggctcactgcaacctctgtctcccaggttcaagtgattctcctgcctcagcctctggagtagctgggattataggcacctgccaccatgcctggctaattttttttttttttttttttttgtatttttagtagagatggggtttcactaaattggctgggctggtctcgaactcctgaccttaggtcatccacctgcctgggcctcccaaagtgctgggattacaggtgtaaaccaccgatcctggacagctttttaagcttttaatattgaactaaccactctgcactgaaataattgttatggaggcctgcgttagtgagacctggcctgccacactctcacatctgtggggcgggtacaggagccccaggggccgaagaggcacacgtcgggcctctgggtgcacctcagcctgggggccaggacgtggggcagagtgcagccagggttctgactcctggggtggaagggagactcccagggcatcatgtctctacccaagtccagggggatgagccgctttttctcttcttagacccagtcccaagacccaagccaagggtgacccttcacactggcccaggcctctgcaggcaccttggctgaggctccccaagtatgaatggtaaatccttgcctccagcctcggcacagaggagcccagcacagacgcccccagcacagagtcccccagcacacagcccccaacacagagctcccctgcacacagcccccctgcacagacacccccagcacagagtcccccagtacagagcccccagcgcagataccccccatagcacagagcccccagaacagagacccacagcacagagtagccccccagcacagggccccccggcacagggatccccaagcacagggacccccccagcacagggatccccccagcacagggcccctcagcacagggccccccagcacagggacccccccagcccagggatccccccagcacagggccccccagcacagggcccccagcacagggatccccccagcacagggcccgcagcacagggatccagcacagggactcctccccagtacagggatccccccaagcacagagacctccagcacagggatccccccagcacagggccccccaatacagggatccccccagcacagggatgcccccagcacagggcccgcagcacagagccccccagcacaggcacagggacccccccccagtacagggatccccccagcagagagacctccagcacagggatgcccccagcacagggccccccagcacagggatccccccagcacagggatgcccccggcacagggcccgcagcacagagccccccagcacaggcacagggacccccccacagtacagggatcccgccagcacagagacctccagcacagggatgcccccagcacagggacccccagcacaggttctcctccagcgcttgtcaaaggtgggccctggggctccgaggaccctgctcgcacatcgccgctgaccccgcagggcccctgggtcctcgccgccagcagtctgagtgcggtgccccgacactgacatggcctccaggcagcaacggccttcccgggcagcagggcgcctcgtccgccttggcctcgggcctccgggggctggggcggggttgctggcggctccgcccccgcctgccagtttcccaaagggcgcaagcgccgcctccgccgcgtgtccggggtcagcccgagcccgtgcgggccctttaagggccgggggcgtgtagcgggcccgccccctccccgcggcgcccgcagtccgttaagtgcgagccccggcgcaggggccggatctggccgggggccggcggcggtgtgggagcggcgcgtcatgtacaccatcaccaaggggcccagcaagctggtcgcgcagcgccgcacaggtgcg

SEQ ID NO: 14907 - DNA, 2300 bp, Homo sapien
cgatcctggacagctttttaagcttttaatattgaactaaccactctgcactgaaataattgttatggaggcctgcgttagtgagacctggcctgccacactctcacatctgtggggcgggtacaggagccccaggggccgaagaggcacacgtcgggcctctgggtgcacctcagcctgggggccaggacgtggggcagagtgcagccagggttctgactcctggggtggaagggagactcccagggcatcatgtctctacccaagtccagggggatgagccgctttttctcttcttagacccagtcccaagacccaagccaagggtgacccttcacactggcccaggcctctgcaggcaccttggctgaggctccccaagtatgaatggtaaatccttgcctccagcctcggcacagaggagcccagcacagacgcccccagcacagagtcccccagcacacagcccccaacacagagctcccctgcacacagcccccctgcacagacacccccagcacagagtcccccagtacagagcccccagcgcagataccccccatagcacagagcccccagaacagagacccacagcacagagtagccccccagcacagggccccccggcacagggatccccaagcacagggacccccccagcacagggatccccccagcacagggcccctcagcacagggccccccagcacagggacccccccagcccagggatccccccagcacagggccccccagcacagggcccccagcacagggatccccccagcacagggcccgcagcacagggatccagcacagggactcctccccagtacagggatccccccaagcacagagacctccagcacagggatccccccagcacagggccccccaatacagggatccccccagcacagggatgcccccagcacagggcccgcagcacagagccccccagcacaggcacagggacccccccccagtacagggatccccccagcagagagacctccagcacagggatgcccccagcacagggccccccagcacagggatccccccagcacagggatgcccccggcacagggcccgcagcacagagccccccagcacaggcacagggacccccccacagtacagggatcccgccagcacagagacctccagcacagggatgcccccagcacagggacccccagcacaggttctcctccagcgcttgtcaaaggtgggccctggggctccgaggaccctgctcgcacatcgccgctgaccccgcagggcccctgggtcctcgccgccagcagtctgagtgcggtgccccgacactgacatggcctccaggcagcaacggccttcccgggcagcagggcgcctcgtccgccttggcctcgggcctccgggggctggggcggggttgctggcggctccgcccccgcctgccagtttcccaaagggcgcaagcgccgcctccgccgcgtgtccggggtcagcccgagcccgtgcgggccctttaagggccgggggcgtgtagcgggcccgccccctccccgcggcgcccgcagtccgttaagtgcgagccccggcgcaggggccggatctggccgggggccggcggcggtgtgggagcggcgcgtcatgtacaccatcaccaaggggcccagcaagctggtcgcgcagcgccgcacaggtgcgcacgggccggggaacgggaacggggacggggcggggcgcggcggcggctgaccgccccccggtgcccgcaggtcccacgcagcagcaggtggagggccggctcggcgagctcctgaaatgccggcagcccgcgccgccgacctcgcagcccccgcgggcgcagccctttgcgcagccgccgggaccctggcccctgtcgaggtgagacgcgcgcggccccggcccggcccggcccggcttcccctcccccgccggccgccctagagcggagggtgaccttggggaaatgttagtgaggtccggccacgtgctgcaggcggggcgggcgctccgggcgcggggggtgcgcgggtcctgcccactacgcgcccgcgggcctgcgcctcgcacttccgcctcacctggccgggcccgggcccccagcggggagaaagccggccagttcctgggtcgcaggggcctccagcgtccgaggtcggtgcttcgggcgaccttgggttgctgctggaaccctgacgtgcagcaggcccaggccacggttcgcggagagcgtcgggcgctggtcctcaagatctcccggctctgcccttgcagagctcagt

SEQ ID NO: 14908 - DNA, 2300 bp, Homo sapien
tcagggcagctacaggtgggggggtgccgagccaccctcagcctgccccctgcctacctctcagaaaggtgtggaggttccagcggggcgggggctctctggggctccatcctagtgaggtaagtgccctctaccagaggcgccttctggcgggaggtgagtgggcccctaggtgcttccagcatcccagctctgctgggacgctccgcggacatcacccttggtcctcgtggccgctctacttcccaggggaggaaaccgaggcacacctgtagccaccacctggtccccaggcagggagcatgaggctggagtggcccagggtgacgccgtctctcttaacctggggaaaccacctttcttctctctccaagaccccactgctagggagggcaggggtaaggctgtggcacagttaggaggagttagggaagaagatggaaatgcttcccagagttctccatgggaccccaagggtcccagtgggcaacaccaggcccactggctgttgtctctttttttttttttttttttttggagacagagtctccatctgtcgcccaggctggagtgcagtggcgcaatctcagctcactgcaacctctgcctcccgggttcaagcgattctcctgcctcagtctcttcagtagctgggactacaggtgcgtgccaccatgcccggctaattttatatttttgtatttcaccatgttggccaggatgggctcgatctcctgacctcatgatccacccgcctcagccccccaaagtgctgggattacaagtgtgagctaccgcgcccggcctgttttcttaaagtccccatgtgaggtcctctgtcagccagtgggacctgtgggagttgagtgggcttcaccccgtgtgcagtggggctagaggagccctgggcagggcaggatgtgtgctgccctctcctccctggggtcacccaccttcccacccccaggccccagcgctgggagcttctggcagcagtgggatctctgcatgaagcccccatcctgctcctgcaccttcttggggcaaccaccttccctctgtttctttttttttgaaatggagttttgctctgttgcccaggctggagtgcaatggcaggatctccgctcaccgcaacctctgcctcctgggttcaagcgatcctcctgcctcagcctcccgaatagctgggattacaggcgtgcactgccacacccagctaatcttgtatttttagtagagtcagggtttctccatgttggtcaggctggtctcaaactccctacctccggtgatgcgcccacctcggcctcccagagtgctgggattacaggcgtgaaccaccgtgcttggccaaccaccttccctctgaaccaccccaccccatgctgccacccacctcgctgttttttacttcatttaatttttttctttttgagacaaggtcttgctctgtcacccaggccggggtgcagtggtgcaatcatggctcactgcagcctcaacctcccaggttcaagtgatcctcccacctctcgacttcctgagtagctgggatgacaggcgagcaccacacctggctcatttttaacttttatgtagacaggtctcactatgtggcccagggtagtattcaattcctgggctcgagcaattctcccgccttggcctgtggaagcgttggggttataggtgtgggccaccgcgcccggccctgccctgccttttcttctccttggtgctttttgctactcctcatctctcactgactgggcgcgggaggggggtgtcggggtccctgcacatctcctggtgcacccagagggtcaaggcttgtcacccatgatgtatgctggctctggttcctgccaggcatgggtctgggcactgcccacgacagtgacagaccagataaaccttggtttgtttttttaatttttatttttattctgagatggagtctcgctctgtagcccaggctggagtgcagtggtgtgatctcagctcactacaagcttcaccttccgggttcaggccattctcctgcctcagcctcccgagcagctgggactacaggcgccctccaccacacccggctaatttttttgtgtttatagtagagacggggtttcaccgtgttagccaggatggtctcgatctcctgacctcgtgatccacccacctcggcctcccaaagtgctgggattacaggtgtgagtcaccgcgcccggccacctttgtttgtttttgagacagagtcttgctctgttgccaggctggagtacagtggcgtgatcttg

SEQ ID NO: 14909 - DNA, 2300 bp, Homo sapien
gtgagctgagctgccgatggcttggggactgcaagagaggcctgggccaccggctgctgtgggtggctgctctctctggttcaggaagtgcctaggctggccaagtctggggaaagtgggctggcccggggctgctcctgagttctgccaggcagcaccgcacctgggatgggcaccaaccatgtccgtctcctcccttcctgcagtccagggccaaggcttgtgttcaatcgtgtgaatggccggcgggccccctccacgtccccatccttcgaggggacccaggagacctacacagtggcccacgaggagaatgtccgctttgtgtccgaaggtagcgagcggggccagagggtgcggcataggctgctgggtcgcaaaaccatggacccgggatggccccacttcaagctgacccacagccgctgcatggctgtgcttttccttggcactctgcccttgtgtcctgtgaccagccctgtgtggggctggagtccagggtgaccatcaggccctgggtgggcgatggggtgcctgggacctggctcagcccgactgccctcctcccacagcctggcagcaggtgcaacagcagctggatggtggcccagccggtgagggcgggccaaggcctgtgcagtacgtggagaggacccccaatccccggctgcagagtgagccccccaaccctgtccccccaggagagaccccccagcccctctgatcctgacccaggccctgccaggttcccaccccaggggatgagggaggggactcttgtgcagaaaccccttcttcccagcgcctgccgcactcggagtccgggtgagcggcttgtggttagctccaggggagacttgccggctggcctgggaggcagcatcactgcccagccttctctgcccacagactttgtgcccattgacctagacgagtggtgggcgcagcagttcctggcgagaatcaccagctgttcctagtggctgctgggagggggcgctgctacacggccgacctgtcgccaggagagaagcatggcgccctgcccacccactgcgcctggctgggtgccggccacacctgaagtgccagcatttggacttttgcacctttttttcccttggcccggctgtcccaaccaagctgccatggccaagggccgaacccgtctgacctcagccctgctcactgtgcccagggaccagcgaccagcccctggggctggcagggaggagctccaggctaataaagtggagaaactgtctttttggagtgtctttgacttgggagggtgtagggggggttctcatgtccagttccagtccacagcctgggacgccaggcccagcacaaactccccttgtagccctgttccttcaagccgttagcttctcacccagctgccctgcgacaggtaggagggacgttagccagcccaccttgcttggaagtctggggaccccacttggttcctctttcctctcccgttggcgttgactgggaccgaagccgagactcaaggcctaaagacattaaatggccccggagtgcagtccaccaccccccactaccggcactggggctgtgtctcagaacgccaggtcccattctgaatccgccgggcccggccgcaggacactgggcgaaggagtacgtggggaacctgataggacgaacgtgggaaccagcccctccgcgggcgcccgcactaccttccctgatggacggggatgacccagcccacctgagtcaggacccagggtacccaggtgtggagcaggggcctctggacggcgagagagcggcagggtgaggcccggccgtccgtggcatggccaggcctcagcgcgacctcgcctcgctgcttgcatgcggcgggagccccggccggccgaggcgctgacaggtgggcgcggcggaggatccgcaaccggcgcgggcttcgaagccggtcgggctaacagggggctgccttgggaggcccgcggggcaaagggcagcgggattcgcggctggagcaaccctggaggccgctgacgtgagcggggtactcccaccggggaggtcacgtggccagggcgccgccatgacggcggaagtaatggcggaagtggcaccgttgccaggcagccgttgcctggcgtcgcggggcgtactctgcgctgggcgcgcggaggcctaggcgggaagctcgagcggcggcgccatggcccgaggtagcgcgcggctggcgggggtcccgaggatcccgggttccggggttccggggtccagggtcggcggccggagcgctcagggcc

SEQ ID NO: 14910 - DNA, 2300 bp, Homo sapien
gcctcagtggccttgggcccttgtcaggccctgctgggtgcctgctctgagtgtttgggggccctttggccttttgttacccccaccccggagtttcttgcactggaggcggggcttagaggacaggcgtctgtgcatgtgtgtacacgtgtctgcttgagtgttccagctgttcttttgacacatgcagcctgtgactcgtgtatgtagtgtgtgcagggtgtgtgttctctcttgcccctgggtggctgtgtgcccaggtgtgtgtgccaggcctgccaccccctctccctgggctggagtgggaggtgaggctgacctcccggcagccaggaggggcctggcgtagcaccggtcctcagccccccgcccccttgtgccaggccctgtggaccccagacggggcggctgtcgtgtacccctgccatgcggtcatcgtcgtcctgctcgtggacacgggggagcagcgcttcttccttggccacacagacaaggtgggtgctgcccgggcctggggcagctcacacctgcagcccctacaccctccctcacccttctgcctcctaggtctccgccctggcgctggatggcagcagctcactattggcctcggcccaggcaagggcccctagtgtgatgcggctctgggacttccagaccgggcggtgcttgtgcctgttccggagcccaatgcacgttgtctgctctctcaggtgagcacaggtctgccccatgcagggggagggggtcagcccaggcgacaatgaccacctcctccctgttcacagcttctctgacagcggggcccttctctgcggggttggcaaggaccaccacgggaggacggtaacagggccctggctgcgggttggggtggggctgtcctgatgcacgcagacagctggaagggtcttggttttctgaaactccagcttcatgtgaccctgggtccctgctctgtgtcctccctgtggtggggctccctgcactctggtgttcatgccgcccccgtgccctgcacaaaaaccaccaccagcagctcacatttcacgtctcggcttttcggccatcggagtcggtttaagccagcgtttacacacctcgcctcgttctctctgctggtgatgcggttgtaagattttcacgtggcagagcccctgcagctgacccacgcttgggcatcaatggcacctccacacagccgaagcacccggcatcttggtgggggcacctttttaaacattttttttttgagagagagccttgttctgtcacctaggctggaatgcagtggtgcaatcatagctcactgcagccttgaccccctccctgacctccccgccagctggactccagccatcctcctgcctcagcttcccagatagctgggccacaggcgtgtgccaccacacctggctaacttttttttttttttttttttgagatggcatcttgctctgtcgcccaggatggagtgcagtggcgcgatcttagctcactgcaagctccgcctcccaggttcacaccattctcctgcctcagcctccccagtagctgggactacaggcgcctgccaacatgcctggctaattttttttttttgtatttttagtagagataggctttcaccttgttagccaggatggtctcacgttttgtttttttaactttttgtagagatagggtttcattacattgctcaggctggtctcaaactccagggctcaagcagtcctcccacctcagcctcccaaagtgctgggatcacaggcatgagccactgtgcccagccacgagctgctttttatccaccttccggcttgcgggggggtttgtacttctctgcgaatgggttgcagtgctcagcattgcgggtctctgtagaagtcccaaagcttcaggatgagaagatggaggggctggtttccttccactctccacggccgcacgctcagaggctggtctccgcatgagagaaaagccacctccgggtggggctcggctgggccttgcagaatcgaggtggccccgactggccctgccgtgcgggctcagcctgggcttgttgcagatggtggtggcctggggcaccggccaggtgggcctcggtggcgaggtggtcgttctggcaaaggcgcacactgactttgacgtccaggccttccgggtcaccttttttgatgaaaccaggtgatgcagccgcccatccacgatgttgggagagggtctgggcccggagtgggggccgaggcccgagcacctccccctggcttggctgtgcgtctctgcgtctcccggtg

SEQ ID NO: 14911 - DNA, 2300 bp, Homo sapien
cttggtgggggcacctttttaaacattttttttttgagagagagccttgttctgtcacctaggctggaatgcagtggtgcaatcatagctcactgcagccttgaccccctccctgacctccccgccagctggactccagccatcctcctgcctcagcttcccagatagctgggccacaggcgtgtgccaccacacctggctaacttttttttttttttttttttgagatggcatcttgctctgtcgcccaggatggagtgcagtggcgcgatcttagctcactgcaagctccgcctcccaggttcacaccattctcctgcctcagcctccccagtagctgggactacaggcgcctgccaacatgcctggctaattttttttttttgtatttttagtagagataggctttcaccttgttagccaggatggtctcacgttttgtttttttaactttttgtagagatagggtttcattacattgctcaggctggtctcaaactccagggctcaagcagtcctcccacctcagcctcccaaagtgctgggatcacaggcatgagccactgtgcccagccacgagctgctttttatccaccttccggcttgcgggggggtttgtacttctctgcgaatgggttgcagtgctcagcattgcgggtctctgtagaagtcccaaagcttcaggatgagaagatggaggggctggtttccttccactctccacggccgcacgctcagaggctggtctccgcatgagagaaaagccacctccgggtggggctcggctgggccttgcagaatcgaggtggccccgactggccctgccgtgcgggctcagcctgggcttgttgcagatggtggtggcctggggcaccggccaggtgggcctcggtggcgaggtggtcgttctggcaaaggcgcacactgactttgacgtccaggccttccgggtcaccttttttgatgaaaccaggtgatgcagccgcccatccacgatgttgggagagggtctgggcccggagtgggggccgaggcccgagcacctccccctggcttggctgtgcgtctctgcgtctcccggtgggtcagggcgctgcgagctgcggcagtgctcagtcctcattccttgcaggatggcgtcgtgcgggcagggcagtgtgcggctctggcggctgcgtggcggggtgctgcgttcctgccccgtggacttaggggagcaccacgcgctgcagttcaccgacctggccttcaagcaggcccgggacggctgcccggagccctcggctgccatgctgtgagtccctgcccttccccacggcctgccccggcatgggggccctggtgcctgggcctccccttccctgagggcctcaccttccctgccgcctcctcgggcagcttcgtgtgcagccgcagtggccacatcttggagattgactgtcagcgcatggtcgtgcggcatgcccgccgcctgctccccacacggactccaggcggtccccacccacagaagcagaccttcagctcaggtaagagggcgcccaccacgtggccagggtggcagggacaccgaggcactgacgcctccctgcccccaggccccggcattgccatcagcagcctcagcgtctccccggccatgtgtgctgtgggctctgaggacggcttcttgcggctctggcccctggacttctcctcggtgctcctggaggcaggtgatgctgtgggcacgctctcccaactccgggagagcctcgcctggatgctggggcggggaaggcccagtccccggggctctgctgtcagccgccctggctcctggctgcacagggtgccacggggccaagtggcatatccagagccctggggcggctgatgccagggcggcccgcggggcagcctcacggaagggcccggtgggacgtgggtagtgtgtgaagcccctcagcctgggtcccgcctagcctaagagtggtggcctcgagggagctgcatcttgcagccgtgtggagcctgggactttgagcagcagggagtgcatttgctggggtgtcggggacccgaagcctgagcatgcggctcaccccggggtggccctggaggcccctgaccccaccccacccacagagcacgagggccccgtcagctcagtctgtgtcagccccgatggcctccgtgtgctgtctgccacctcctcgggccacctgggcttcctggacacgctgtcccgggtgtaccacatgctggctcgctcccacaccgccccggtgttggccctcgccatggagcagaggcgggga

SEQ ID NO: 14912 - DNA, 2300 bp, Homo sapien
cctccctgcccccaggccccggcattgccatcagcagcctcagcgtctccccggccatgtgtgctgtgggctctgaggacggcttcttgcggctctggcccctggacttctcctcggtgctcctggaggcaggtgatgctgtgggcacgctctcccaactccgggagagcctcgcctggatgctggggcggggaaggcccagtccccggggctctgctgtcagccgccctggctcctggctgcacagggtgccacggggccaagtggcatatccagagccctggggcggctgatgccagggcggcccgcggggcagcctcacggaagggcccggtgggacgtgggtagtgtgtgaagcccctcagcctgggtcccgcctagcctaagagtggtggcctcgagggagctgcatcttgcagccgtgtggagcctgggactttgagcagcagggagtgcatttgctggggtgtcggggacccgaagcctgagcatgcggctcaccccggggtggccctggaggcccctgaccccaccccacccacagagcacgagggccccgtcagctcagtctgtgtcagccccgatggcctccgtgtgctgtctgccacctcctcgggccacctgggcttcctggacacgctgtcccgggtgtaccacatgctggctcgctcccacaccgccccggtgttggccctcgccatggagcagaggcggggacagctggccaccgtgtcccaggaccgtaccgtccgcatctgggacctggccaccctgcagcaggtggggtttggcaggggcagcacggcagggagggccgggaggtcctgaagctggggtttgtcagcgggggtgagaggggcctatagggacctggactttccagcctgtgtcggccccatgggtttgggccgcctggagagcccctgggcccttgagatccctgccctcccctcagcacggcccctgtcccacagctatacgacttcacatcatcagaggacgccccgtgcgctgtcaccttccaccccacaaggccaacctttttctgtggctttagcagtggggccgtgcgctccttcagcctggaggccgctgaggtcctggtggaacacacgtaagtgcccagctggccaccagccccacggagaccccacggtggaagctggggtggccaggtgggggtcatgtgcaggatggccagtgctggctggagccccaccctttgctgccccatggggacttccatggccaggctggttggctggaggtcgagggaacccatggtacctgggcttcggggctagggccagcggggtccctgtgtgtgctgcaggtgccaccgaggagctgtcaccggcctgaccgccacccctgacggccgcctgctcttcagctcctgctcccagggctccctggcccagtacagctgtgcggacccccagtggcatgtcctccgagtggcaggttgggccccctgcagccactctgggggactcctcagggcgggggaggcctggatctggtgcaggcccacacctggacacacatgccggtttcctggtgcaccgactgggtcctgtgggggggcgtggccgcctcagtaaccttgtcaaggccctgaggagactgtggtttagcgttcactggaccccaaggccagaggtcagctcgggtctgtgcccaggaggcggcaggcagcccaagctccaggtcagcagctggagtcagacccaggcatgggcacctgccctgtcctgcggccaccataacttgggccccctgagtggtcacttatgactactgctggcccacggggactcccagctcccctggcagcgcctggcgcccactggcaccttggcaatcctctgccggtgtgatgcgtctgtgctccggggctggtgtttcccgaaagtgggggcaggggcggcggcctcctcgggccctggccacgcgcaccccggcactccccacccagctgacccctgccccgtgtggccacagcggacatggtatgcccggatgcccccgcgagccccagcgccctggcagtcagcagggatggccgcctgctggcctttgtgggaccctccaggtgcacagtgacagtcatgggctcggcctcccttgatgaggtgagtccgcagccctcctgggtccagggagactgggccatgagaggctggctgcaggggcaggagggaggtcacggccactcgggagcaggacccaggccctgtcccgcctcctgtcgcagagtacacatcagccatgtggggcccacgtgcggccaggttcct

SEQ ID NO: 14913 - DNA, 2300 bp, Homo sapien
acgaggtggacaccagcaggtggcccagagctgcagggccaaagcacacagccatggctgagtccaggcggctgctggccaggtccagagtgccgatgtcaactcgcagcagctgggggtagtggtaagtggccgacagtcagggcccctgggcagagccggtgccacccagggtcaggctcgggagggaggtcccggggacacgcactcggcacccaggcagcacctgccctgcacaggaacctggccgcacgtgggccccacatggctgatgtgtactctgcgacaggaggcgggacagggcctgggtcctgctcccgagtggccgtgacctccctcctgcccctgcagccagcctctcatggcccagtctccctggacccaggagggctgcggactcacctcatcaagggaggccgagcccatgactgtcactgtgcacctggagggtcccacaaaggccagcaggcggccatccctgctgactgccagggcgctggggctcgcgggggcatccgggcataccatgtccgctgtggccacacggggcaggggtcagctgggtggggagtgccggggtgcgcgtggccagggcccgaggaggccgccgcccctgcccccactttcgggaaacaccagccccggagcacagacgcatcacaccggcagaggattgccaaggtgccagtgggcgccaggcgctgccaggggagctgggagtccccgtgggccagcagtagtcataagtgaccactcagggggcccaagttatggtggccgcaggacagggcaggtgcccatgcctgggtctgactccagctgctgacctggagcttgggctgcctgccgcctcctgggcacagacccgagctgacctctggccttggggtccagtgaacgctaaaccacagtctcctcagggccttgacaaggttactgaggcggccacgcccccccacaggacccagtcggtgcaccaggaaaccggcatgtgtgtccaggtgtgggcctgcaccagatccaggcctcccccgccctgaggagtcccccagagtggctgcagggggcccaacctgccactcggaggacatgccactgggggtccgcacagctgtactgggccagggagccctgggagcaggagctgaagagcaggcggccgtcaggggtggcggtcaggccggtgacagctcctcggtggcacctgcagcacacacagggaccccgctggccctagccccgaagcccaggtaccatgggttccctcgacctccagccaaccagcctggccatggaagtccccatggggcagcaaagggtggggctccagccagcactggccatcctgcacatgacccccacctggccaccccagcttccaccgtggggtctccgtggggctggtggccagctgggcacttacgtgtgttccaccaggacctcagcggcctccaggctgaaggagcgcacggccccactgctaaagccacagaaaaaggttggccttgtggggtggaaggtgacagcgcacggggcgtcctctgatgatgtgaagtcgtatagctgtgggacaggggccgtgctgaggggagggcagggatctcaagggcccaggggctctccaggcggcccaaacccatggggccgacacaggctggaaagtccaggtccctataggcccctctcacccccgctgacaaaccccagcttcaggacctcccggccctccctgccgtgctgcccctgccaaaccccacctgctgcagggtggccaggtcccagatgcggacggtacggtcctgggacacggtggccagctgtccccgcctctgctccatggcgagggccaacaccggggcggtgtgggagcgagccagcatgtggtacacccgggacagcgtgtccaggaagcccaggtggcccgaggaggtggcagacagcacacggaggccatcggggctgacacagactgagctgacggggccctcgtgctctgtgggtggggtggggtcaggggcctccagggccaccccggggtgagccgcatgctcaggcttcgggtccccgacaccccagcaaatgcactccctgctgctcaaagtcccaggctccacacggctgcaagatgcagctccctcgaggccaccactcttaggctaggcgggacccaggctgaggggcttcacacactacccacgtcccaccgggcccttccgtgaggctgccccgcgggccgccctggcatcagccgccccagggctctggatatgccacttggccccgtggcaccctgtgcagcc

SEQ ID NO: 14914 - DNA, 2300 bp, Homo sapien
gcaggggacgccgtcttcctctgggatgtcctggcccctactgagaggcaagtgcctactctcagctgtgtctgcctaggccccccaggccctcctgaaaccctctctcctccctctccagcgaccaaagcttccccggggcccccccagcctgcaagacaggtgagtggctgtgctcagctggggtgcaggtgctgcgctgactctggggcccgtcctgtgtctgcctagtggcccttcctcttccttcccaaacatcacagggctgcttcttccccaggcccgggcgcaggaccgctggaggacgcagcgtccagggccagcgagctcccccggcagcaggtccccaagccatgtcaggcatctccaccacggctgggcgtctgtgccaggcctcccgaaggtggcgatggtgagcagcaggggtcctggaggagtggggggattcgggggtctgagagggcacaggcccagtggcagcaggtactcacgcacgtccagctctggggtgcaggtgccatcgctgctcatcaggtggaacacagtggggtcggggtgggggcagcttttcctctcctccttagcctcatcaggtggaacacggtggggtcgggatgggggcagcttttcctctcccccttggccccaggcaccttgtccccgtcagatgaggaaggaccctgtgaggagagctgtgaccccgaggggcttgggcaggcctcaggcccacctgtgctcacggaggaggaggctggcagggctggagacggggcctgggctgcggcagtgggctcctgggggcttgccctgcctccccgttcccccggccaaccccgtgagcagtggagggcagggcagggacgctggtgccggtgcaggggcctgaggacggtcggtgagtcccccgtgtgacgaggcaaggtcacctgcagtgggacacggtttgcctgcgtctgtggctccggcctgtgccccgccgtgcagttctcactgtgtggtagaccaggggcttgtggggagactgcgtgtagtgtggggtctctgaagagctcagggcagtgtaatgccacaagctctgcctcctccctgccaggcgccagggacaccaggaattcgggggccccacgcaccacctacctggcttcctgcaaggccttcacgcctgccagggtcagctgcagcccccactctgccaaggtggggagtggtttctgggagccctctttatccccagcaagcacagaggccccccgcagggctccccagcacctcctcagggttgcttttggtcgccaaaggtgatggctctggcccttgggcgcctgtcccctggaggcaacttcatcccacacccccacccctgccctccgctggcctccagacgggactctgtggtggcctcctgctgacctgccttcccctctcacccagcagctgcccttgatgagagccccacgggcctgtgcccctcctggccctggcacagtgcccacagctcccacacctcctaccccagcttccccgtctgcccctgggtgtcctctgcagctggcctgggtgtgccccaacacagcctcccatgtgcaggctttggggcacaggtggccatgctgggccccagcagcatccgggtctccttcctcgcagggcacttgcccgcctcccgccagcggtgggtggctgcgtctgaaggctgtcgtcggttacagcgggaatgggcgggccaacatggtctggaggccggacacaggtgggggccaagagcctacccccacccccagccaagatgcggccgcgcgtggtccagccgtctccaccccaaggccaggacctggtggcaaatgagcgccagccatcagtgtggggctctgttctcccggtagcgcctcctggcgctccagccgaggtcctgtgaagcactttggctactggacgctggggagggcgcagctgggacgatgctaaccccttggccccgccccacggctcggcccaggccccgccccctgttcggcccctccccaggcccctccccgcccccccccccccccggcccggcctcaggccccgccctctctgcgcacaggcttctttgcctacacgtgcggccgcctggtggtggtggaggacctgcactctggcgcccagcagcactggtccggccactctgcggagatctccacgctggccctcagccacagtgcccaggtgcccgcctgcatcgccctcctcctctcccagggccaccgtgcccggcagaacccagctcccggaccggtgcgggttctcaccaccaaaga

SEQ ID NO: 14915 - DNA, 2300 bp, Homo sapien
ggtgccctccctgcctgccggctccatctccaccagcccagatgattccaagtcctgccgtcactggctcgcagcggccgccttggggttcccagcggggaagtcttgggtgtgcacgtcccctcaaagccgtcccggttgtgtctgcacaagcgagccgcctggcaggccttgcaggtcttctcaaactgtcctttccctgctattgctttgcgtttttttgtttgtttgttttttgttttttgtaattgtcaaagaaatcacatcagtccgggcgtggtggttcatgcctgtgatcccagcactctgggaggccaaggcaggtggatcacctgaggtcaggagttcgagaccagcctggtcaacatggcgaaatcccatctctactgaaaatacaaaaattagccgggcctcttgatgtatacctgtaatcccagctactctggaggctgagacaagagaatcgcttgaacccaggaggcagaggttgcagtgaaccaagattgcaccactgcactccagcctgggcgacagagactccatctcaaaggaaaaaaaaaagatgaaaaaccccacatcgtctgtccctgcacctcccatagactggctttgctgactcagtctcatgggattgttctctgaggctcaagaggtcaggaggcccaggtagctactgggtcaagttctgctctctctgggtcaggtctgttcaggttctggttggtgttgggtctagtcctgtaaggcccagctctggcctgcagcctcctggtgctggagctgcgtctccaagaagtacacagcactcatctctctgggacctcctggtctggaagctctgtggcctcatggggttgggacagccaccgtgtcgccccctcacccgccagctgcagccttaggagaggtggcctcctgggcggaattggggcggcaggacaggtgccattccttcccctgctggaccaggttcctggcgtggcgttggtctagcagctgtggccatgggcttcctcctgtgggtgtaagagctctgcgtgtggtcagctgggccccacgggattgatttttccttgatgctgagtcccatcatccagttgcccctgggttgtttctttagaaacctgtctttagtatttggagatgacgatagccagcaaagaaagttgagtttgagacaggtgagggttgtttacttttctggaagcaggtttgctgaggtgtagtcgtcacagcacaagctccgtgtgtttcagggggtggcttttggcatattcagcagctttggaaaccccgtgcgtgcctagaggaaaccccgtgcgtgcctgttcctcggtcgctccctgcttcccgcctccccagcccctggcgaccgttgagtggctttctgtgtctgggtcttcccattcaggatattctgtaggaactggctcacctggcttctcaccctgagcatggtttccagggtcatcccagccgctgtgtgtgccaagccagtcatccctcttgatggccaaatactgttccattgtacggatagatcatgtgtgtgtccatccaccagggctgggaaattcgggtcctgagaccgtgacctgagcccgtggtcactggtggccttcctgtgatgtggaagtgcgaggaattctgggccccgcctgtgtggttctgcctgggcggttctgcctgggcctggactttgccgtttccttgtagggcccagggccctcccggggagatggactgagctgtcctggtctgagtccctgcagtccctcattgctcagctgaactgaattttttttttttttttgagacggagtttcttgtcgcccaggctggagtgcagtggcatgatcttggctcactgcaagctccgcctcccgggttcacaccattctcctgtctcagcctcccaagtagctgggactacaggcacccgccaccacgcccgactaattttttgtatttttagtagagtcggggtttcaccgtgttagccaggatggtctcgaactcctgaccccgtgatccgcccaccttggcctcccaaagggctgggattacaggcatgagccaccgcgcccggctgaactgatttttttttaatgaagtgcatcgtgttcccacttgcacttaaagttcacatttggtgccaggctgtattgcttcttctcactggtgagtggcagctgtgtctcctttctgccagtccagcagtcccagctgtcagtggcacctgcataatgacacgtctgcatttccccccaatcagcgtgcagcggttttgggaggaggaa

SEQ ID NO: 14916 - DNA, 2300 bp, Homo sapien
ggccgccctgagcagcagcggctagcggctggctacggtgacggctccctgcgcatcttcagcgtctcccgcacggccatggagctcaagatgcacccccacccggtggcgctgaccactgttgccttctccaccgatggtgaggagttgggtgtgttggggatggtgccgtcctgacctggcccaggtccagtctccgggctgggggctcacagggtgacggcatggtcccaggtcagactgtcctctctggagacaaggatgggctcgtggctgtgagccacccctgcacagggacaaccttccgtgtgctgagtgaccaccagggcgccccaatctctaccatctgtgtcacgtgcaaagaggtaaagcagccccaagagctggggagagggggcctgggtgctggtgggggcaggcaccatcttggcagaaggcacctgtcggccctcacccactccattcccagtgtgaagacttaggggtggagggcacagacctatggctggctgccagtggggaccagcgggtcagcgtctgggcctccgactggctgcggaaccactgtgagcttgtggactggttgagtttcccaatgcctgccaccacggaggtaaaccatgctcctggcactgtgggtggggccggtacccatccaccccaccgcagcatgctgcgcctttgcagactcagggccacctgccaccctccctcgctgccttctgcccttgggatggggcgctcctgatgtacgtgggccccggtgtttacaaggaggtgatcatctacaacctctgccagaagcaggtacacgcagctgcccgcgtgtcactgggagccccagggatccagggtggtgggtggggcctggctgagccctgagcccacaggcctggagcctcacgctggctgctcacaggtggtggagaagataccactgcccttttttgccatgtccctgagcctgtcccccgggacccacctcctggctgttggctttgctggtgagtgctggtggatgcagtttgggcctgtcttaggtgggggccaagtgggctgactggtgccctgttccaagacaggtgcctcacctgtgccccgggctcctcgtctctggggtggggtgaggacatctgccctagagagggtcctggagtcaggagatgatgaggcaggtgaggaaccaggcacagcgcccagcacagggcctgaatgcacgggtggcagcgacttttaaggagggaactggcccagctgcaggccgacagcctggcagtgatggaccccctagtcccagtggcacgtggagggcacagccaggagcccttttagcaccagctcccccgaccagcatcatgcccagtggggacagtctgggtgggttgggggagccctctgagtgctgcctggtcctggccctggcccacctgcaccgtctacccacagagtgcatgctgaggctggtagactgtgccatggggactgcccaagactttgccggccacgacaacgcagtgcacctgtgcaggtttacaccgtccgccaggctgctcttcacggccgcccgcaacgagatccttgtgtgggaggtccccggcctctgagatgcagcagggactgtggtggtgggcatcacgcctggtcatgccaggcacctggacacaggcttggcagaggcgccaggttgtcaatggcctcatgctgggacaggccaggattcacgtaaatcgcctggagcaagctgttgtaaatttggcgccctgtgaatactttcatacctgttgcccttttgcctaagaaatctttaatgtttctatcttgtaataaacatgggcatttattgcattattgctgcattgttgcactggctgtctctggtcactcctggcctgagctcagcctctgcccgtcccttaatcggctgtttgtcaaggcccctgtggtgccgtgaagcaatggccgctcggcctgccagggcgccaggaccctgcgctgtccgccgtggccggcgcgtccacacggtggcgcgccgcacagcctgtccgctctggcccgcccggctcgctggtgcggctgtgcgggcggggccggaagtgtggggacagcgcggggccgagaaccggaagtgcggggcgggcgcgggggcagagcgaaaggcttgaggaccaggtcggggccgggttccgggtcggggagcggctccgggcggcagctatgaggcgggacgtgcgcatcctgttactgggcgagggtaggcgccggcccgggggtctcggagctgcggcggccgtgaggcgggg

SEQ ID NO: 14917 - DNA, 2300 bp, Homo sapien
ttgtggactggttgagtttcccaatgcctgccaccacggaggtaaaccatgctcctggcactgtgggtggggccggtacccatccaccccaccgcagcatgctgcgcctttgcagactcagggccacctgccaccctccctcgctgccttctgcccttgggatggggcgctcctgatgtacgtgggccccggtgtttacaaggaggtgatcatctacaacctctgccagaagcaggtacacgcagctgcccgcgtgtcactgggagccccagggatccagggtggtgggtggggcctggctgagccctgagcccacaggcctggagcctcacgctggctgctcacaggtggtggagaagataccactgcccttttttgccatgtccctgagcctgtcccccgggacccacctcctggctgttggctttgctggtgagtgctggtggatgcagtttgggcctgtcttaggtgggggccaagtgggctgactggtgccctgttccaagacaggtgcctcacctgtgccccgggctcctcgtctctggggtggggtgaggacatctgccctagagagggtcctggagtcaggagatgatgaggcaggtgaggaaccaggcacagcgcccagcacagggcctgaatgcacgggtggcagcgacttttaaggagggaactggcccagctgcaggccgacagcctggcagtgatggaccccctagtcccagtggcacgtggagggcacagccaggagcccttttagcaccagctcccccgaccagcatcatgcccagtggggacagtctgggtgggttgggggagccctctgagtgctgcctggtcctggccctggcccacctgcaccgtctacccacagagtgcatgctgaggctggtagactgtgccatggggactgcccaagactttgccggccacgacaacgcagtgcacctgtgcaggtttacaccgtccgccaggctgctcttcacggccgcccgcaacgagatccttgtgtgggaggtccccggcctctgagatgcagcagggactgtggtggtgggcatcacgcctggtcatgccaggcacctggacacaggcttggcagaggcgccaggttgtcaatggcctcatgctgggacaggccaggattcacgtaaatcgcctggagcaagctgttgtaaatttggcgccctgtgaatactttcatacctgttgcccttttgcctaagaaatctttaatgtttctatcttgtaataaacatgggcatttattgcattattgctgcattgttgcactggctgtctctggtcactcctggcctgagctcagcctctgcccgtcccttaatcggctgtttgtcaaggcccctgtggtgccgtgaagcaatggccgctcggcctgccagggcgccaggaccctgcgctgtccgccgtggccggcgcgtccacacggtggcgcgccgcacagcctgtccgctctggcccgcccggctcgctggtgcggctgtgcgggcggggccggaagtgtggggacagcgcggggccgagaaccggaagtgcggggcgggcgcgggggcagagcgaaaggcttgaggaccaggtcggggccgggttccgggtcggggagcggctccgggcggcagctatgaggcgggacgtgcgcatcctgttactgggcgagggtaggcgccggcccgggggtctcggagctgcggcggccgtgaggcggggtgagggtctcgggggtcggggggcgccgtgaccttggccctcgcgctgaccgcctcgccccgcgcagcccaggtggggaagacgtcgctgatcctgtccctggtgggcgaggagttccccgaggaggtaaggggcacgcccgccgcgggggtgggagcgggcccagccgggggtccctggtgagcgcgcgggtcccttgcaggtccctccccgcgcggaggagatcaccatccccgcggacgtcaccccggagaaggtgcccacccacatcgtggactactcaggtagcggccgtagcctcccgggggcccggcccgcagcggtccggcgggcctgctgggtccgcagtggagtctctttgtccccctagaagccgagcagacggacgaggagctgcgggaggagatccacaaggtacccgtggtgcgcgggacgagggaggggctgggcgcgggctcggcctaatccgcttcgcagcctgggggattggaccgaggtgctccgggtgtccttggccctgataattctgtgacctccgcactgagggttgtcggggcccctacagcgcaccc

SEQ ID NO: 14918 - DNA, 2300 bp, Homo sapien
tgccctcctcggggcacttccctgaggctgttcccactttcccagtgttcggccaagaacctgaggaacatctcagagctgttctactacgcccagaaggccgtcctgcatcccacagcccccctctatgaccctgaggccaagcaggtgagcatcggctggggccccgcacgctggttccccaggggcccagggggtgctgggtggggcggtgtggcaggtcggcgtgggtcacctgagggtgctgagccaacatccccacagttgaggcccgcgtgcgcccaggcgctgacgcgcatcttcaggctctcagatcaggacctggaccaggcgctcagtgacgaagagctcaacgctttccaggtgtgcccctgccccaccctcggtgcccagcccccttgaacctccgctgccgttagtgactggaacgggtcgtctccgggtggctggctgactcccaacaacgttctctcggaagcagaaatcctgctttgggcaccccctggccccgcaggccctggaggacgtgaagacggtggtgtgcaggaacgtggcgggcggcgtgcgggaggaccggctgaccctggatggtgaggccgggtgcccgcctgtgcctggggagtgtggggagggggctgtgcctggtgctccccctgctttgtctcggtgcaggtttcctcttcctgaacacgctcttcatccagcgcggccggcacgagaccacctggaccatcctgcggcgcttcggctacagcgatgccctggagctgactgcggactatctctcccctctgtgagtgatgccggggcttgaggcctgccctccccgagggtcaggagctgactgccgactatctctcccctccatgagtgacgctggggtttgaggcctgccctccctgagggtcagtgaaggtctcgctcagcaggccatctggggtcgtgcccttgcctggctgtgccctgaacccctcagcatccacagagctctgagtcggggggtgggggggctggccctttgccaaccccgctcgcgtggcttgtttaccctgctggggtcggcagcttggggtgtggcctgtgggcctcagccaggcctcccacgtgctggagccaggtgggcaccctcctcccctatcgcagctgcaaggtcgggggcgtacaggagcctctgggtcctgtagggagggtccggctgcaccgatggggctggcagggtgacagatgggctgagcgtggtgctgcagagtctcctgggagctagacgggctgtggcctccctgcaggatccacgtgccccccggctgcagcacggagctcaaccaccttggctaccagtttgtgcagagagtgtttgagaagcacgaccaggtgagagcatggcgagtcccctgcccctgcccccgccccctccccggcacacacatcaccacatccctccttctgcaggaccgcgacggcgccctctcgcccgtggagctgcaaagccttttcagtgtgttcccagcagcgccctggggccccgagctcccacgcacagtccgcacagaggccggccggttgcccctgcacggatacctctgccagtggacgtaagtgcggcccacaccatgcccgcctgccgcaccaccctccccaccataacactgtgcctgcctcccgcccacccccagcctggtgacctacctggacgtccggagctgccttggacacctaggctacctgggctaccccaccctctgtgagcaggaccaggcccatgccatcacaggtaggcacccaccctccctgggcctgggcccagtatcctggcagctgccctaacccgtgtctatcctcacagtcactcgtgagaagaggctggaccaggagaagggacagacgcagcggagcgtcctcctgtgcaaggtggtaggggcccgtggagtgggcaagtctgccttcctgcaggcctttctcggccgcggcctgggggtaagcaccctagactcccccaccaccccaggggctccaggggcagggcagggcaatctggggggcactgcagccagcgagtgtcaggacttcacctccctcagcaccaggacacgagggagcagcctcccggctacgccatcgacacggtgcaggtcaatggacaggagaagtacttgatcgtgagtgctggggcggcgcggcctgtgcccgagggtggacccggggacacccaggcctgcctggcagatctggcccagcatggccctagggggaccgagccccagggacccttcctaaggccgctgtctgtcccagctctgtga

SEQ ID NO: 14919 - DNA, 2300 bp, Homo sapien
aggcccctggtacccaagccccctcccctgacctgggtgtgcctcgctgctggggctctgcaggggcagcacagctggggtgcaggccaggctgccactccgggaacgcctttgcgccgggactttttgtttctgaaggcagtcgatctgcagcggggccttatgctgccatgcactgccctggctcctgccggacccccagggtgggccgtggcaggtggctgagcaggagctcccaagtgccggccaccgctgtcagggattgcccacccctgggcatcatgtgtgtggggccggggagcacaggtgtgggagctggtgaccccagacccagaattctcagggctctacccccctttcctggtcctaggtggccagtgggtatgaggagggctggaaggcagagctttgggccaaaagcaggcgttggggggtcccccctcaagtttggagccgtttccgtggttgtagcagaggaccggaggttgggttcctgattaaacttcactgtgtgttttctatctcggatcccagtctctgaagacaacttgctttgattcaacctagaatgtgttgtttgtctttatgtgggctggaaacgccacccctcctttcattcctgggtcactgttctgaggtctcaggcgtgtgcatatggcctctggaaggtccactctgggctgctgtggcctgggagcccagtgtccttggaggtcctgcggtctgggagtgggagcccactgcgggaggacggtgcgcgcccggcatggactggggggcgccggtgcctgagatgtttccccggtgactgaccccttctcagggtccagtgtgccctggcactgcccactcactccccagagcgtcctgccagcctggctgagctgcgccgagaacctgggcttgtgtgaccagatgtggtcactgcctgccacagaacggggtgaccctggggccctgacctgagggaagcaggatgggccagagggagggacgggctgggagttgagcccagatgcctgcttctcgggacccagggcgtggccttcccaaggtcacccggacaagtatcagaaggcctggtcccccccctcccatgtctgcctttagggagtggcaggtggggccccttcccaagtcctggcccacacgggccctgccttggagcttgtggcattggcccctgaggtccctcccgactgatggtatttgagcccgctgtacccccacggcctgtcttctgggactactgcaaccctaggagaagccctctgagtggcccttgcaggggctgccatagtcacacgtgtcttatctgtcacctccattgtggaggggttggcccgccttcccaggagcaggtcccctcatcccaactgcagccctgccccctgggggttctgctctgtgttggaatgccccttgtgcccagccctggcgccgccttagggcgggaggttttgctgtcctgcatggagttgcaagagtggtcaggggcctccagcccagggtgtggacgagtgggctgggcttggtcgtcagagccaaggcggctgcagcagcgtcttcctcctcctaagaggcggctgtagtggccatgcgggacgagggacttccttgctgctgcgctcggtggggggttgcggggggagggggtgtgtctgctgcaagcagggagctccagccggtggcaacatgaaccgcagggagtactgggtcagcctggagggggagcaagcagtggtcagggaaggcttcctggaagaggtggcatcctcacaggcctgagcccgggaaggctgtgagagggcgaacggtcttgcatggggggttttaggtgccccccatccccgtgactccatttaccagcggctgccgtggaggtagtccagtgtgctggagctgcgccagagcgggggtgggggccggcgctgagacgcggtgctagctggaggcggttcctgtccggggtgtgcgtccgcgtgcagggtgcgcgcgtgtcttggccgcgcgtggcggcgtgtgcggcaggggcgggcaggcgggcgactcggtgacgcggcccaagcgcggcgccgagcggagcgggcggagcgggccggctggggcggagcggagtcgtccgcagagcagcccctcccggccgcggccgccgaccccggaccccggcccccggccaggctctatggacaggagctcgctgctgcagctcatccaggagcaggtgcgtcggggggtggtctggggagctggcaccgcccccaatgcggccctcctgccgctgagctgagcttgtgcgg

SEQ ID NO: 14920 - DNA, 2300 bp, Homo sapien
acgacctgctgggcgcccacatccccccaccgccctgaccggctacctgaggctgcacaggccagggctcgggcatgtggtggccgcccaccaggggccttcacgtctgccctttgtgaacggacgtctcagggctgctgtgccccttgggtgtgggtggcctcaaaggaggccctgtcccagccacccaccccccactcccaggacttgcggtctgagcctttttggataattaataaatattttacacagcaccagggggctgtcccgggctctggagactcgtcagggcccccacacctgctgcacagaccgcgacggccctccccaccacgggggcctggacttccctccttgtgcatctctgcacctggggtcaggcgtgggagttgttcctgggccacaggtgctgtgtctgtgggagctgggggcacgcgggatggctgggggccgggcgtgtggtcaggccaggtgtgtggtcaggccgggtgtgtgatcaggcgtgagtttgggaagtgtttattgagctcccgtagtggccagcctcctcttcagcctccctgccgtccagtgagacccggaggcctgaggttctgtggcaggtgagcaggcctgggccatggccaagtttactcggcctgggttccatgcttcttggctggcctagcatcctcgtgggtggccaggctggggccaaggttgggcagcaggtctgggcacagcctctgccccacagcccaggtccacagtgctgtctccactaggtagggagtccactgtcctgaggcactggctagggaggggcacacggactcaggcccaggggcacgggccaccccaacctgcccacacacagttcattccccttggctcagagctgtggcccgctcttgaacctggcccaggtacagcaggtagtacctgagggtgtactgtggggccggccagccgggcactgtggccaccgcctcatctgacatgaaggcctccatctctggagctccagctgccaggactgctgtgaacagcgaggagaagcagccagacacaccccatcaggacaagctctgggagaccctgctcccagcagcccagggccctatggttcctgctcctagcgacacgcaagggcccagactgcccgcttcacagacaagaacgcctatgtacccaagtcgtgcccacccaactcacccgaggctgtggtgggcccacaccgcagagggcacacagctcggtgactgcagcccccacatctggcaggaggcagaaggtggcggtcgaacagtgcacaaccagctcagggggattggtggccaccagctgctgcagacgtggccggaagcgcccctctgtgggaggccaggtcagggtgcctggggtgctggacccaccagggaggccccgcccccactggagacacccgccccgccgatgccacgccccaatgaagacccgcgctacggaggccctgccctcggggcgggccgcccttcacagtcaagctgccaggccagcagccgctccagctccctgtcacatgcttctctgctctgcccctgatggccgctggcaactcttcccgatacctgaggaagggcggtgaggggaggactggccacggaggacgctcgccccaccgatctctatccccttccactctaccaacagtccggggcttccagccgccctcgggggctcgcgctcgcccgtagcacctctcgtggcgctccagaatggcagcccagcgactggggtcctcacaccccacagcgcgtgggaagccgctacgttcacgcgcaggggcgggaggcggcggctgggggcggggcctctgctgatggggccgggtgctgggggcggggcctctggattgggcggttgctgggggcggggcctctgcggatggggctgggggcggggcctctgctgatggggccggcggctgggggcggggcctctggattgggcggctgctgggggcggggcctctgcggatggggccggctgctgggggcggggcctctggatggggccggctgccgggggaggggtctctgcgcgttgggacaggggcggaaccccaggtggtcgggacaggctgttgcgggagcgcgccctcagcgaagcaagtgaggcatctcactgggaaagtcgaatgtgtgtggcggccgccgccgaggcgggttccgaagagacctcagcagggcaggccagggcctacgcgaacgcccacccttaagagcgcggggacagggaactggagcgttcctcccagcccccgacgtcgcgggcccagt

SEQ ID NO: 14921 - DNA, 2300 bp, Homo sapien
tgatgggagaggggtgggggtgtcccagacgaccctgaatgcccgccccattgtcgggcagataacgaggaaaccgagggcagcgacgtacctgccgactacctgctgggtgacgtggaaggtgaggaggacgagctgtacctgctggatccggaacacgcgcaccgtgagtgggggtccgggcagggtggggttcagaggcggatggaggacagactcagagcctccgctggtccctgccttccagccgaggaccctgagtgcgtgctgccgcaggaggcctttccgctgcgccacgagatcgtggacacgcctcccgggcccgagcacctgcaggacaaggccgactccccgcacgtgagcggcagcgaggcggatgtggcctccctggcccccgtggactcctccttctcgctcctgtctgtctcacacgcgctctacgacagccgcctgccgcccgacttcttcggcgtgctggtgcgcgacatgctgcacttctacgctgagcagggcgacgtgcagatggctgtgtctgtgctcatcgtcctgggtgaacgggtgcgcaaggacatcgacgagcagacccaggtgtgtggtgggcggggcctcccccctgcagcgccgcccctggcacccagatcctgactgccgggcgctccctcccccaggagcactggtacacttcctacatcgacctgctgcagcgcttccgcctctggaacgtgtccaacgaggtggtcaagctgagcaccagccgcgccgtcagctgcctcaaccaggcctccaccaccctgcacgtcaactgcagccactgcaagcggcccatgagcagccggggctgggtctgcgacaggtggggcagtggggtcgggaggtggggcaggggcctgcaggcagcgcagcagcccccgctgaggcaccctccctcccgcccgcccccaggtgccaccgctgcgccagcatgtgtgccgtctgccaccacgtagtcaagggtctcttcgtgtggtgccagggctgcagccacggcggccacctgcagcacatcatgaagtggctggaaggcagctcccactgtcccgcaggctgcggccacctctgcgagtactcctgacggggcatctgctgggcttgcccgggcggccgcgtgcagaaccccgcctggtcttgtgcccgagacgggcggaggctggaacttgagacctcaataaaggaagtagagccgctgtcggcactgcgtgtcaccccatagcgcggcgggctcgccgtaggcccgcggggcagctggcgggcgggggctttcggcggggttgtcgccatggtaaccggcggcgcccatagtcgctctcggggcggccttcccagtgcctcccgtagaggcctcttccggggcgggccaaaggaggtcacttccggggtccgtcccggttcccggccgttgccacgacgacgaagctgccggccaatggctggcggatgggcccaaggttcccggcgtgcagcgcggctgcctgagggcggcaggctcatggcgccggcgtcgcggttgctcgcgctctgggcgctggcggctgtggctctacccggctccggggcggagggcgacggcgggtggtgagcggcccgggaggggccgggcggtggggtcacgtgcggcgggcggggcgcgggctgacccagctgtgcccgcaggcgcccgggcgggccgggggccgtggcggaggaggagcgctgcacggtggagcgtcgggccgacctcacctacgcggagttcgtgcagcagtacgtgcgcccctgatcgcggaggtcgcgtcctgttcaccggcccgtctgccccgaccgcccaaggccgccttcccctgacctcgcgcgcacgcgtggggctggggcggcgaggctggcggtccggcctggccgcgactctgcccttctttccaggtacgccttcgtcaggcccgtcatcctgcagggactcacggacaactcggtgagcgcgtgcccgtccgtccccggccactctcgcccgtgctgggcccggccactaagtcccctccccgcccccgcagaggttccgggccctgtgctcccgcgacaggttgctggcttcgtttggggacagagtggtccggctgagcaccgccaacacctactcctaccacaaaggtacgcggcctcacccctggggcccgcccatttgccaacaccggggcggctggaccagacggtcctgacccgtctctttcctgcagtggacttgcccttccaggagtatgtggagcagctgctgcacccccaggacccca

SEQ ID NO: 14922 - DNA, 2300 bp, Homo sapien
ggggcgggggtctcgggagtcgtgtggctcaagctctctgttcttccccccttgcttctggagctctccaggcaccagcagcggtggagccgtgagctgccgttcccatgcccatctctagctgccccgcaagtccccactgcccaattctgttttcctctgtgctgctgtagggcggggaccggggtttttgtctttcccatgagcctcagctttcctacctggggtgggcctggacattgggtactgagggcagctgaatgctgagggcttgtgactgtccaggcagagagggacctgcatggggtgctgggtgtccaggacgcccacaagtgaccagtgcccgcccctaggtggcgcaaacgtggaccatgctgcggatcatctactgcagccctggcctagtgcccactgcaaacctcaaccacagtgtgggcaagggtggctcctgtggcctcccgctcatgaacaggtagatgccgggggcagctctccccaggggctggggctgctcgagcccacccacccatgggcccttcctgcccccagtttcaacctgaaggatatggccccagggttgggcagtgagacgcggctggaccgcagcaaaggagatgcacggagcgacacagttctgctcgactcctcggccacactcatcaccaatgagggtaggctggggtgggtaggggtgctgatgggagaggggtgggggtgtcccagacgaccctgaatgcccgccccattgtcgggcagataacgaggaaaccgagggcagcgacgtacctgccgactacctgctgggtgacgtggaaggtgaggaggacgagctgtacctgctggatccggaacacgcgcaccgtgagtgggggtccgggcagggtggggttcagaggcggatggaggacagactcagagcctccgctggtccctgccttccagccgaggaccctgagtgcgtgctgccgcaggaggcctttccgctgcgccacgagatcgtggacacgcctcccgggcccgagcacctgcaggacaaggccgactccccgcacgtgagcggcagcgaggcggatgtggcctccctggcccccgtggactcctccttctcgctcctgtctgtctcacacgcgctctacgacagccgcctgccgcccgacttcttcggcgtgctggtgcgcgacatgctgcacttctacgctgagcagggcgacgtgcagatggctgtgtctgtgctcatcgtcctgggtgaacgggtgcgcaaggacatcgacgagcagacccaggtgtgtggtgggcggggcctcccccctgcagcgccgcccctggcacccagatcctgactgccgggcgctccctcccccaggagcactggtacacttcctacatcgacctgctgcagcgcttccgcctctggaacgtgtccaacgaggtggtcaagctgagcaccagccgcgccgtcagctgcctcaaccaggcctccaccaccctgcacgtcaactgcagccactgcaagcggcccatgagcagccggggctgggtctgcgacaggtggggcagtggggtcgggaggtggggcaggggcctgcaggcagcgcagcagcccccgctgaggcaccctccctcccgcccgcccccaggtgccaccgctgcgccagcatgtgtgccgtctgccaccacgtagtcaagggtctcttcgtgtggtgccagggctgcagccacggcggccacctgcagcacatcatgaagtggctggaaggcagctcccactgtcccgcaggctgcggccacctctgcgagtactcctgacggggcatctgctgggcttgcccgggcggccgcgtgcagaaccccgcctggtcttgtgcccgagacgggcggaggctggaacttgagacctcaataaaggaagtagagccgctgtcggcactgcgtgtcaccccatagcgcggcgggctcgccgtaggcccgcggggcagctggcgggcgggggctttcggcggggttgtcgccatggtaaccggcggcgcccatagtcgctctcggggcggccttcccagtgcctcccgtagaggcctcttccggggcgggccaaaggaggtcacttccggggtccgtcccggttcccggccgttgccacgacgacgaagctgccggccaatggctggcggatgggcccaaggttcccggcgtgcagcgcggctgcctgagggcggcaggctcatggcgccggcgtcgcggttgctcgcgctctgggcgctggcggctgtggctctacccggctccggggcggagggcgacgg

SEQ ID NO: 14923 - DNA, 2300 bp, Homo sapien
accctgtctctactaaaaatacaaaaaattaacagggtgtggtggtggttgcctataatcccagctactagggaggctgaggctgaatcgcttgaacctagggggtggaggttgctatgagccgagactgcgccacctcactccaacctgggcgaaagagcaaaactccgtctcaaaaaattttaaagagaccgggtgcggtggctcacacctgtaatcctagcactttgggaggccaaggcgagtggatcacctgaggttgggagttcgagaccagcctgaccaacatggaaaaactccatctctactaaaaatacaaaattagcccagtatggtggcccatgcctgtaatcccagctactcgggaagctgaggcaggagaatcgcttgaacccaggaggcggaggttgcggtgagccaagattgcaccattgcactccagcctgggcaacaagagcgaaactccgtctcaaaaagttttttaaaaaaaagaacgagagcaactggttgaacaggtgtgtcaggcactgggcattcggtggggattgagccagaatgtgattcctgccttggtggaattcacactcgtatgtgaccgacaacaaccagtaaacaaacgaatgggtggtgacaagtgccgtggaggccacagtgatggagaagcccattagggcagtggtcagggaggtccgctctgtggaggaggcatcgcacgcacgtacaatgtccctgaggcaggaaagggcttggtgggctgggaatgggggtggaggctgccatggctggaggtgggcaggggaaggcggaggccaggagttggggttcattcacagcatagtgggagctgccagaggcctcaggcagaagacctggtgcctgacttctgtgcgggtttctgatcaaaggggaaagacggacccaggaaagccgttgggaggctgctcccgaggtcgaggagtgaggaaggaggggaagactgggggcactcggaacttgtctagggatgaccagatgtcatgatggacctggggattaaaataggtgatggcattaaaatactgaaattgagacttaaaaaacaggccaggcgcggtggctcacacctgcattcccagcacttcaggaggctgacgccagaggatcgcttgagttcagtagttttaagaccagcctggccaacacggtgaaaccccgtgtctaccaaaaatacaaaattagccaaattagccgggcgtggtggcgggcgcctgtagtgccagctacttgggaggctgaggcgggagaatcgcttgaacctgggaggtggaggttgcaatgagccaaggtcgcgccactgtactccagcctgggcgacagagcgagactccgtttaaataaataaataaataaaccaatcacacaagcacagcaccgcagcgcaatggcaacgcccagggcggcccgcagaccccaatcccgggcccctcctggcctctgccaacgcagctccctgacccggaactttcgtggtgtcgggcgagagtttgtgcccacttcctgagagggatgggtaagaagaggaccacttccggcgagggacgggaaagacagcggcttccggcgcggcggttccggacaaccgtgcgcttttagtaaaagattggggttcgcgcgggggagaagggctgccccgggccctctggttctcgtcccgcagcgtccgctcccccgcgccactgcgccgctcccaggaaccctgtactccggggtcgccggcttctctcctgcctccggtcccgccagacacctcgagctccttaagtagctcggtccttgacgtccctctgggcccttcccgcgtctatcgcctgagtccccgggcccctctagccctctgttccctcccctcttttgttcctccctagagccccgccgccctcagggctgacagtgtggacggcgggagtctcctcgctcccctgctgggattgactgaccgagcgtttagtgactgcccagatctggctgatgggggtaccgagaggtggcctgggccgggaatgtccagctagagtcttccgtggaagtcagacatgaaactgacaggcctaagggaagctaggaagtcccctcaccgctcagccagggtgatgggctggactgacagactccagtgaatttgagcttgcctgtcaggctgattggctgatagacagccctggattggctcactaagactgaccagcccgggaccaagcagttctggggtcccaacctgggtggaaggtctgaactgatgacccacccaggctgaccaggcc

SEQ ID NO: 14924 - DNA, 2300 bp, Homo sapien
atgtgtctgagttgtttttaggtccccagacagcggtgtaggtgggcatatctgccctgcgcatcccaggtctcgggattctcctgtacctcttatcagatttattctttcttgcaacaaaggggtagaggctggatgccgacatggtagaatggaaacagcagtgactacatggaaggcagaggacctcccattccttaaagggagagacaacactgaagtcactacacataatattccctccaacatatccagactctagcccacccttccagagaggcagaaataaaccctgttctatacacagtaacaggcaaggacaaggatgtcgcaaaagattacaaaatgcaccaatagcagacaatggctcacacccaggagagacagagaggtcgaaaaaggcaactgaggctgggcacagtggctcacgcctgtaatcctagcacttaggccgaagcgggtggatcacctgaggtcaggcgttcaagaccagcctggccaacatggtgaaaccctgtctctactaaaaatacaaaaaattaacagggtgtggtggtggttgcctataatcccagctactagggaggctgaggctgaatcgcttgaacctagggggtggaggttgctatgagccgagactgcgccacctcactccaacctgggcgaaagagcaaaactccgtctcaaaaaattttaaagagaccgggtgcggtggctcacacctgtaatcctagcactttgggaggccaaggcgagtggatcacctgaggttgggagttcgagaccagcctgaccaacatggaaaaactccatctctactaaaaatacaaaattagcccagtatggtggcccatgcctgtaatcccagctactcgggaagctgaggcaggagaatcgcttgaacccaggaggcggaggttgcggtgagccaagattgcaccattgcactccagcctgggcaacaagagcgaaactccgtctcaaaaagttttttaaaaaaaagaacgagagcaactggttgaacaggtgtgtcaggcactgggcattcggtggggattgagccagaatgtgattcctgccttggtggaattcacactcgtatgtgaccgacaacaaccagtaaacaaacgaatgggtggtgacaagtgccgtggaggccacagtgatggagaagcccattagggcagtggtcagggaggtccgctctgtggaggaggcatcgcacgcacgtacaatgtccctgaggcaggaaagggcttggtgggctgggaatgggggtggaggctgccatggctggaggtgggcaggggaaggcggaggccaggagttggggttcattcacagcatagtgggagctgccagaggcctcaggcagaagacctggtgcctgacttctgtgcgggtttctgatcaaaggggaaagacggacccaggaaagccgttgggaggctgctcccgaggtcgaggagtgaggaaggaggggaagactgggggcactcggaacttgtctagggatgaccagatgtcatgatggacctggggattaaaataggtgatggcattaaaatactgaaattgagacttaaaaaacaggccaggcgcggtggctcacacctgcattcccagcacttcaggaggctgacgccagaggatcgcttgagttcagtagttttaagaccagcctggccaacacggtgaaaccccgtgtctaccaaaaatacaaaattagccaaattagccgggcgtggtggcgggcgcctgtagtgccagctacttgggaggctgaggcgggagaatcgcttgaacctgggaggtggaggttgcaatgagccaaggtcgcgccactgtactccagcctgggcgacagagcgagactccgtttaaataaataaataaataaaccaatcacacaagcacagcaccgcagcgcaatggcaacgcccagggcggcccgcagaccccaatcccgggcccctcctggcctctgccaacgcagctccctgacccggaactttcgtggtgtcgggcgagagtttgtgcccacttcctgagagggatgggtaagaagaggaccacttccggcgagggacgggaaagacagcggcttccggcgcggcggttccggacaaccgtgcgcttttagtaaaagattggggttcgcgcgggggagaagggctgccccgggccctctggttctcgtcccgcagcgtccgctcccccgcgccactgcgccgctcccaggaaccctgtactccggggtcgccggcttctctcctgcctccggtcccgccagacacctc

SEQ ID NO: 14925 - DNA, 2300 bp, Homo sapien
gtctttcccgtccctcgccggaagtggtcctcttcttacccatccctctcaggaagtgggcacaaactctcgcccgacaccacgaaagttccgggtcagggagctgcgttggcagaggccaggaggggcccgggattggggtctgcgggccgccctgggcgttgccattgcgctgcggtgctgtgcttgtgtgattggtttatttatttatttatttaaacggagtctcgctctgtcgcccaggctggagtacagtggcgcgaccttggctcattgcaacctccacctcccaggttcaagcgattctcccgcctcagcctcccaagtagctggcactacaggcgcccgccaccacgcccggctaatttggctaattttgtatttttggtagacacggggtttcaccgtgttggccaggctggtcttaaaactactgaactcaagcgatcctctggcgtcagcctcctgaagtgctgggaatgcaggtgtgagccaccgcgcctggcctgttttttaagtctcaatttcagtattttaatgccatcacctattttaatccccaggtccatcatgacatctggtcatccctagacaagttccgagtgcccccagtcttcccctccttcctcactcctcgacctcgggagcagcctcccaacggctttcctgggtccgtctttcccctttgatcagaaacccgcacagaagtcaggcaccaggtcttctgcctgaggcctctggcagctcccactatgctgtgaatgaaccccaactcctggcctccgccttcccctgcccacctccagccatggcagcctccacccccattcccagcccaccaagccctttcctgcctcagggacattgtacgtgcgtgcgatgcctcctccacagagcggacctccctgaccactgccctaatgggcttctccatcactgtggcctccacggcacttgtcaccacccattcgtttgtttactggttgttgtcggtcacatacgagtgtgaattccaccaaggcaggaatcacattctggctcaatccccaccgaatgcccagtgcctgacacacctgttcaaccagttgctctcgttcttttttttaaaaaactttttgagacggagtttcgctcttgttgcccaggctggagtgcaatggtgcaatcttggctcaccgcaacctccgcctcctgggttcaagcgattctcctgcctcagcttcccgagtagctgggattacaggcatgggccaccatactgggctaattttgtatttttagtagagatggagtttttccatgttggtcaggctggtctcgaactcccaacctcaggtgatccactcgccttggcctcccaaagtgctaggattacaggtgtgagccaccgcacccggtctctttaaaattttttgagacggagttttgctctttcgcccaggttggagtgaggtggcgcagtctcggctcatagcaacctccaccccctaggttcaagcgattcagcctcagcctccctagtagctgggattataggcaaccaccaccacaccctgttaattttttgtatttttagtagagacagggtttcaccatgttggccaggctggtcttgaacgcctgacctcaggtgatccacccgcttcggcctaagtgctaggattacaggcgtgagccactgtgcccagcctcagttgcctttttcgacctctctgtctctcctgggtgtgagccattgtctgctattggtgcattttgtaatcttttgcgacatccttgtccttgcctgttactgtgtatagaacagggtttatttctgcctctctggaagggtgggctagagtctggatatgttggagggaatattatgtgtagtgacttcagtgttgtctctccctttaaggaatgggaggtcctctgccttccatgtagtcactgctgtttccattctaccatgtcggcatccagcctctacccctttgttgcaagaaagaataaatctgataagaggtacaggagaatcccgagacctgggatgcgcagggcagatatgcccacctacaccgctgtctggggacctaaaaacaactcagacacatgtttttacaacttttttaatatatatttttataaacaggtcacgtgataaaatagcacaagaaacacttaccaaatataaggttatatcttccgcatatacaggagaatgaggtcgttatgtacaataagaaaatgattttaggggttggttggttttgttttcctctctccccttaatttttcctcctacagtcgttgga

SEQ ID NO: 14926 - DNA, 2300 bp, Homo sapien
aggctgaggcaggagaatcacttgaacctacgaggcagagaggttgcggggagccaagatcctgtctctgcactccagtctgcgctccaggcaacaagagtgaaactgtttcttttttttttttttgagacagagtcttgctcagttgcccaggctggagtgcagtggcgcaatctcggctcactgcaagctccgcctcccgggttcacgtcattctcctgctgcagcctcccaagtagctggtactacaggcgcctgccaccatgcccagctaattttttgtatttttagaagagatggtgtttcactgtgttagccaggatggtctcgatctcctgacctcatgatccacccgcctcggcctcccaaagtgctgggattacaggcatgagccaccgcgcccggccggaactctgtttcaaaaagaaaaaaaacaaaagaaaaagagggtgtccatgggcaatgaaggttgggctcagtgcataccgtaggtgcccagtgagtgctgccagtggccatggttggcttcctgttgctgctcacagtctgggagggagaagcaggcactcccatcctctctgtctggtggttctgggagcaccatagggacgcccaaggagggaaggagccccactgcacccgcccccaaccccggccttccagactcagcaacagactcactccccctcccggccctcatccacagagcgtgccaggaagatgtcgagcccgggcatcgacggcgaccccaagcctccatgcttgcctcgaaacggtctggtgaagctgccgggccagcccaacggcctgggtgcggccagcatcaccaagggcacgccagccaccaagaaccgcccctgccagccaccacccccacccaccctcccaccacccagcctggctgctccactgtcccgggctgccctggctgggggcccgtgcaccccggcaggtggaccagcctcagccttggcacctgggcacccagcggagcggccgccgctggccacggacgagaagatcctcaatgggctcttctggtatttctcggcctgcgagaagtgtgtgctggcccaggtgtgcaaggcctggcggcgcgtgctgtaccagcccaagttctgggcaggcctcacgccggtgctgcatgccaaggagctctacaacgtgctgcctggtggcgagaaggagttcgtgaacctgcagggttttgccgccagaggcttcgagggcttctgcctggttggcgtctccgacctggacatctgtgagttcattgacaactatgcgctctccaagaagggtgtcaaagccatgagcctcaagcgctccaccatcacggacgcaggcctcgaggtgtgcaccaggctcgggggggacagggctggggggcaggggcgggcagcagcaaccctatggaggtgggagcggatggtggctttggggtgggaggaaagaaggactgactacaggggacctcgcgcaaagcgaaaatgtgggtcccttgttcaaagacactcaagattttcaagatggcagcagcagggcagtggattaaatgcagggcccaggcccggtggctcaagcctgtcatcccggcactatgggaggccgaggcaggccactcacttgaggttaggcgttcatgaccagcctggtcaacatggtgaaactctatttctattaaaaatgcagaaattagccaggcctggtggtgggcacctgtagtcccagctacttgggaggacactgaggcaggagaatcgcttgaacccgggaggcggggggtacagtgagctgagatcatgccactgcactccagcctgggacctgggcaacagagtaaggctctgtctcaaaatgattgaatgaatgaatgaataaataaataaataaataaatacaaatgcagtgtggggaggatgcgagggggagctgaggggcagctgggaaaggatcccccaggagtagaggtcagaggagccgcctggcagccgggtctggagtctaattgtaacgctggtgccaacgcccccagcacctgccctggccaggccctgggctctcgtcccgatgccccgcctcctcacacactgccaaatgttttcagggttcagctccctgcatgtttacaccctactgcttcctccctgcgggctccaccccttctcctgcaatcctgacccggcgcccgcccgcctgcaggttatgcttgaacagatgcagggcgtggtgcgtctggagctgtcgggctgcaacgacttcaccgaggccgggctgtggtccagcctgagcgcgcgcat

SEQ ID NO: 14927 - DNA, 2300 bp, Homo sapien
gaggggtggagagaccaatggggaagtagctgccaccagccatggtggagacagacaaagttgcccggcacaggtggggtcacagaggtggagggtaggtgggtcacagctggtgacagaggtggagggtaggtgggtcacagctggtgacagaggtggagggtaggtgggtcacagctggtgacagaggtggagggtaggtgggtcacagctggtgacagaggtggagggtaggtgggtcacagctggtgacagaggtggagggtaggtgggtcacagctggtgacagaggtggggggtaggtgggtcacagctggtcacagaggtggagggcaggtgggtcaccgctttggaggagcacggttggcctttctgtgatgatcttccacacactcttccctgctcagattccccacaggcagggctagcttcttgggcctcgccagggttgcatgacccaaatgcctgactcccacgctcaccctatgcacttggggtgtgtccagcccaccctatgcacttggggtgtgtccagcctgccctgtgcgcttggggtgtgtccggctccagccccagctgggactcaacacaagcacagcttgttctctgcctgaggccctggcacctgctgtggtgagagccccaggcacgaggtgaaaccctcctaccgggagcagtccacgcctggggtggaagctgctgccagagggccagcctgccagaccatgcaccggagacacccagataggttggaccgccgctcccctgttgccccaactgtcttcacggggctcgtcctgtctgccccactccgggcaccttctttggtcagtatccaggtaccgggcaagacttacgcagaagagctgctgcgctcaccccaggtagacccagtggcgcccccacagcaagcacagaaccaccccaccccgggacccagccagggtgccgtcagtctgaccctccttcccgctgaccccaggcctcacaccggccccttcggccaggcttcccatcaggacgctgggaacagcagctggtttcactcctattgagatactctcaggagccccattcagccctgtagctctttcccggtgcaaagaacccctctgctctccccacacctgctccctcccccggccctgctcccaggagaccccaggatagggcgccattggcctccattctcctgccctgagcctgctggggcgtctggggtctccagcggtccccaccgagtcctccacctaacctagcacgccccacccctgccccgggctgcagcagccgccgccgcctccagcctccagtttattcccgagggaacttgccaggctcctcggatctttgcacccccattcccgagccatccctccctcgcgccgtgggggggtctcagctccagtggggcaccctcaggaagcccccgccagaagtcaccaccgcaagccctcgggtgctttcactgtcactgtctgaactgatccgtgcagtcacttgttttcgcgctctgcgggtgtgccagggtctccaatgaggggcttccggccgggcacgcagcaggtgcgcggggggtgtgagggctgtgaagggtccttgccgtgggctgggcgggagggtccagagacgggggtctgaccaccctgtctcctctgggccgggtctcgccttcctcgcctccccaagtggtggccaagggccgggacgcgcggtgccgccccggtccccataggaccccggacccctgggccacccgccggcgcctgctctcccgcctcccctcgccctcccttctgcctcccgcgccctccccgcccgccgcgcgccggggtttgttattgtgcgggtgcccgcggcgagcggggcgggggcgcgtgccgggcctggcgcgtgctcgtggacgccgtgccgggagcgcgccgcgcgcgggggccggggcggggcgggggcggggctcggcattctcggcgcccccgcccgggctcgcgaacccggattggctcgccacgccgggagcgcgcgagggcgcggcgtttggtgccgggcggggggcgcgcgcggcgccggcggcggccacggaggagcgcggggagggcgaggggaggaggaggcgcccgcctggttccctgcaaagcggccttatttatctgggcacagcctcagcctccccggtgggaggcttggggcggccgatcctctcccaccggggagctcctttccgtgcgctgccgagggggcccggccaggacgggacgcggggcgcagggcgcggccgggccctgccggccagtccagca

SEQ ID NO: 14928 - DNA, 2300 bp, Homo sapien
ctgtaatcccaacactttgggaggctgaggtgggcggatcacctgaggtcgggagttcaagaccagcctgaccagcatggagaaacctcgtctctactaaaaatacaaaattagccggcatgatggcacatgcctgtaatcccagctgctcgggaggctgacgcaggagaatcgcttgaacccaggaggtggaggttgcagtgagccaagatcgcgccattgcactccagactgggcaaagagcgaaactccatctcaaaaaaaaaaaaaaaaaaaaaaaaaaaaaagaggccgggcgcggtggctcacatctgtaatcccagcactttgggaggccaaggcgggcagatcacgaggtcaggagatcgagaccatcctggctaacacggtgaaacaccctctctactaaaaaaagaaaaaatacaaaaatttagccgggtgtggtggcgggcgcctgtagtctcagctgctcgggaggctgaggcaggagaatggcatgaacccaggaggcagaggttgcagtgagccgagatcgagccactgcactccagcctgggcgacagaacgagattccgtctcaaaaaaaaaaaaaaaaatggacccactgcacttgcttgtccactcagctgcagacaggcctttgggagtcttccaccttttggggattgtgatggctacttctgacctgcacctcgcccagagcaaggggctggccgagcccagtaggcgccttgttcctgtttggcctgggagggccctggggttgagggagggcctggtcagtgggatccagcctcccactgccactgagccatctggcctcatctgtccgactgccactggtgaactcatctgtccaccatgagtttcgagcgccgggtggcaggaggtttgggggcaggggacggaatgttcacatcttcaggctgcacagtctatgctggtccttgcagtccccggctaaagcttctgtcgtccgtaaggggttcagtatgtagtgggacccctttgcttgtgccttaggccttctgtgatctgacctgtcgtccccacccaccacccatgccctggggtttcactgggctgccaagagctccttcctcaggcccttgacccaggctgtctgctctcccccattctcttcctgtccacctggccagccactgcccacttcctcccatcaggccaactcagcagtcccggatgctgggaatcccacactgctccagcctgaggctacagtgtgtttgcgaatcgcctgtttctgcttgtttcatcttggtgggggctgctcctgtggcccaggggtgtcctcccagctcctgtgtctccacgtgctgcaggcctgcaggggtgcccgtggctgctccattcacgcccctccaggagccccgtctggcccggggtcggtcatccggcaactatggggtgccgctaggtctgaggaaaggggcctaagcctgcgggctgcgcgctcttcagcaggaccccctcctgcagacggccttaccaaaacccgaggcctggccccgctccaaggcgcagcccccaggccaggccttccccgcctctggagtcatgacccctctcctctggggctccaccggcctctggtcagcaggaccggacctggttgggagggatgtggccaacaggcccaggtcccagtgttaggaaggagcaggcccggccgcccgcgaggcggaaccaccaggtgggccaccttccctaccgccaccccgaggttccagtggacatcaaaacctcggctccatcagaggctccaggactccgatcgggacagcgcggggggcgaggccagggtgagggcgcggcgaaggagagacgcacagcgcggggcgggcaaggagcctcccttccgcgccaaggccccccccaaccctcgaggcgcttggaccgtgggatagtcctccggcggcgcccgagctccggccccgcccccgctccgccccgcgcctgctattggcggaaagttccgggccgcgccgcgactggccgacacgccgcaggccccgcccccttcccgacccgctccaaggcggccccggcgctggggctgcgcggcaggcggagcggccgcgggcttgggggcttcgccggggccgggcggccggcgcccccggctgctcccgccgccgcccggacccgcgccccgccggggcagcggtggtgagagccccgactccccggacgccgcccgccgtgccatggggttcccggccgcggcgctgctctgcgcgctgtgctgcggcctcctggccccggctgcccgcgccggc

SEQ ID NO: 14929 - DNA, 2300 bp, Homo sapien
gagcgggggctgcgccgggcggggacccgcccccgtctcagcgccccgtcccgtcctgtccccagcggcctcacccaggagcccggcagcgtggggcagctggccctggcctgtgcggagggcgcggttgagtggctgtacccggctggggcgctgcgcctgaccctgggcggccccgatcccagagcgcggcccggcatcgcctgtctgcggccggtgcggcccttcgcgggcgcccaggtcttcgcggagcgcgcagggggcgccctggagctgctgctggccgagggcccgggcccggcagggggccgctgcgtgcgctggggtccccgcgagcgccgggccctcttcctgcaggccacgccgcaccaggacatcagccgccgcgtggccgccttccgctttgagctgcgcgaggacgggcgccccgagctgcccccgcaggcccacggtctcggcgtagacggtgagtggcggtctggttgggacagggtgggagtcccgaagtcttaccctgcctgggcttggcgggaatgtgccttgtcggccccactgcagaaggaaaaagtgagctacaagggttggatgggcttgtcaggccacacagcctgggactgctggggagggatggcctccccgccctcccttcccgattcatctctggaaagagctggcaggggcagagtggagggaaggggaggccgggcccagcaatcctgggcctctggtccctgaacggttgggggaagagatggtggggacagaatcgaagcctccggccaaagctgtccggggctccctggcccagcggtgacctctctcccctcccccagcccaaccaacaaaagtccagtgtgcagcccggtcaccatggagacgccgctcgcctccctgcagggcaccaggcccagctcttgcttggctctcctggagcttggcgcctgaccctgaaagggatgggctctcgctattctgccccctggccctgggccagggaccccagaccacccttcctctgcccccacttcctatcaccctagctgggctgctgctcttcagacctcagatccgggaaactagaggggtcccagatgctggggtgcatatgtcagatgggagtgcaggagggcggcccaggacagctgatcgctaggcatggcccccaggcccacgtctgtgtgcattcctgccttggaggtacgcgcctgcaagtgtgtttcctgagtacaggtgtcgccgagggcgtgcacatctgctgtgtagctctctgggacccccaggtgccatcaggccctgagcgtgggctctgctcatttgcctgctgcctcctgccgcttgtgcggacaagggacggggcctggggtgatgccgggagagggcagggcctctcctcaccaccccctctgcatgccaggtgcctgcaggccctgcagcgacgctgagctgctcctggccgcatgcaccagcgacttcggtgagtgtccccgccatggggggagcctggagcctgccttcccctgaatgcctaccgcagccacatgcctccccacagtaattcacgggatcatccatggggtcacccatgacgtggagctgcaggagtctgtcatcactgtggtggccgcccgtgtcctccgccagacaccgccgctgttccaggcggggcgatccggggaccaggggctgacctccattcgtaccccactgcgctgtggcgtccacccgggcccaggcaccttcctcttcatgggctggagccgctttggggaggcccggctgggctgtgccccacgattccaggagttccgccgtgcctacgaggctgcccgtgctgcccacctccacccctgcgaggtggcgctgcactgaggggctgggtgctggggaggggctggtaggagggagggtgggcccactgctttggaggtgatgggactatcaataagaactctgttcacgcaagctgctgtggacctggtctcctgtgtccagcccagccttgggcctgcctcgcagctgtgaggatggctccaattcctgcctcctggcgggagactgaggctcaggggaatggtatcttgttcaagaccatttggcaactgagagggagagcagatgtcaggaggagctacacccacattccggggaggggccgctgctgggtggggggcacgtggggacctgcactcatgcaagcttctgctctgctgcacccaccagccccgtccttgcccgcacccttgcctgcttccctggctggctcccacttgcctcccgtgccaggtgcttctggggctcag

SEQ ID NO: 14930 - DNA, 2300 bp, Homo sapien
ggaaactgaggctgtgtgagggacacagctgtgcagggcccacaaacacggtcctttctctaggttagcggatgcagatgcctgatgagtgccatgccctctgtggacacctggggaggggggtcacctccagcgccgccctgggacttccactgcacgtgcaagagacttaccctttcacacagatcacctgcctgccgcagggctgatgaggatgggtgaggagcgcagccactgggtgtcatgcactgtgggggttctcccaccttctgcccctcctcaggttccttgctgcttctctcctctcccaactgtggcacgctgagggctcaggcacaggaccgctcctctggggcagcctccaataacccttggacaacctccactttttcatcttcagccctgaccactccctggggcccatagccttacatccatctgcccccagcccaaacacttctgcaaacactagaaaaggaggtagcccgtgtgccctcctgcaccgcctcctccactcctgtcttggagaggctttcccgtgggccgagcaacccccttacctttggcacttgccctgattctctggccagcttcctacaacctctccttttcagccacacccaagtccacctgttcacaaacaccctgggctgggccctggccgaaccctggcttctacctacctgtctcaggaagtgcctgagccttgcacctacagaccctcccagagaaagccctggctttgcaaccagctgtcttctcatgagacacagggccacaggagcaccacggtgcccaaatgggtcttggagcattagaccaggggcttcatgcctgccctggggacaggtggccaaagtggcatgggagatagggagacagtgtgggtgagcaggtgggcaggagctacaggagcctggggcctgtggatcacagacaccgccaggcaagtgccagttcacacaggtacaggtggctgcagagtgcccaaaggccaagcagcagagtgcctggtgtggacgggagaggagtggggaggttgggcgcagtggctcacgcctgtaatcccaacactttgggaggcccaggcaagcagatcatgaggtcaggagatggagaccatcctggccaacatggtgaaaccgtctctaataaaacacaaaaaattagccagacatggtggcatgcatctgtaatcccagctactcaaaaggctgaggcagaggaatcacttgaacctggaaggcagaggttgcagtgagccaagactgcgccactgcactccaacctgggcgaaagagcgagactcaagtctcaaaaaaaaaaaaaaaaaaaaaaaaaaaaaaaaaagaagagtggagagtgcacgctagagtccaattaggtgcattcatccagtaagcctcctaggtaactgctctaggtgcagggaataatgcaggcagcaggacaggaatgggcgctgtcagctccccctagagctcagtgtacatacacccttcctttcctgggagggccgttccaggcccccaggagacaggacacgctgagctgggtggggctggggccaacgtgggcaggcctgtgagactctgcacttgggagctgggggctgtggtctgcggcatacccatgtctggaagcagcctctgtccctgcaggggctctagaccccagccacggatggctaaggaggagctaggccagggcacgcatagacaacccccgacattcacgggtgttcagccctaccctgggtgtggaggtcgtggcccagctgcctgacccagagctcggctcttccacttgcgcttcccacccccagcttcacaaggtcacctccaggaactcagtctttttgtgtgttgttttctggagaaggaaggtgatctccccactcccggggctgtctgccttccctgtagctggcaggtgccagaggcccccgcctgtgacatccggctttcctcccaccacactcgcctgagagccagcatctgtcttcttgggcctgctcaagctctcctccgtgtcagcccctcctccatgcccttctccctcagaccccaccccccatcccttcaccgcccactggggctcatcgctcaggctgtaggagggaaatggaaggatgtcctcccgggctctggctggcgctgggtgtccgagtcagcggagcgcccccagcagtctccccgaggcagagtcatgggggtgctggcgcctggacgctgtctcatcccggggagccgctttcccaccggctccctgggctccagccgccccacgcgagcccccgg

SEQ ID NO: 14931 - DNA, 2300 bp, Homo sapien
attctctggccagcttcctacaacctctccttttcagccacacccaagtccacctgttcacaaacaccctgggctgggccctggccgaaccctggcttctacctacctgtctcaggaagtgcctgagccttgcacctacagaccctcccagagaaagccctggctttgcaaccagctgtcttctcatgagacacagggccacaggagcaccacggtgcccaaatgggtcttggagcattagaccaggggcttcatgcctgccctggggacaggtggccaaagtggcatgggagatagggagacagtgtgggtgagcaggtgggcaggagctacaggagcctggggcctgtggatcacagacaccgccaggcaagtgccagttcacacaggtacaggtggctgcagagtgcccaaaggccaagcagcagagtgcctggtgtggacgggagaggagtggggaggttgggcgcagtggctcacgcctgtaatcccaacactttgggaggcccaggcaagcagatcatgaggtcaggagatggagaccatcctggccaacatggtgaaaccgtctctaataaaacacaaaaaattagccagacatggtggcatgcatctgtaatcccagctactcaaaaggctgaggcagaggaatcacttgaacctggaaggcagaggttgcagtgagccaagactgcgccactgcactccaacctgggcgaaagagcgagactcaagtctcaaaaaaaaaaaaaaaaaaaaaaaaaaaaaaaaaagaagagtggagagtgcacgctagagtccaattaggtgcattcatccagtaagcctcctaggtaactgctctaggtgcagggaataatgcaggcagcaggacaggaatgggcgctgtcagctccccctagagctcagtgtacatacacccttcctttcctgggagggccgttccaggcccccaggagacaggacacgctgagctgggtggggctggggccaacgtgggcaggcctgtgagactctgcacttgggagctgggggctgtggtctgcggcatacccatgtctggaagcagcctctgtccctgcaggggctctagaccccagccacggatggctaaggaggagctaggccagggcacgcatagacaacccccgacattcacgggtgttcagccctaccctgggtgtggaggtcgtggcccagctgcctgacccagagctcggctcttccacttgcgcttcccacccccagcttcacaaggtcacctccaggaactcagtctttttgtgtgttgttttctggagaaggaaggtgatctccccactcccggggctgtctgccttccctgtagctggcaggtgccagaggcccccgcctgtgacatccggctttcctcccaccacactcgcctgagagccagcatctgtcttcttgggcctgctcaagctctcctccgtgtcagcccctcctccatgcccttctccctcagaccccaccccccatcccttcaccgcccactggggctcatcgctcaggctgtaggagggaaatggaaggatgtcctcccgggctctggctggcgctgggtgtccgagtcagcggagcgcccccagcagtctccccgaggcagagtcatgggggtgctggcgcctggacgctgtctcatcccggggagccgctttcccaccggctccctgggctccagccgccccacgcgagcccccggctggttctggggccaggaccgcccctctccaaggcagacttcccttcattccacgacaaagacgcgcagccccgtttccctggggctctagcccgtgagatcgccgggtgtatcccgactcccgccggcacgtgcgctcccccagggcagggcctgcctgtccccttccgcgggtcgccagcagccagcacaggccgcaaacggcggtccgcagagcggaccaacggagccgaccctcgcaggcttggagccggacgcggcggggcagagcccccgaggctgcagctcgccggaacccgcgggagggcagccgggctgggcggagcgcacagcgccacggaccgaccgcgcaggctctgccggccacttccggtgtcgcgcggcggctcccggcaggaggcagagggcacaccgccagccccaggccaggctgcgagggccgcggacccgagccgggaaggaccttgggcggacgagccgcgcgtcccgcagccatggagcaggacgacccggtcgaggcgctgacggagctgcgcgagcggcggctgggcgcgctggagctgctgcaggcggcggc

SEQ ID NO: 14932 - DNA, 2300 bp, Homo sapien
cctgagagtggaccccggctgagcttctggggcccccaccctccaggtctccaagcagtcagggcagagcctcaccacagcctgtgtggccagtcgctgcccggctgccctggcctcctctcgggctccctgcagctgccggcccagggttgccctgaagacacgggggtgaggctcagcaggcccacgatcaggggttctctctgctccaggatggggccccaggtgagatggccactcacacacgcgtcaccagtgcctgctgccgggcctcctgatgctccagcgcccacttcacttccccctgcagctgtggggcacacagggctggctggatgagaccctaggcttggggtctctggtgctgccctctcccctgagctaggtggctgcacactcacgccgctccccagcctgtgctgctcattctcggggttcatggtgttcttgggctgcacctgaatggaagggagggcagggaaagctaaggggtgggtgagccccagtttcactgaggcccctgctgaggcttccctctggcctttcccagccaggctctccatatgctcatggtaacctggaatctgtggtcatcagagtgtccaggcacctgggctttgtgtctgagctcttgggctgctgcccggggatgcctggggtcagactccactgggactgcacagccctggctggtgccatctcctcgcagctccagctccagtacccggctctccagccgaaggatctgtgggacaactggcatgagcaggtgcacctgcccgcgggccacctggggtaggtgaacattcacccggtgcacgctcaggggcgcgcagcactcagaggcaggctgagacccacagatgccatgtgcgtgtgcatgcccatgcagggcacgtgtcctgggcctgcaccccccgtcccccatgcactgaggctggttcacacggctgctcacctcactcttcagctggaagatttcagcctcatgctgctcatgtaggtggtgggttgtgatctgaatgtcgaccagctccttggagatctgtgggtggccaggtgagaggtggcgtctgtgggccctgctggcaccctccctcctcacgagcacgctggggccccacacccacctgcagctgctgctccttattgagcgctagatctggtgggacctctgcttccaagctggtggcccacactgcggtgcccccaggagctcctggcagccagtccttggctcgtagcacaacctggggaggtaccgccacccattccccaggtgggtcccaggctgggctgtggccccactcccatgcagtcaccagtcccgcctccctgcctggctgagctgtaaaagtccctctcctggctgaaattaggcccagggtgcaggaacctgcaccctcctggcctttgggggaacgggcagacttcaaccccatggcaggagcggcaagtcccagaggactcacattctccacccgccgagagggaggtccaggcctggggcctgtggtggctgcgtgctccataggctagggaaccctggccagctccgagcccggtgctgcctccacgcccggcttccccatggctgctgctgccactggcactgctaagtgcgttgccaaggcctctgttggtcccaggtgactcccagggcaccgcccacaggggccggccagaccggtggttgctgaggagggaggatagctcttcctctctccatgcctccgtttccccatctggggaatgcggcccagcgccccctgcacataccctgtgcagatggaaccaggtgcgtgaaagcgcccagcctgggcgcagcggacgagcacgcggaacggagcggcagcccgcccgcaggatgccctgagctacactcgctggacaccttctgtgtacctagcagtgctggctgagccccgggacgggggaagtatatctctgcacctctggcctgagaagaggggcgcagacgtccccatcaggggccggagaactcggaaacgactggctcagccggggcgtcgggagggcttcctggaggaggtgccagcgccgggcgcggcggggtcggagcgtgcgcgtggcgccccaccgggcacgcgcaccgccggcgggccttgtggtctcatcgcgcgcaggatccgggccgggcgggggcgggggcggggcgcgtccgcggaggggggcggttggcggctcccgagcccagcgccgcgctcagtccggaccccgtgaccggcggccgaggccccgcctccgtcagtctgtccttcgggtcctcagcacagccg

SEQ ID NO: 14933 - DNA, 2300 bp, Homo sapien
ctgctgggcgctgccctccaggcacgagccgcagccggccaccgacagcgcgtcgcctggcgggggagggcgggtcagagcagatggggcggggccggcgggaggcggggtgggcgcgctccgcgctgcgggtacccgagaacagggcgggtgggtccgggcaatcgtcctcccacaggaagtagctcatgtggccggcggtgtggccgggcgtcaggaggcaacgcacgtggatggccccgaactgcggcggaggagcaggcggacctgtgagggcgggtggacccggggcgccctccccgcccctcccgggagcgcgcgctcacccgcagctcctcgccgtgcgccagcctgcgcgtcagcgagaagatgcgctcgtccgcgcccagcaccgccagcccgggacgaagccgcgccagctccgggtttccccgcgcgtggtccctgcgggcgggcgggcgggggccgggttaggtcgggttgggacaaggcggcgtcctcgtgcctccccgcgccccgccggcgctcaccagtgatggtgggtggtcagcacagcggtcagagacaccccctcccggcccacgatctccagcagctgaaagggacgggagtgacggtaacacagacggtcccggtggcccactccctccatatcgggatccgccgcgctcactgccccaggccggccagagccccggggagcgccggggagcggggacccagcgggcggtgactgcgcccagcgcgtgcagggaccgccaggcagcagcgaaagggcggaggccagaggtgccgtaacttcagggagccccaagataaacaaggaaccccagccgccaatgacttccggagagcagagcacgtgggggctcgctcctaccaggggggtcggggaggctctcgggggacacggccgggtccctgcggcccgcggcctgccctcaccctcttgggcacagccacgtccacggccaccgcctcgcgcgtgagctcctcgatgaccaggtacatgtagttgtcctcgagcacggggatgaccttgaccttcatggtcacggagctcggccaccggtgcctgctccaaaacaggccccccagcccacggtgccccttcagggcggggcccgctctccacaccctaggaagggctgtgcgaagcgggctcggtcaacacgctgggggccaaaagagaagcccggctccccaggaactccccggcactcgcgtggaattccacgcaccgggctccagcaggagcggaacccggccggtccccaaccagccccggctccgcccccagtccgagccccagtccccaaaggccacgccttcctcccaggccccgcccctcggccccccgccctgccgccgcaagacccctgacccgggacagccgcgttcccccgccgcccgcctcaccggcacggctgtgctgaggacccgaaggacagactgacggaggcggggcctcggccgccggtcacggggtccggactgagcgcggcgctgggctcgggagccgccaaccgcccccctccgcggacgcgccccgcccccgcccccgcccggcccggatcctgcgcgcgatgagaccacaaggcccgccggcggtgcgcgtgcccggtggggcgccacgcgcacgctccgaccccgccgcgcccggcgctggcacctcctccaggaagccctcccgacgccccggctgagccagtcgtttccgagttctccggcccctgatggggacgtctgcgcccctcttctcaggccagaggtgcagagatatacttcccccgtcccggggctcagccagcactgctaggtacacagaaggtgtccagcgagtgtagctcagggcatcctgcgggcgggctgccgctccgttccgcgtgctcgtccgctgcgcccaggctgggcgctttcacgcacctggttccatctgcacagggtatgtgcagggggcgctgggccgcattccccagatggggaaacggaggcatggagagaggaagagctatcctccctcctcagcaaccaccggtctggccggcccctgtgggcggtgccctgggagtcacctgggaccaacagaggccttggcaacgcacttagcagtgccagtggcagcagcagccatggggaagccgggcgtggaggcagcaccgggctcggagctggccagggttccctagcctatggagcacgcagccaccacaggccccaggcctggacctccctctcggcgggtggagaatgtgagtcctctgggacttgccgctcctgccatggggttgaagtctgcc

SEQ ID NO: 14934 - DNA, 2300 bp, Homo sapien
ttaggccttgtctgagagccccccccaccccgaagcctgttccctccccccccaccctcttgccgcggcgggaaaggggccgtgccttagcccaggacagcttggctctcacgtggtcgttgcagggctccactttctgggcaaactccaggttgctaagcgtgtgctcgtggccgcagaacaccttctggaggaagagcgctcggtgagcgcgcacgcggccaggaagcggggaaagtgcttgcgccgggggcctggcctcccctgcccggtctgccctcaggtgggcattcactctgcacccctagcacagtgagggtgcggagcgtgggggctgtgcccacgggagaagaggggagggcccaggcccgctcaccgtctcggggggcagggtacccagctcggccaggctctggtacatctgctgggcgctgccctccaggcacgagccgcagccggccaccgacagcgcgtcgcctggcgggggagggcgggtcagagcagatggggcggggccggcgggaggcggggtgggcgcgctccgcgctgcgggtacccgagaacagggcgggtgggtccgggcaatcgtcctcccacaggaagtagctcatgtggccggcggtgtggccgggcgtcaggaggcaacgcacgtggatggccccgaactgcggcggaggagcaggcggacctgtgagggcgggtggacccggggcgccctccccgcccctcccgggagcgcgcgctcacccgcagctcctcgccgtgcgccagcctgcgcgtcagcgagaagatgcgctcgtccgcgcccagcaccgccagcccgggacgaagccgcgccagctccgggtttccccgcgcgtggtccctgcgggcgggcgggcgggggccgggttaggtcgggttgggacaaggcggcgtcctcgtgcctccccgcgccccgccggcgctcaccagtgatggtgggtggtcagcacagcggtcagagacaccccctcccggcccacgatctccagcagctgaaagggacgggagtgacggtaacacagacggtcccggtggcccactccctccatatcgggatccgccgcgctcactgccccaggccggccagagccccggggagcgccggggagcggggacccagcgggcggtgactgcgcccagcgcgtgcagggaccgccaggcagcagcgaaagggcggaggccagaggtgccgtaacttcagggagccccaagataaacaaggaaccccagccgccaatgacttccggagagcagagcacgtgggggctcgctcctaccaggggggtcggggaggctctcgggggacacggccgggtccctgcggcccgcggcctgccctcaccctcttgggcacagccacgtccacggccaccgcctcgcgcgtgagctcctcgatgaccaggtacatgtagttgtcctcgagcacggggatgaccttgaccttcatggtcacggagctcggccaccggtgcctgctccaaaacaggccccccagcccacggtgccccttcagggcggggcccgctctccacaccctaggaagggctgtgcgaagcgggctcggtcaacacgctgggggccaaaagagaagcccggctccccaggaactccccggcactcgcgtggaattccacgcaccgggctccagcaggagcggaacccggccggtccccaaccagccccggctccgcccccagtccgagccccagtccccaaaggccacgccttcctcccaggccccgcccctcggccccccgccctgccgccgcaagacccctgacccgggacagccgcgttcccccgccgcccgcctcaccggcacggctgtgctgaggacccgaaggacagactgacggaggcggggcctcggccgccggtcacggggtccggactgagcgcggcgctgggctcgggagccgccaaccgcccccctccgcggacgcgccccgcccccgcccccgcccggcccggatcctgcgcgcgatgagaccacaaggcccgccggcggtgcgcgtgcccggtggggcgccacgcgcacgctccgaccccgccgcgcccggcgctggcacctcctccaggaagccctcccgacgccccggctgagccagtcgtttccgagttctccggcccctgatggggacgtctgcgcccctcttctcaggccagaggtgcagagatatacttcccccgtcccggggctcagccagcactgctaggtacacagaaggtgtccagcgagtgtagctcagggcatcctgcgggcgggctgccgctcc

SEQ ID NO: 14935 - DNA, 2300 bp, Homo sapien
cacctggccctccttctccagtgtcacctcctggaagtctttgttcctggggggcacaggcggggtttgtctacatggcacacccaccaggctcctgcctgcctggaaggggaggcctgctgggcttcaggggatgaccgggtacctcccagggctctctccctctctcctgggcagagggaaggacaagaacggagagagagggtggaaggctcacttccttgagtccagcaggggacctcacctccagcctcgggctgtctgtgaaacaggcctccctccccagggatgtctgtgaggccctggccctccctcctgggatgtggtcgcgtgcctgcgccaggcacccatcacctttgcccatgctggcctctcgggctcagggtcaccatcccccacaatgggccgactgaggcctggagtgcttaggtgccttcacaccctgagcccgccaggagggccctgcctggccccagggtcccctccaaaccctgcaggctgccctccacccagcccacctctgtgggaggaccccaggggaggcagcagcccgaggaaggctgggggctgtgtggccgctctgcccagagatctggcccatcccactgacctcaggggtttgtaggtaacctcagccacatggattccaaagagctctcgggccgcgtgccggaacacgtgctccaggtagccccccgagccccctccccgatggctggtgggctcctctgcagaggcaccgctgcacctggcaaggagggaggggcctcagcacagctggggctgctgcctgccaacctcccgagcagggcctctgtccctcacacatgagcgtttgcatttccaggtgggagacaagtcacagacacagaggaacagctcctgtgtcaccagccatcacaggggcccagccacttcttgtttttttttttgagacggagtcttgctctgtcgcccaggctggagtgcagtggcgtgatcttggctcactgcaagctccgcctcctgggttcaagcaattctcatgcctcaacctcccaagtagctgggattacagggcctggcatggattaccaccatgtctggctaaattttgtatttttagtagagatgaggtttcaccatgttggccgagctggtctcgaactcctgacctcaggtgatctgcccaccttggcctcccaaagtgctggggtgacaggcgtgagctactgcgcctggctatccagccacttctgtggacgccaagatgggctgcggggaggcaagcccagagcagggggatgctatcctcagaggcagcgttagaagctaaaataacagttcttggtggcagacatacgtacaggctgtccagaggggctggttccaggtcggggagggagacgccctcttcctccagcaacctgaaaacttctcctgcaaagaagccacagcgcagacactctttagcggagatcccagcaacaaagtcagagaacatccaagccacctgcatccccagcagtctgcactttggccccagaaggccccaaatgtccaccctagcccgtggtggggaggccaggcccggtcactcctgaagcccctctggaggctgcctggtcctgcccagggaggtgtgccagcggccaggccactctgctcacccagtgtccatctgtccatcctcttaggcagtctgcttttcttttttttttgagacggagtctcactctgccgcccaggctggagtgcaatggtacgatctcggctcactacgacctctgccccccgggatcaagtgactctcctgcctcagcctcccgagtagctgggattacaggagcaccaccactactcccggctaattttcgtatttttagtagacatggggtttcatcatctcggccaggctggtcttgaactcctgacctcgtgatccacccacctctgcctcccaaagtgctgggattacaggcgtgagccaccatgcccggccacagtttgcttttctgcctcacatttgggagactgtggggctgctcgactcaggaatggggtgactcatgggagctgaagaggctgcattcgagaatctctgcccacctccaaagactcatttcagagccaacaaggaggtattactgagcgccacctggctgcaggtccccaagacaggccagctgcaaatgggcccacctggctccaaggggagagacgaaggtacgtgcacgcatgcgagcccccacactccagccagggcccccacaggcaggatcctgggcagtcgccacctgtgcccagggctcaggaatcag

SEQ ID NO: 14936 - DNA, 2300 bp, Homo sapien
acaagtcaggcagagagagagggacccacacgcgggtgcctctgctgggtccagggcacgatcaggcaggtttactgagcagttctaatggctgggcttggagctggctggcgtgttccaggagtcctgctgtgtgtgaggggtggccactatggtaggtctgcacagtcagggtccgaggggccagtccagcaggctgcgtccagctgtgccctagggagggtcaccgggagcagcgcacgtggcaattccctggaccagccacgctgaagagctgggagggtggaggactgagctgctgggtggctgcctctggggtgggaaaccaaggcctgggttcacaggggatgccgaggcaacgtggctttaggaggtccccacagtggggctggggctttggcgcaacgtggctttaggaggtccccacggtggggccggggctttggcacggcaagcaggtgcgacacacgtgccctggcagcaccatggtggtccacacgccggcgtgtgctcgtgtgggcgtcccgcatggggttaaccaggcacccaccttcaccttccaggggtgcacttcgtcttcgacaccgccttctcaaggcacttcagcctcctggagagccagcgagagtttgtgcggcgattccgaggacaggccgactgcagacaggcgctgcccctgctggcctctgcctgcccaggtgtgctcatggtgcgggtggtgggagagtcaagttcaagtgcagttgaaacgtgaggtgatatggacacaaatgacaaggcgggggcatggggggtggagacgcaagcaggttttgcgggacgggttggaaatgttggcacaaatggccttttctggagaagaggctgccctcccgtgggagccacgcgcagtcacctcaggtccctaggcggtgtcgcctgcacgccgagctccgcgtggtggtggggagaacaggaatgagcactctttaatgtcatcatgatctcctgtatgagcgggcccgcccccagaatgtcgtgctgctgcctgtgggtgcgggggccgccgtgcgcccccgccagccccgtgtgccccctgtcacctcaggctggatctgctatgccgagaagactcacggcagcttcatcctcccccacatcagcaccgcccggtccccgcagcaggtcatgggctccctggtcaaggacttcttcgcccagcagcaggtaacggcgttgggccagccccagactcaggctggggagcggccagaagtgactttgctggcctcttgccatgaggctgcaggaaacagagtcctcgctgtgctgtgcggccttccccagcacacctccacccttgttccctcctggttcaggcccttcctcttctgcagcagagggcttcgttctgatccagaggtgctcactgctcacccagaggcagccaggcctgaggctgagggagcaggaggccctgggcagtccgggcctggagcccacccctccggccaccaggtccacgaggatgcccagcacgacccccacctgaggcccagcgggatagaagcctgaagacactcagccagcagggggcgggagagggcgagggcggccccggtggtgcctgggcctcgagcgcccatgtcccctgcggcacctcttgcctgactgcacgcggattttcacccggggctggagctggttggttcccccgtgacatccgtttccccggctgctgtgcagtgagccggcccgagccgtgggaaggccacttctcctccgctggacttggctgttagggagcgcaggcacactgggaatgggtcagtgtcattttctgtcacagccagggcccgtcctgtccagggacacatccgcagagccggcaggaggcttgctgggaaatggagtgaggctcactgtccctcggggtccggcctggctgcaggatggctgagttccaggtcccgtctcagccaccttactgctgggattggggagacaagtgtttgtttctccttgtagcacttgacccctgacaagatctaccacgtcacagtgatgccctgctatgacaaaaagctggaagcctccagacccgactttttcaaccaggagcaccagacacgggatgtggactgtgtcctcacaacaggtgcggtcacgccgtgcggccctgagccctcaagcctcctggtctgattcctgagccctgggcacaggtggcgactgcccaggatcctgcctgtgggggccctggctggagtgtgggggctcgcatgcgtgcacgtaccttcgtctctccccttggagccagg

SEQ ID NO: 14937 - DNA, 2300 bp, Homo sapien
attcagacccctcgttcttttgtttgtttgtttgtttgtttgtttgatacagagtctccctcgatggcccaggctggagtgcagtggcatgatctcggctcactgcaagctctgcctcccaggttcacaccattctcctgcctcagcctcccgagtagctgggactacaggcggccaccaccacgcccagctaatgttttttgtatttttagtagagacggggtttcaccgtgttagccaggatggtctcaatctcctgacctcgtgatccacccgccttggcctcccaaagtgctgggattacaggcgtgagccaccgcgcccagcccagacccctcattcttaaagaatagtacttcctctctaagtgataagatcctgatgaaactgttaaaattcaggctgggcgcggtggctcacgcttgtaatcccagcactttgggaggccagggtagggggggcggatcacctgaggtcaggagttcgagaccagcctggccaacccccatctgtactaaaaatacaaaaattagttgggtgtcgtggcgcatgcctgtaatcccagctactcaagagggtgaggcaggagaatcacttgaacctgggagatagggactgcagtgaaccaagattgctccactgcactccagcctgagagacagagactccatctcaaaaaaataaagaaactgggcctggcgcggtggctcaggcctgtaatcccagcactttgggaggccgaggcgggtggatcacgaggtcaggagatcgagaccatcctggctaacacggtgaaaccccgtctctactaaaaatacaaaaaaaaaaattagctgggcgtggtggccggcgcctgtagtcccagctaccgggaagctgaggcaggagaatggcgtgagcctgggaggcggagtttgcagtgagccgagatcgcaccactgcactctagcctgggtgacagagcgagactccatctcaaaaaaaaaaaaaaaaagaaactattaaaattcacctgtctgccatttggactctaaaaaacgtctgcctgatctcatgaaccactgcaccaagagacgatttccagcccagcactgggggcccagcccacaaacgaagggaacccctggaaggtgctggggtgctggtaggcgtggctgtcggtgcagtggcagttggtttggaggagcctgtcagcctctgcccagcaccctgtggcaggcaaggctttgtgccttggggcagaaccaacgtaggaatacaaggcgagctcagattgtgatacacaggcctagcagagagctgggctgcgaggggttcccacacagttcccacccagtcgccttactcctctggctgtattccgggccactgcagcacccctggccctgctcaaaccattcctgcctttgcaggagaagttgggggagctcgagctgggtgcgttttgcatgtaagaaaagttgctgaggcatgtcccggaggcccccgactggaacaccttgttcctgcatctgtttggcgagtctgacggttgtttctgccccgcccaccggaggccaggctcccaggcttcctccctctgctctcctcttcctgtgccttcgtcctttcctcctttgtcctcagctttcccgcctcctcctttcagagcccaccttcggcattttcctgccctacagccctgtgagtgtgcaccggggccagcaccccgtccagggccccatgggtgagtggggtggctgctgctttgctgagataccagtggcaagccttagtcctgtgattcggatgcactaaccaagtggtaccaagaagcagacttgacggcattatgaaactgtagagcgtgcgtgtgcatttttgtaatacatacctaatttttaaaaattcagcggcacacaagcccagccagcagccatgttggttgtcggttatgagctggactccactatcctctgtctccatgtcctcgtgcagagggggcccctgtgcaccgggttcttctcccttgtaggacggcgggacccggaggctggagaaggccaaggtctcgctaaacgactgcctggcgtgcagcggctgcatcacctccgcagagaccgtgcttatcacccagcagagccacgaggagctgaagaaggttctagatgctaacaaggtaagcagtggtcggcctggtgactctgctttaacctgaaatccatcccagcagccgacaacgcgttttgccaagggcagctcgtgtggtgccgacgtccgtcgtgcgggtggcgcctgcctttttgaggcttggaatcttg

SEQ ID NO: 14938 - DNA, 2300 bp, Homo sapien
gtttgcaggcgctgttagcactggccttcctgcacactgggaacttcagtgccgcaggatgttgggaacccgatccctgggtgagagcagtggggcaggaagaagacggtgggaccagcctcagtccctgagtgcatggctcctggcagagccttcaggctgtgcggctgggcagccatccttgaggcctggcctcccagggaacctccgcccactcacaggggctgatttggggtctcttcctgctctaggagtgcatcaagcctgtcaaagtggaaaaaagggcgggaagtggcgtggccaagattcgcattgaagatgacgggagctacttccaaattaaccaagtaaggcacaggaggctgctccaccatctctcctgcccggctgatccgaaacacttttctctgcttcctcccgtcacagagcggtgaccccgagacactccaggtctcaccagtcttttcccactggtcgaattcacctgccatctgggaggctgggggtcagggtgcctggggcaggtgaatgagcagcacccaggccaaacagcttgatctgctcagcagaggggctatttgcagagatggtggatcctgtctgcgtctgcctgttccccctagttctaaccatgtaagattttctaattcagacccctcgttcttttgtttgtttgtttgtttgtttgtttgatacagagtctccctcgatggcccaggctggagtgcagtggcatgatctcggctcactgcaagctctgcctcccaggttcacaccattctcctgcctcagcctcccgagtagctgggactacaggcggccaccaccacgcccagctaatgttttttgtatttttagtagagacggggtttcaccgtgttagccaggatggtctcaatctcctgacctcgtgatccacccgccttggcctcccaaagtgctgggattacaggcgtgagccaccgcgcccagcccagacccctcattcttaaagaatagtacttcctctctaagtgataagatcctgatgaaactgttaaaattcaggctgggcgcggtggctcacgcttgtaatcccagcactttgggaggccagggtagggggggcggatcacctgaggtcaggagttcgagaccagcctggccaacccccatctgtactaaaaatacaaaaattagttgggtgtcgtggcgcatgcctgtaatcccagctactcaagagggtgaggcaggagaatcacttgaacctgggagatagggactgcagtgaaccaagattgctccactgcactccagcctgagagacagagactccatctcaaaaaaataaagaaactgggcctggcgcggtggctcaggcctgtaatcccagcactttgggaggccgaggcgggtggatcacgaggtcaggagatcgagaccatcctggctaacacggtgaaaccccgtctctactaaaaatacaaaaaaaaaaattagctgggcgtggtggccggcgcctgtagtcccagctaccgggaagctgaggcaggagaatggcgtgagcctgggaggcggagtttgcagtgagccgagatcgcaccactgcactctagcctgggtgacagagcgagactccatctcaaaaaaaaaaaaaaaaagaaactattaaaattcacctgtctgccatttggactctaaaaaacgtctgcctgatctcatgaaccactgcaccaagagacgatttccagcccagcactgggggcccagcccacaaacgaagggaacccctggaaggtgctggggtgctggtaggcgtggctgtcggtgcagtggcagttggtttggaggagcctgtcagcctctgcccagcaccctgtggcaggcaaggctttgtgccttggggcagaaccaacgtaggaatacaaggcgagctcagattgtgatacacaggcctagcagagagctgggctgcgaggggttcccacacagttcccacccagtcgccttactcctctggctgtattccgggccactgcagcacccctggccctgctcaaaccattcctgcctttgcaggagaagttgggggagctcgagctgggtgcgttttgcatgtaagaaaagttgctgaggcatgtcccggaggcccccgactggaacaccttgttcctgcatctgtttggcgagtctgacggttgtttctgccccgcccaccggaggccaggctcccaggcttcctccctctgctctcctcttcctgtgccttcgtcctttcctcctttgtcctcagctttcccgcctcctcctttcagagccca

SEQ ID NO: 14939 - DNA, 2300 bp, Homo sapien
gtagctaggactacaggcacgtgccaccacgcctgataagttttttttttttgagacagtgtcttagtctgttgctcaggctagagtgcaatggtgctatctcagctcaccacaacctccacctcccaggctcaagcgattctcctgcctcaccctccttagtacctgggattccaggcacaaaccaccatgctgggctaatttttatatttttagtagagatggggtttcaccatgttggccagggtggtcttgaactcctgacctcaaatgatccacctgcctcagccccacaatgtgctgggattacaggcgtgagccaccgcgcccagcctaatttttgtatttttagtagacggggtttcaccatgttggctgggctggtcacaaactcctgacctcgggtgatccacccacctgggcctcccaaagcgctggtgagccaccgcacccgaccccctgttctatttttaatagaagatatttcagcccctaatctccaagctcggccaggtattgccaggtggcgggatggctgggacctggaagctcacctggcccaggtgctggggaaagctcctccgtgcagcagcagaagaaagtcctgtctggccgagaggagcagctgcaggtgatggagaaggccacacaggctggtggcccaaaccccacaggcaggtgcaggagtgcccaggccgcatccaggtggggacatgtggtcagaatcagggcctagaaccctggggagggtgcggcgcaggctgggacctaggatgttgccactgtgagatctccatgggctgagcctgcttgggccggaaagatgccagcctcgatccaggagtttcctgaaaagtccccataaaactggccattagacatgtaactggccatatgatgccagatatacatgtaactggccaggcgcggtggctcatgcccgtaatcccagcgctttgggaggctgaggtgggtggatcactaggtaaggagttcaagaccagcctggccaacatggtgaaacccagtctctaattaaaactacaaacattagccggatgcaatggcaggtgactgtaatcccagctactcgggaagctgaggcaggagaattgcttgaacccaggcggcagaggttgcagtgagccgagatcgcgccactgcactccagcctgggcaacagagtgagactctgtctcaaaaaagaaaaaaaaaaaagtgagtcggggtcgggcgcggtggctcacgcctgtaatcccagcactttgggaagctgaggcgggcagatcacgaggtcaggagttcgagaccatcctggctaacacggtgaaaccccgtctctactaaaaatacaaaaaattagccgggcgtggtggtgggcgcctgtagtcccagctactcgggaggctgaggcaggagaatcgcttgaacccaggaggtagagcttgcagtgagccgagatcgcgccattgcactccagcctggacgacagagcgagactctgtctcaaaaaaagaaaaaaacgaaaagcgagtcggcccacagggtcctgtttcagggtctcccaggggcatggacttttccagactggtctccaagataacagaaaaaggggctggaggccctgggagcggctccccaggaaggggagacctcgtgcctatccatgctttcttccctgcctgaattccccaacacgagctgagcgcctcctgtgtgccaggcgcgttccgggttcttgggttgcatccgggagcacctggtccgcaggtacgcagaggatgaggaaatggacggagccagatcccctccgcttccttgtgaaggcggagagactccggggccggagctgcggcgctggcccgaccaacccctgcgccccctgcaccccaacccggggcctggggcgcgcgggaggtggacgaagcggtaggtcccgggttcccgcgaggtgggcggggagccgcagcgccggggctcgtcagcagagggcgccggccccgggacgaggtgcgcatgcgtcctgggggcgctttccggcagcgtggcggaaccagccacttcgtttcgcgccgtttagcgacacctgcgcgcggcggcagtgcggccgtcatggcgtcgcccttcagcggggcgctgcagctgacggacctggatgacttcatcgggccgtctcaggtgggccggcctgggcgggcggggtcgaggctgcgctcggtgccctgtcgcgcggagggaaattgctctgcgccccacttcctcccctgaggaatgagatccgaatcccgggagcccggtct

SEQ ID NO: 14940 - DNA, 2300 bp, Homo sapien
ggttcacgccattctcctgcctcagcctcccgagtagctgggactacaggcgcccgccaccacgcccggctaattttttgtatttttagtagagacggggtttcaccgtgttagccaagatggtctcgatctcctgacctcatgatctgcctgcctcggcctccaaaagtgctgggattacaggcgtgagtcactgcgcccggcattttttttttttttttttttttttttgagacagggtcttgctctgttgcccaggctggagtgcagtggcgtgatctcgactcactgcaacccctacctcctgggttcaagtgattcttctgcctcagcctcctgagtaactaggattacaggcatgtgccaccacgcccagttaattttcatatttttagtagaaacggggttcctccatgttggccaggctggtctcgaactcctgacctcaggtgatccgcccacctcggcctaccaaagtgctgggatgacaggcgtgcgccaccacacagggcctcatttaaagattctttatagagatgaggtgtcactacgttgcccaggctggtcttgaacttctggcctcaacggaccctcccgcatcggcctcccacggtgctggctgaagggtgagcccaggctggccacagcgcgttttcatcattgtccgcagcttgcagtcggctggttcagagcttagccgggcacatgggcccctctgaggctcctgttcagggctcagccgtgtctacggggccctccgagctcttcctggaccctcctcggctccttcagttcagggctcagctgggcacgtgggcgcctccttggctcctccggctcaggcctctcctcgagctctgggccctgagtattctgggctccttccttggtttcctttggcctttggccgggaaagttgtgggtgtccgtggcagcctgggccacttcacagccccgcagccaacctgcggctccttcagagcaaagctgtgtggacacaaagggaacgccactcggagctggcctctccctttacctgtgagttcccgcccaagccggctgccttctgtcccctccccagagcccttgggtaactggtttgctacaagagtgtctggaatttttcagttgttctctgcggaagggagtttttaaaaggcccttaatcccttcttgacatttgtaagttgacgcttacacctggcagccttgctgaattctgtgtgcgtgaaggtccgattccaccgcgagtcacgatagaaaacccactctgtggagagaccagagatgaccgccgcgcacacctccgttcagcacacaaacctttgcaggtgttcatagcggaggcagattccgtactggggataagagctcacgacatgctgggaggggtttcaggggcagggagggggcttctgtggccccaggtcaggaggagcagctcttccatcagcagcaggcagccagcccagatgcgtagggaagacagctcccacttcgccaggccagagagcgcccgggggcagctctgttccagtcgaccctgcgagaaaggggtgtgcgtgtgcctggagctgggccccgtcctgcctccctgacctgtgtgctcccacagccctgagacggacggctcacagccttgcgaggcccacactgcactgggggtcaggcttgtgctcccgggagtcctgtctgggctgcgtggccaccatccagagcctgctgacctgcgactgggggggccagtgctccctgggtttcagcacctgagaatcagagtgggatcccgtgaaacctgggcccaggctcccacccacgccccacacccacccagggaagccatgaaacctgggcccgggctcctacacatgccccacacccacccagggcagccgtgaaacctgggcccgggctcccaccctcgcccaccgagggcagctttgccttcctgggcatccctcctcccccaggcctggcccgctgcctgtccaaggctcctgtgcggggtctccacccacacattcctggggcgtgaggcgccaccactccctgctgccccgggcaaagccgtcatttgttccctttgacggcccgggaggctgccaggctctccacccccacttcccaattgaggaaaccgaggcagaggaggctcaggtgtggccaatcaccctgcacatcagagttaccctgggcagggcccactgagacctgggaggggccactcgggacctggagggctgggggctgcccgggcgttaggggtaaagctccctacccaactgcgcagaaggcctcag

SEQ ID NO: 14941 - DNA, 2300 bp, Homo sapien
gagtgaggatgacagtatttaggacagaagattgtgttcaggtcaccactggtgaggacagggccagggtggtgctcggtcctggagaatctaggccagccagacccccaaggaatcagtcaggagccagcagggaccctgtgtcaggtgagaagctgagaggctgcagggcgtggagttaagaacgcaggagtgcttgttgccagctctgccctgatgctcagggtggcccaacataagcttcgtggccctgtgcctcagtttcccttctgtcaccaccaggacaccgcccaccccagacacacccgtgagcggcttcagcagcactttggagacaggatcgcctgcgtacagcccgtgttccagaaccacgagatctgtgaggcttggctttgggttctcacaacctggggcgcagaaggcaggtgtgaggttagtgggactgacccggggcccaggcccaccccaacgcacgatgcccgcccggtgggtccctgcctgcccaggcccaccccaacccacgatgcccgcccggtgggtccctgcctgccacaccctgcgagccctcgatgcacatggtgtgggcccggccctccgtgctgttcctgccaatggcatggctgatggttacccggctctcctggatgtgcccccgcagctgcaggagagggagaatcgcacgcagttcacggggcagcccagtgctgccggggagcccacctaacaccaagcaaccacgtagagcgtggtgggaggctctgagccagggctgcccaagtggggtgggaatcctgagtccccacgccccaccccaggactgaccaggtcttaccaatgccaggtaagccttggtcacgcgccgctccttgaagcacctgtacgcgctgccggcggctgccttgtttagggccacgcacagcgccccgctggtggagaaatccagctggtggcagaacctggagtgggacagagtccagagtctgagccactttcctccacagacgccaccgtggggctccggccgccccccctacctgaacccgtagcaggtgtcagggtcggccagctcgggaaagcggtaccgcagctgcttctgcagggtcagagtctcccgccacgccttgctgtcaatgcgaacgtcccagtgcttgttgaccaccaggaagtcgcggctccggtacacgatggacaggttctccacgctgcctggctccatggccggcctgccgagccacgcgtgggtgcgtgtgctgtgagcacgtggtgcgcccccagcccagcatacagaggtacccgcaccgccccacccgggctccggtgcgaagccaccgagccgggtccgcagccctactgtgcacctgcatcctcagtccccgagatcagtccccagggcgtcagctggggagtcaaggagtcagcctgctccgggctgacctgaagggccctgcctgacctaagcctggagaaagagcccgttccaaacctgccccacagatcctccccacagaccctcccctccaggggatgcacgtgaatgcctctgcccgacggtgggggcggggaggggctgcagcactaccaggcccggcagccaggtctgcccgcagcgcgggttagggctggggcctcctcgctccccgcagtccgcgcagacccgcgccccgcacaggcccggtgggcaggccgaccctggctccgagcccctcccgcgcccacgcccacgccaagaccaacctgctgccgggccgtgcagtccaggcccccgatgccgtgcccggcgccggctccagccgcgcgcccgcgcgctggcgacccagagaccctggaagctccgctccggacgcctggcagcgcttccgccctgcaccgctgcgcgcgcagccccgcccccccccccggcccgcccccggcccgcccccgccgcggaagggcggctgcggcggccaatggcgagctccccaggacaggacgcgggggctgcggagcaggaactcgccccgcccacccctcgcgcagccccgcctccgccacgccaaccaatggcgcgcgccgccgggcacgccggctgctgattggcggcgcccggcacgctcggggcgggcagtgcgcgacggcggcggcggcgcgggaggttcggagcgggagctcgggctcgcggacggtatggaggactacgagcaggagctgtgcggcgtcgaggatgatttccacaaccagttcgcggccgagctggaggtgctggcagagctggaaggtggggcgcggcccccggccgttggggaggagctgcgaaagccggg

SEQ ID NO: 14942 - DNA, 2300 bp, Homo sapien
atgcagggaaccagaggcctcctcagcctcgcgcccactccggaggccctggggcaatgccgccaacctaccgtggggcagggacccggccggctgcaggtcggcgtccacctgcctcttcctggcgccgccctggctgctgcccacagatgcggctggggcgggactggaggccgcgtcccctctggcaagggcctcctcgaacgtccgcgggggtcggcccgcggtgaacagggggaccccggagggcgacggagtcgacgcccctgctgggagaggagattgtcagcggccgccccgagacagcagatcccgccagcggcgacgtggaggccccttcggcccccggcacgccctccccgaggtcgccactgtcccggctttcgcagctcctccccaacggccgggggccgcgccccaccttccagctctgccagcacctccagctcggccgcgaactggttgtggaaatcatcctcgacgccgcacagctcctgctcgtagtcctccataccgtccgcgagcccgagctcccgctccgaacctcccgcgccgccgccgccgtcgcgcactgcccgccccgagcgtgccgggcgccgccaatcagcagccggcgtgcccggcggcgcgcgccattggttggcgtggcggaggcggggctgcgcgaggggtgggcggggcgagttcctgctccgcagcccccgcgtcctgtcctggggagctcgccattggccgccgcagccgcccttccgcggcgggggcgggccgggggcgggccgggggggggggcggggctgcgcgcgcagcggtgcagggcggaagcgctgccaggcgtccggagcggagcttccagggtctctgggtcgccagcgcgcgggcgcgcggctggagccggcgccgggcacggcatcgggggcctggactgcacggcccggcagcaggttggtcttggcgtgggcgtgggcgcgggaggggctcggagccagggtcggcctgcccaccgggcctgtgcggggcgcgggtctgcgcggactgcggggagcgaggaggccccagccctaacccgcgctgcgggcagacctggctgccgggcctggtagtgctgcagcccctccccgcccccaccgtcgggcagaggcattcacgtgcatcccctggaggggagggtctgtggggaggatctgtggggcaggtttggaacgggctctttctccaggcttaggtcaggcagggcccttcaggtcagcccggagcaggctgactccttgactccccagctgacgccctggggactgatctcggggactgaggatgcaggtgcacagtagggctgcggacccggctcggtggcttcgcaccggagcccgggtggggcggtgcgggtacctctgtatgctgggctgggggcgcaccacgtgctcacagcacacgcacccacgcgtggctcggcaggccggccatggagccaggcagcgtggagaacctgtccatcgtgtaccggagccgcgacttcctggtggtcaacaagcactgggacgttcgcattgacagcaaggcgtggcgggagactctgaccctgcagaagcagctgcggtaccgctttcccgagctggccgaccctgacacctgctacgggttcaggtagggggggcggccggagccccacggtggcgtctgtggaggaaagtggctcagactctggactctgtcccactccaggttctgccaccagctggatttctccaccagcggggcgctgtgcgtggccctaaacaaggcagccgccggcagcgcgtacaggtgcttcaaggagcggcgcgtgaccaaggcttacctggcattggtaagacctggtcagtcctggggtggggcgtggggactcaggattcccaccccacttgggcagccctggctcagagcctcccaccacgctctacgtggttgcttggtgttaggtgggctccccggcagcactgggctgccccgtgaactgcgtgcgattctccctctcctgcagctgcgggggcacatccaggagagccgggtaaccatcagccatgccattggcaggaacagcacggagggccgggcccacaccatgtgcatcgagggctcgcagggtgtggcaggcagggacccaccgggcgggcatcgtgggttggggtgggcctgggcaggcagggacccaccgggcgggcatcgtgcgttggggtgggcctgggccccgggtcagtcccactaacctcacacctgccttctgcgccccaggttgtgagaacccaaagccaagcctcacagat

SEQ ID NO: 14943 - DNA, 2300 bp, Homo sapien
ctgcacccctggggctctgcacaggacccgctttaagcaaatggcaggggtgaggggctccaaggaccctttcctgagcagcactggcccacccaccgtgcaggaaggccacagccacgcacctgcacccccggggccatggggtcagcacgcagcaccagataagcccggacgccctccgtggatgtcacgtggacgtagtcctccaagatggggggccgcctcaggacgggattgcgggcagctggtgaggcccgtgtgagacccacgtcggcagcagcttctgagactctggagagagaccggggctcagtggcagaaactcaagcgtggggtcacccttggatatgggtgtccgagactgctctcagccatggaaccctccccaccccccaggcctcatccagggcacgggatgggctccatctgagtcccactggacagatgggatgggacgcccatgtccaagccacacacccgtggccccaaagctctgcgaggtcctcagggctcggcggcggggtgatgtccgtcggcgaggagtcgggagggggcggctcctccatctcctccgatctgaagttcagcctcttgaccacctgcagcctaggccgtttgatcctgggggctgggggagacacatgcagggaaccagaggcctcctcagcctcgcgcccactccggaggccctggggcaatgccgccaacctaccgtggggcagggacccggccggctgcaggtcggcgtccacctgcctcttcctggcgccgccctggctgctgcccacagatgcggctggggcgggactggaggccgcgtcccctctggcaagggcctcctcgaacgtccgcgggggtcggcccgcggtgaacagggggaccccggagggcgacggagtcgacgcccctgctgggagaggagattgtcagcggccgccccgagacagcagatcccgccagcggcgacgtggaggccccttcggcccccggcacgccctccccgaggtcgccactgtcccggctttcgcagctcctccccaacggccgggggccgcgccccaccttccagctctgccagcacctccagctcggccgcgaactggttgtggaaatcatcctcgacgccgcacagctcctgctcgtagtcctccataccgtccgcgagcccgagctcccgctccgaacctcccgcgccgccgccgccgtcgcgcactgcccgccccgagcgtgccgggcgccgccaatcagcagccggcgtgcccggcggcgcgcgccattggttggcgtggcggaggcggggctgcgcgaggggtgggcggggcgagttcctgctccgcagcccccgcgtcctgtcctggggagctcgccattggccgccgcagccgcccttccgcggcgggggcgggccgggggcgggccgggggggggggcggggctgcgcgcgcagcggtgcagggcggaagcgctgccaggcgtccggagcggagcttccagggtctctgggtcgccagcgcgcgggcgcgcggctggagccggcgccgggcacggcatcgggggcctggactgcacggcccggcagcaggttggtcttggcgtgggcgtgggcgcgggaggggctcggagccagggtcggcctgcccaccgggcctgtgcggggcgcgggtctgcgcggactgcggggagcgaggaggccccagccctaacccgcgctgcgggcagacctggctgccgggcctggtagtgctgcagcccctccccgcccccaccgtcgggcagaggcattcacgtgcatcccctggaggggagggtctgtggggaggatctgtggggcaggtttggaacgggctctttctccaggcttaggtcaggcagggcccttcaggtcagcccggagcaggctgactccttgactccccagctgacgccctggggactgatctcggggactgaggatgcaggtgcacagtagggctgcggacccggctcggtggcttcgcaccggagcccgggtggggcggtgcgggtacctctgtatgctgggctgggggcgcaccacgtgctcacagcacacgcacccacgcgtggctcggcaggccggccatggagccaggcagcgtggagaacctgtccatcgtgtaccggagccgcgacttcctggtggtcaacaagcactgggacgttcgcattgacagcaaggcgtggcgggagactctgaccctgcagaagcagctgcggtaccgctttcccgagctggccgaccctgacacctgctacgggttcaggtagggggggcggccgga

SEQ ID NO: 14944 - DNA, 2300 bp, Homo sapien
accatgccaacccacacgctaggagctaggagttggtgcaagagccaacaagggtccccagggcggaagggccaaccaagtcacctgtgcagggtgtctgaaagcttctgggcctcctgaagcagccgctcccgccgctgtgcaaacaacaggctggaatcaggagggctcaggcggccccgccaccgccccccagcaaacccgcagcccctacctcgccgtcgacctgcttcttcagggaggctaaggacacacccagcaggtccagctggccaccgcctcgccatgggacgtggaggagagagccctgtggggaagggaggacaattgcctctgggcccctcctaggtcacaggattcacgtcagcccccatcagtgctcagggacccgggtgggacaaccccagtaagctggccagtgaggggtgggagactggacaggggtgccaaaggaatgaagccatccagatgggtcagctgcaaagggaaattgggggcagctttaggagaaaggaggaaagggcaaaagcaggaggggaagcaaggaggccctctccacccgaggccatacaaacaggctggacagcaacctgctgtggggaggctgtgtcctctaagtctacgccccatgacgcagcctccccctctgcacccctggggctctgcacaggacccgctttaagcaaatggcaggggtgaggggctccaaggaccctttcctgagcagcactggcccacccaccgtgcaggaaggccacagccacgcacctgcacccccggggccatggggtcagcacgcagcaccagataagcccggacgccctccgtggatgtcacgtggacgtagtcctccaagatggggggccgcctcaggacgggattgcgggcagctggtgaggcccgtgtgagacccacgtcggcagcagcttctgagactctggagagagaccggggctcagtggcagaaactcaagcgtggggtcacccttggatatgggtgtccgagactgctctcagccatggaaccctccccaccccccaggcctcatccagggcacgggatgggctccatctgagtcccactggacagatgggatgggacgcccatgtccaagccacacacccgtggccccaaagctctgcgaggtcctcagggctcggcggcggggtgatgtccgtcggcgaggagtcgggagggggcggctcctccatctcctccgatctgaagttcagcctcttgaccacctgcagcctaggccgtttgatcctgggggctgggggagacacatgcagggaaccagaggcctcctcagcctcgcgcccactccggaggccctggggcaatgccgccaacctaccgtggggcagggacccggccggctgcaggtcggcgtccacctgcctcttcctggcgccgccctggctgctgcccacagatgcggctggggcgggactggaggccgcgtcccctctggcaagggcctcctcgaacgtccgcgggggtcggcccgcggtgaacagggggaccccggagggcgacggagtcgacgcccctgctgggagaggagattgtcagcggccgccccgagacagcagatcccgccagcggcgacgtggaggccccttcggcccccggcacgccctccccgaggtcgccactgtcccggctttcgcagctcctccccaacggccgggggccgcgccccaccttccagctctgccagcacctccagctcggccgcgaactggttgtggaaatcatcctcgacgccgcacagctcctgctcgtagtcctccataccgtccgcgagcccgagctcccgctccgaacctcccgcgccgccgccgccgtcgcgcactgcccgccccgagcgtgccgggcgccgccaatcagcagccggcgtgcccggcggcgcgcgccattggttggcgtggcggaggcggggctgcgcgaggggtgggcggggcgagttcctgctccgcagcccccgcgtcctgtcctggggagctcgccattggccgccgcagccgcccttccgcggcgggggcgggccgggggcgggccgggggggggggcggggctgcgcgcgcagcggtgcagggcggaagcgctgccaggcgtccggagcggagcttccagggtctctgggtcgccagcgcgcgggcgcgcggctggagccggcgccgggcacggcatcgggggcctggactgcacggcccggcagcaggttggtcttggcgtgggcgtgggcgcgggaggggctcggagccagggtcggcctgcccaccgggcctgtgcg

SEQ ID NO: 14945 - DNA, 2300 bp, Homo sapien
tgggaacaggggatcgggctggagcagggagctccacagagccccggggcccctagcagtaagaggctcacatcccagggtgagccacatggcccacacaggatgcctctgtcaggggggcacagctgagtgtcacctgaaccctgcaggctgcagaggcttcagagggcaaagggtcccagccccatccccactcctcccggctggcccaggacactggagggggaacccaccccctcaagtggaaggagacctctccaccagggcccaagctggcccctcagggaaaatggaccagccccacactggcccctggctgcatgtccatccgctgggtgagcccaggggagggggcagcacaggctatctctggggtcagcccagccctgaggagggtgtgggggcggcgccagggcccaggtggcgggaggggcggggcacagccagggctctgcctggcggactcccggaacatcacttggccctcgctctcactcgcggtcgcctggccgttgtcattgtccctccgctgtcaccttttcaaggtaggtccgatgaacaggcgcccggggctagggagggcccggaggcccctcgactctcagctggcccaggtcagtcccctgggctcaccctaactcccggggcgagggcagctgccccgcaggcagcaaaacccaacccgagccggtgctgcaggcagggaggcggctctcgcggtgcgggggagctgtgtccatctgagcgccgtgcgccgcctgcagtgcccaccgagtcccgtggctgggggcgtccacggggtgcacggggtgggtggccaggcttggcggcagctgcgcgaaggtagggctgggcagcaaggactgggctgtgggcggggcgccaacaccccgggcctgggaggacccgcacgcagctagtcctgcgcccacggggctgagtgtagggtctccgagaaaaggcctgcaccggggatgggggcgggtaggggtgctggaactccagagtctccgggagggaatcctctgcatgaccctgatcactcccccagaaacctgcccccgctcgctccccggcctcccaccccactacgggcagaccctctgctggctgctgggagtctgcccaattcaccaccgggaccccaccagcctcaggccctgggcccctccctaggtggccggtgcagctgcacgaccaaaggatggggagactgttgggccaggagcccccttcacagccagaggcaggctccccgaaacttgacgccaacccccacccaccctcccaaggttcagccctgtctcccaaccttggggacgggggccagagttgggacggagtgagggactccctgggcccctggagtgggtagggggagaggcagggggcaacccacccccacttgcctcgaacttgtggcagttctgaggggtgtcaacctgtggctttcccaggctggccacaagcagaaagcacgcaggtaacgtgtgtggttcccagacacactggggacccaggggccacccacagcccatatcccagactcgggtagtatagcctgagcccccaagatcctgagcacacaccccacctgccagagaagcaaactgcagcagaacattcctgtccaggagtcctggctctggactgggctctgccatgcaaagcaaaggggcacacagcggggcggggcaggggccacctcctgaggacctcgccccacacctcacaccgtggtctgggtcagcctgcgtgggcctcagtgggagggtaggagctgggggcctgccgtgctgagcaccctttctcctgcctgcaagggatcttcgtaaggtgtgggggcctatgggggagtagctgaggatgtaaagtttcttgcagttaattagtcccagtgcaggaggcgggagctggggccttgtgggaactcgctctgtgccctgcaccctagcaacgcctaggggactggcccaggcagtggtgtggactctccccgcttcatcctgcggggttcagctcaggcctgcggggagcagcgggggtggggactacaggctggtggcctcggccctgtggcttcctcctgtgccctccagccccaggctggctgcttcagaagcccctgaccccatggaggagtgggacgtgccacagatgaagaaagaggtggagagcctcaagtaccagctggccttccagcgggagatggcgtccaagaccatccccgagtgagtgccccacctgcctgatttgcctctcatttgtctgccctgcgctggctgctcatttccatagcc

SEQ ID NO: 14946 - DNA, 2300 bp, Homo sapien
tgccctggccctgcccccacttccctcaacctcctcctgcccttggccttgggggtcacccagaccctgctcaggtaggcaggccgggtccaccatgcaggtacacacagccacttctctgctgagatgctgaggactggcaggacctgcccggaccacagggcagtgctcactccaggacgtgaccccacggcccgtctcacctgtcctggtggcccacaccacactccaacctgtgtcctgattcactgggggcactggccgtgttggacagagctcaggcaccctcagggaccttactgggtccagtgaattgaccaaaagccagaacctggagccttggcgaccccattaggagacctcctaggtccttccagatgagcagatgcaaaggccgcttggggtcctgagagtggccacagaacccccagctctcacaactcagctgcggacctcagggtgttcccccgcctggccctggctccaagccacctgctgtcccagggaacgtgggggacatgccctggggtcccccccgccttgcctgcatcctggggtggcacacacccctcccctaacagccattccactctctggcgcccaaagtggtgcccccagccacagggagagccctcagcagcccagaaactaaggtgcatccgaagtcacagcaccagggggcacaggcagggcagggcgggcactgggatcagggagacgtctagcccccaccatgccaagaggggcaaccatctgccctgaggaggaggcctcgtgccctgggctttaagctgccccaccccacccccaaatccataataaaaataatcccttccctaatgtgccccagttccagaggcgcctctgatccagccgacacacatcagggcgggaggtgcaggtggccccgattcacggagtcacactggcagggagtcctgctgagtgacttcagggacctgagcgcctgagagggacagggcccacctctccccgacaacccctgcagaggtctgggccaccccaggcaggccgggcggttccctgtgacactggggaaggcagagtgacctgctcacaggcccctggccctgccagcacccaccgagggcctggcccacgcttccccgggggtggcccagcttctgcagggactgtttggggagcttggccctgtgcccccagaggctgctgttgctgcctgggcgcccccacctaggatgcagcctggtatgtacgtcacctgctggtacatagggcacagctcccacaggagcccaaggggtacacccaagggcagggtgggaggagacacggggaaacgtgtcagaggaaaaggggccagtctcagctctgcaggctgacaggtgcggagccccaaagggaagccctctccccagagccttgaggtcacacaacccgagcccaagtgctgcagctgggggcacctctcccgaggcagcgtgccccagagcacccacagtggaccggtgttggggacgcctcaggccgccactctcagctcagatcagactgaaaagcacggcactctcctgccctcgggagctgccccgtgccggccactggtctgggaacaggggatcgggctggagcagggagctccacagagccccggggcccctagcagtaagaggctcacatcccagggtgagccacatggcccacacaggatgcctctgtcaggggggcacagctgagtgtcacctgaaccctgcaggctgcagaggcttcagagggcaaagggtcccagccccatccccactcctcccggctggcccaggacactggagggggaacccaccccctcaagtggaaggagacctctccaccagggcccaagctggcccctcagggaaaatggaccagccccacactggcccctggctgcatgtccatccgctgggtgagcccaggggagggggcagcacaggctatctctggggtcagcccagccctgaggagggtgtgggggcggcgccagggcccaggtggcgggaggggcggggcacagccagggctctgcctggcggactcccggaacatcacttggccctcgctctcactcgcggtcgcctggccgttgtcattgtccctccgctgtcaccttttcaaggtaggtccgatgaacaggcgcccggggctagggagggcccggaggcccctcgactctcagctggcccaggtcagtcccctgggctcaccctaactcccggggcgagggcagctgccccgcaggcagcaaaacccaacccgagccggtgctgcaggcagggaggcgg

SEQ ID NO: 14947 - DNA, 2300 bp, Homo sapien
accaggcgtggggctgtgccgctgggcctggcttggggcaggagcatcgagacctcccatttacagccaaccaagaccgtgggggaagcacaggaggccggaggcccttcacgctgactttagggcttggtaccacactggcatagggggctctgatcccttcctagcgggaagctgcagcagggtctcccgggactggcctctcgctgcggcctcaactccgaatgggtgggggagacagcccccgacaccagtcaactctccggggaacagagggataaagtgctgagctggggaccaaggaccagtcccatcctccacccgcctgtgccctaggctctgcagagggctctggctgtcctagggggaccctgtggcctgcaggacccaagcagcccgggggtggtgggtgaatgtgtgtggaggacacgctgacttccctcagtccctgcaaacaaaactgcaagcgtggggcctggggaaataacgaaggcagctcctcaccaaagaaactcactccgcctagttaactggagctcacggcaacgacttttctgtcatctgtgaaagtttcaaagtgattttcaaaaacaattgaagctcttaaacccaagcacagaaaacacaacggaaaacttcaagggatggggtggggggaggggggagggatagcattaggggatatacctgatgttaaaagacgagtaaatgggtgcagcacaccaacatggcacatgtatacatatgtaacaaagctgcacgttgtgcacatgtaccctaaaacttaaagtataataaaaaaaaaaaacaacttcaagggagtcccgggtgcgtggctgtcatccacacctgacctccattgtgtagtcaggggcctgctgggggcttggccgtagccacgctcgcgctgcagcctcggggtagcgtgcctgccttagctcggtttactctgaacagctgcaggtcagtgcgtggttacagtcgccggaggtttcctacttaagagacgcccgtctcctgaaaagctaggtatgtctttgctaaccagaagcatggcctgaggcaggaggtcctggaaggacagaagcaggctgggcggtggatccccacaggctcggacgccctagctcctggcctgaggactggaggtcagtgtgtcaccaggagcaatgccagctgggctcccggggatggggtgctgcccccattcggaacttgagtgtgtttaaggggaaccgacgggcaaaataacagcctgctgggttcagaggcccccactgccggctccaccaaattacgctcttccaagagtaccagctcagaagtcgcagattttccaaaagagagacacatttgctcagccgagggtggtgggaggccttgaggcgagacctttccaaggtctgtgggggaagggaagggagagtgagtcgcgccttctgccccaggccaccctccggtgtgtcgtggtccctggggcggctttcctaggagcccgtgatccgcagggtggtggccagagccgtgcagcagcctgacagggcttctggctttgggagagtccctgcccacacagacggacacttgctttgggatgactaggctgggtgcagtggctcacacctgtcattccagcactttgggaagctgaggctagaggatcccttgagcctggaaggtggaggctgcagtgaactgtgatcatgccacagctcacaacagggagaccttgtctcaaaaaaaaaaagggatgacaaaggtcccgtgattttgcctaaggacacctagaagttaagacggtgtgttctggcctctggctgtccccacggcttcattcaaacatcccgggctgggtggccaccactgtaagtgcatcagggcccaaggacccgcctgtacctctaaccacaggacatgctgtgaatccaggttggcctctaagaccctggatgggtcacgccacagcccatcagggatcctgggacccccagtgcaggggatggccctgctgctgcttccggggctagggaaaccacagaatgtccagtcttccaaatctgattggcaaatgggtttggcagagcctagccagatgctaggatggcccgaactgaccagaagcccccgtgcagaggtggctgctggggacagccaggtcaccccaacacgggtggggcagctgcacaccccacttaccaccccatgggtcacaggcctcgaacgtgcatcctgctacgtggagaccagaccacaggtggccaagctccgtctcgggaaataagcctggggccctgggcggc

SEQ ID NO: 14948 - DNA, 2300 bp, Homo sapien
ggaattcaagaccagcctggccaacatggtgaaaccccatctctactacagatacaaaaaattagcccggcgtggtgccggacgcctgtaatcccagctactcgggaggctgaggcaggagaatcgcttgaacccgggaggcgaaggttgcagtgagccgagattgtgccacactgtactccagcctgggcaacagagcaagactccatctctgaatgaatgaagcaaagcaacgttggtaaagaccccacaacaggcatctggcggctgtgtccagaccatgcttctcaaaggggacccagaaagcttccagggtccccgaggtcaaacctgttttcctgacacttctaagaacggtttccttcccattcttattattttttttttgagactgtgtctcgctctgttgcccaggctggagtgcgatggcatatggcatagtctcggctccatgcaacctccacctccagggctcaagtgattctggtgcctcagcctccggagtagctcggattacaggcgtccgccaccacgcctggctacatttttgcattttagtagacatggggtttcaccatgttgcccagggtggtctcaaactcccgccctgaggtgatcagcccacctcggcctccccaggtgctgggattacaggcctgagccgctgcgcccggcctccttcccactctcctgaaagtgtggggcggaatgttccggaggccaccggcttgcaagcagacgcagacatgagaatccagcacaaagtcacgccttctttttcttcccactacattttttttttatggggaaacagttgcttttccttaaaatgctatgttcacgtgcaatggatttattgctatttttacgtgaaaaggtgaacatttttaaatgctctgtttctggtagagtgaatgtccacagcggccgcccacgtaaacaaaagcccgaatggttttaggattgtgaagggtcctgggagccgggctgggccagcgttgggtgaggatccttccggaacccggggtcacggggacgatcacacggacctgtggctccacccggtggtgacggcgaggacggcgggagaccccagcgggcaggagcgcggcccgaaccgcgcggccccggggatccgcccagggcaggcaggcaggggtgccccgggcgctgggggttcggggctggccgtcctccgcggcggggcggtcctgcgggtcgcagggtcctgggcggcctccccgggctccaccagccagatgcctgcggcaacaccagcggagatcacagacgtctccagatgccggccagcgtcccccgggggcagaagcgcccaaccccgtgagagctgcccagtccacaacacagacaggacggtgccgagggaggcgtcagcacggagcaaaacattcgcacatgatggccgagagctccgggcacttgctccacctccactccgtcccacaggggctccaagccggccgctccccaccatgggagtcggggtggacccagggatggggaggccgtgtcggtccggcgtccttgccggtcccgcagcaatagcagaggggatgtctgtgcggtcgccgcccacggcagcatctgcagggtcagcggcgcaggaggggttcaggcctgggcgctccctgggggtctcggcctctccttgcctcctgcgggcctcacagaccccggggactcccacacagtccttgaggccccccacccacggctgcaccaaggggcagtgcctgagccctcagccccgtatgagatatatatgatatgtacacacacacacgtatataaagttacaggtgtgaaaaggttcatggtggcattttttggtagactggtttttagtaggatgagaaatgacatggttttattctatgtcttatgaagccaaatgtttacgcacagaaaagcaaacaaatcaaccttgaggagcccgcacctgatcaagtgagggactgttcctccctgtcgggggtaacctccctggttctgtcagggctcactccttcactccagagcggggactcaactgtcattcaactcatcggtgaggttttatttctacaattatgttactgttttttttttttttttttgagatagagtcccgctctgtcgcccaggccggagtgcagtggcgcgatctcagctcactgcaacctccgcctcctggattcaagcgattctcctgcctcagcctcccgagtagctgggattacaggcgtgcaccaccacgcccagctgattttgtacttttagtagagacagggtttctccat

SEQ ID NO: 14949 - DNA, 2300 bp, Homo sapien
gggtaggaggagagtcagcgccgtccgcagtgtagcgtgccaggaacaaggtgtgtgagttcgggtgctgctccgtccccgggacccaggacagctgacccttagggagcagcagctggggtctccccagggacaggccacggggcagctgggagccccacctggaagatgtcactcccctgccaggctccgtggtgcggcgtgcagccaacgtctcgctgggcgtcctgctggcctggctcagcgtgcccgtggtcctcaacttgctgagctccaggcaggtcatgaacacccacttcaactctcttcacatcgtcaacacttacggggccttcggaaggtatgagcctggggtccccgtcccccggagctgggtatatggggagactcagccctgaccagccacattcaggtggggttacagtgcaggcccccatgaccccaagtgtcccctgccccaccccagcctgacccaggcacaggccgtgctgtccccactaccgggcctggacacgcaggcctcctcgtcctggtcccatgaggcaaaggggcagggcccgaggtcaccaggcaggtgggctgcggccctggaatgcctactgggggcgtaagggagaggccaccaggccccaaccccctgcgtgggaatgccaggtagtgccacctgaacacaggcaccctccctgtcctggggccagccccttggcctctgtccccctcatgtccaccctgagctgccgaggggcatggggcacatggcggctgcagctgggtcttcacgggcagagaaggtgttctcgaatgagaccctggggccacagttcccaaaagttctcctcagccccacccagcctctcagtagcccctgaccaggaggcaggtggaggctgtagccctccccctgggccaggatggacagtcggggaaccccccccacccatgcaccccactcggcccagccggtgtgtgacgtgggcctggcctgcctcggtctcccggcagcatcaccaaggagcgggcggaggtgatcctgcagggcacagccagctccaacgccagcgcccccgatgccatgtgggaggactacgagttcaagtgcaagccaggtgaccccagcagacggccctgcctcatctccccgtaccactaccgcctggactggctgatgtggttcgcggccttccaggtgggggacggtccctggcgggcgcatggacctgcctgtaccccaccctcttctgcccatagatggcaggtttctagaacgcccactgaaggggctggtggggagggaggctgggagagatgggatcctgcctgagctgagaactgagcccacacgacatccaggcccagccttaggaggggcctcatgtgggagcccagccccaccgtccccccgggtctgccaggtagtgtctcatgccaggaatcccagcccgggtgccatagcgagaccctgtatctacgaacaatacaaaagttagccagcagctgagggtggcgcctgtggtttcagctacgcaggaggaggaaggatcgattgagcccaaccgctgcagcctcaaatgatggcagcgttgccttccagtctgggggacggagccagaccctgtctcagcgaacaggaaagaaggaatccccagggctgggggtagcagaggcacccatggacagagctgctgtttctgtcctcccggtcccgtctcagccaccagaaaactgagcctcagggaggcaaggcccagacagagggtgctggggtggacaggctccaaggcacccagccaggggagcgaagccagcggccgacatgggaatgagtggtcagggctacacgaagcaggcagccccttaaggggaccccagccaaagagctggagtgcggctgcccagggaacccacctccaggaaagcctcaggagggagtggagggcacagccgagcgtccggaggggctgtgcctggacagcgagtggcacagccgtctccagcccgacctctcctcccagacctacgagcacaacgactggatcatccacctggctggcaagctcctggccagcgacgccgaggccttgtccctgctggcacacaaccccttcgcgggcaggcccccgcccaggtaggatgccctccctgccgctgctcaggggtctcccccaaatccaggtgtctgctgggatcccaccacctgtacctgcacccccacctgctcacgggaagcgccccttccctcccgcagaggcaggaggtggggcctgctgggagcaaaaagggccccccccccccgccccaca

SEQ ID NO: 14950 - DNA, 2300 bp, Homo sapien
ggttcacgccattctcctgcctcagcctcccgagtagctgggactacaggaacctgccatcacgcctggctgattttttgtatttttagtagagactaggtttcaccgtgttagccgggatggtctcgacctcctgaccttgtgatccacctgcctcagcctcccaaagtgctgggattacaggcgtgagccaccacacctggcaaatcagttatatttctatatgctgggagaaaatgtcaaaatgaaaatgttaagtatagcatttataataacattcagaaccataaaataggaaattttaacaaaagaaatgcagcctgtatgcctcgaaagatagcacacattgctgaaagtaaggaacacttcagtaaatggagaggtataccatgttcatgaatcagtcttcatattgttaaactgtccatcgtcaccaatttgagctatagattccatgacatcccaagcaatcccagaaggattgttttttccagaaacagataaactgactcttagatgtatatggaaatgccaaggacctacatagccaaaacaattttgaagaagaataaagatgcaggaggagtcacactacttgattccaggatttactgaaaaatgatcgtaatgaagacagtgtgacacaggtgtgtggagggttccctcgagggacagaactaacaggagaaatatatatataaaggggtttattgagtattaactccacgatcacaagtccccacgataggttgcccgcaagctgaggagcaaggagagccggtcccgagtctcagaacggaagaacctggagtcccatgtttgagggcaggaggcgtccagcacagaagaaagatgcgggctgggagggtaggcccgtctcccctcttctcctttttctgcctgctttatattctctggcggctgatgagatggtgcccaccagattaagcttgggtccgccttccccagccccctgacccaaacaggaatctcctctggcaacaccctcacagacacacccaggatcagtactttgcatccttcaacccaatcaagctgacactcagtattaaccatcacaaggcgtgaggacagatagctgcatccgcaaaatagagaaccaagaaatagtcccacaccaaagtcaggatcaaatgattcctggacaagccaccaagtcaattcaactgagagaaagaagcctttgcaccagttggtgctggaagttctggatatgcacctggataagtgaacccccctccgtcaccacacacaaacgttaatttgagatggattgcaaacataaaagctaaaaccattaacacttcttgaaggtaacatagaatattttgtaatgttatgataggcaaaagtctcttaggacacacaaaaaaattaaccataaaagaagaaaatggctgggtgcagtggctcacacctttaacaccagcatgttaggaggctgaggcaggagcgtcccttgagctcaggagttcaagcccagactgggcaacatagtgagaccctgaaagaaaaagaaacaaacacatacattggacttcctcaaaattaaagtcttctgttcttcaaaagacaccaccgagaaaatgacaaggcacagatcaggagaaaatattcacaatgccattatgcctgacaaggaacctgtatctggaatacataaagaattcataaagttcaataataaagataatttgattttttaaagagggaaaggattttagcaggcacttcacaaaaggaaacatgcaaatggctctcacggcacttgaaaaatccctcagatgcactggctattagggaaatgctgagcgtatctacattgagacaattcctccccccaagaacagctgaaattaaactgagatacttcctcctcacaagaacggcagtgcagaagtcaccaccacacagcagagacgggcgtcctgtgggcagtgcagagttcaccaccacgcagcagagacgggcgtcctgtgggcagtgcagaggtcaccaccacgcagcagagacaggcgtccccacgggcagtgcagaggtcaccaccatgcagcagagacaggcatcctgtgggcggtgcagaggtcaccaccacgcagcagagacaggtgtcctgtgggcggtgcagaggtcaccaccacgcagcagagacaggcgtcctgtgggcagtgcagaggtcaccaccacgcagcagagacaggcgtcctcacaggcagtgcagaggtcaccaccacgcagcagagacaggcgtccccacgggcagtgcagaggtcaccacc

SEQ ID NO: 14951 - DNA, 2300 bp, Homo sapien
gctctcggcacctgctcctcccacggggcctcctgggctggagcccgcacagcacagtagcatccacatccctgctgtgacacctgtgtgggcagtcggcatgtcggcgtggactcccaggctgcagaatcaggtgttcccctcaccacacagtctcgggggacagtctgttttcactcgcggcttttccagaccctcccctgacactcggcagtcggcgtttccaggtgtgctcagtgtggccaacaggcacgatccaccccacgtggagggtggtgtgtccaggggctatgtgagctcacacactcacagggaaggaacgtgggggttggcacacctgagaagtgggcgggaatcaccccacatgcccgcggcagggggcagggcagccctgtggcctctgcttcatctctgtcaggacctatggtggacacacacagctcctgccccaccttcatcactgctgagcccccctgggaaagctcatatctccagcgctcgcgtgaggacagcagtgccggcagcaccagggcacaggccccacagacaaggggcccggaggccgctgggggcattccacccacagacccgctctggacagtgtgcgccctcagaggcagggagggcgtctggaccgcagtctcatgtgggtcactcttgggggcctcgggcagcagcaactgaaggaggcagtgatgacctcaggcccacgtcctggaggtcttggggagaaagacaggaagtgttttcctagaaacactggtgtgcagagaggactgggtttcagctacatcatgtggcagggccgccctgggaggagcctcacggagacccacagacagaacgtgggggtgagggtgaagcagccagcatccacaatgggctccccaccccacagctccgccccgggacccccttcctccgaggcagtcaggctcctgcccccggcaccatccttccggcctcggtcaagactgcccggacaccacctccagggccttgctggacaggacatccacactggccccagcctgtcggcccccagcacaacatctgcaccggccctggcccgtcggcttagcccccaacacgacatccacaatggccccagcctgtcggctcccaacaggacatccacaccagccctggcccgtcagctgggcccccaacaagacattcacactggccctagtccgtcgtcccccaacatgacatccacactggccctggcccgttggctcggcccccgacacgacatccacaccggccccagcccgtcagcccccacagcacgcactgcatgtccacattcccctctctacacaccacaccccaagcgctggctccacacggacgcaggaaagcatcaggaccggaaagcacaggaaaacgtgcttgccaggcaggcgggctggagagctgagcagagacacagagcctcggaggaaggccaggcccactccagagcaagaactaaaatctccagagcacaaatgcccctggctgagctcagcagcagagtgaagaacgaaagaaaaggcagtgaacacgaagacatagcagccacagtgactcattctagagatgagaggcttttagaaaacaccacacagaagcacagggcccaggagctcgtggaaggcagggagaggcctgatgtccatgtccgtggagccacaggagaggagaaagaacatggggcaacccccccaaatattggcaaaaattatccaaatttggtaaaaagtaggcatatcatagtcaagaaactggcaacggaagataaaatccccaaagccatcagagaaacataacacgttacactggaacgtcaggaatgatagtcgacttcccgtccaaaacgagggacagatggagagagggagccaggcgcggatccttccccaggggcccctgcatgcccagagcaagcatctgcaggcatctccagcagcaaaggacaccgctgttctccccggggagcttcagtgtcatcagagcctgaaggaggaagcaactcggcaccacgtggcccagagcaggctcgtgagctggcctcggtcagcaggtcgcctgggtctctgtctcagtgctcagcagggcgaggacaggacagaacgggccccatcacagactgcgcttagaaggaactcagtaaaacaaagaccattttcttctggaggcaactcaaggaggtaagactgtgagtcaagcgccttggaggataagaagtccaggtaagtagaaggcaggaggaagcttccctaatatcacctgcaaatctgcttccactggggcat

SEQ ID NO: 14952 - DNA, 2300 bp, Homo sapien
tggattacaggtgcctgccacaacgcccagctaatttttgtatttttagtagagacagggtttttccatgttgcccaggctggtctcaaactcctgatctcaggtgatccgcctgccttggcctcccaaagtgctgggattacaggcgtgagccaccctgcccagcccttaaatctactttttatgatgttaatagagccacttccactttcttttgtttgtattttttatttttatttttaatttttttcagccatgatgaattagatccagctttcttttgattcacatttgaatggtgtatcttttttactttcaactgctttttcattcttcacgtttacacatgggaatgtgcttctctcacctgtcagcatctctgggtaagcattcagtgttctacaaatactgacgtccagaggatgtgagagagctgttgtgggtgggcgccgtgggacatgaactcggagacctgtggatgtgagagagccgtcgtggggtgggcgccgtgggacgtgaactcggagacctgtggatgtgagagagccgtcgtggggtgggcgccgtgagacatgaactcggagacctgtggatgtgacagtgccattgtggggtgggcgccgtgagacatgaactcggagacctgtggatgtgagagagccgtcgtgcggtgggcgccgtgagacgtgaactcagagacctgtggatgtgagagagccgtcgtggggtgggcgccgtgagacgtgaactcggagacctgtggatgtgagagagccgtcgtggggtgggcgccgtgagacgtgaactcggagacctgtggtctgcgtagagggcaagtgtggctcacctataggcagtaagtgtcaagccctgcagcgtgtgctgggagtgatgccgttgaccagagccagggtcctcagggtgtgtttcataatggtgaatgctgagtgcagtccggttggtcagctggctgtctgtgtgtagccaggcacgcaatttatatacacatgtctactttacttctatgtgtgtgcgtgtatacacactgcatctgctgcagacacggaatttatatacaagcatctagtttgcttctatgcgtatgcgtggatgcacacactgcgtctgctgcaggcacccattttatgtaacgtgtctggttcacttagatgtgtgtgcgtgtatgcacacactgcgtctgctgcgggcacgcattttatgtaacgtgtctagtttacttagatgtgtgtgtgtgtgtatgcacacaccgcgtctgctgcaggcacgcattttatgtaacgtgtctggttcacttacatgtgtgtgcgtgtatgcacacaccgcgtctgctgcgggcacgcattttatgtaacgggtcgggttcacttagatgtgtgtgtgtgtatgcacacaccgcgtctgctgcaggcacgccttttatgtaacttgtctagtttacttagatgtgtgtgtgtgtatgcacacaccacgtctgctgcaggcacgccttttatgtaacttgtctagtttacttagatgtgtgtgtgtgtatgcacacactgcgtctgctgcaggcacgcattttatgtaacttgtctagtttacttagatgtgtgtgtgtgtgtgcacacaccgcgtctgctgcgggcacgcattttatgtaacgtgtctagtttacttagatgtgtgtgtgtgtatgcacacaccgcatctgctgcaggcacgcattttatgtaacgtgtctggttcacttagatatgtgtgtgtgtggatgcacacaccgcgtctgctgcgggcacgcattttatgtaacgtgtctagttcacttagatgtgtatgcgtgtatgcacacaccgcgtctgctgcaggttggcttttccagtgtttcccccaaaatcttgagaaagtactcagactcctgagtctagggtttggccccaaaccgtcagccagactctgcctccccttcccgcctgcctcgccccgcattctgagctgcgcccatggtgtccacatgtggtttgttcctagtcatgcttgttttgtcttctttttcttccagtcgtggcattcctggtggctttccatcagaacaagcagctcatcggtgacagggggctgcttccctgcagagtgttcctgaagaacttccagcagtacttccaggacaggacgagctgggaagtcttcagctacatgcccaccatcctctggctgatggactggtcagacatgaactccaacctggacttgctggctcttctcggactgggcatctcgtctttcgtactgatcacggg

SEQ ID NO: 14953 - DNA, 2300 bp, Homo sapien
gcgctgtgagcagcctccctccaaggcagtgggagcagggccacaggcagagcaccgcagggccctgggcgacgaaagggtcagggctggtgacctctaaaggggctgcgacggcaggtgggtgggggcagctccaagtgaggaggaagagggtggacacaggcgggcacgggatggacacagggtaaacaaagggcagacacagggcgggacacagactggacacaaggctggacacagggtggacatgaggtgggacacagaggggactcggggtgggtcgcagggcgggaaacagggctgcagcagaaggctccccacacccctactgcctccaccactgggtggaagggacctgagctgtgagcgctgacctcctagcaacatagaggacacctcgcggtaggccctcagccccggcggccacacgtgcagggaccgcaccagcagcttccacagctcaggccagtgtgtgtgcatatgggtatgacatgcccatgtgtccctgtgtgtatgtgtctgtacacatgtgcacatgtatacatgtgcacctgtgcatggatgccctgtgtccatgtgtgcacgggtgtatgcatgtctctgtacacgtgtgcacatgtacacatgtatgtgtgcgtgtgcagggatgcatgtgtgtatgtcctggcatgtatgcaggtgggagaaacacaggttgtgactgttcagccactgcacactccagggcccagccttcattggtgctaggctggggcccctttcccacagggacctaattggcgctagctgaagggtggatgtgctccacccctcaccacaacgcaaactccaggaccacagaggaaaacaagatgtggcctcaccaaagcaatagcctaaatcagtaattctaaggcaagaagcataggatgcttcctgcttatcaggaaaaaggaagacagactgaattgagatttcagagagaaaaaaactatttcaacctctactcatgttataaaaatagctacataaaaagatgcagtaaaaatcttgaaacatcacaggctctcaaaacaaaactaaccaagcagtcaagcttcggaaggccccgtcactaccccacacgggaggcagcagagccatggcggccacccgcctctcacagggacccagagcctgacctgggagctgcaacgaggaaataccgaggaaataccgtgtcgcccgagcagccaacagcaggcatggccgataaatactttgtttcagaatcagaaagaaatagctgggcgtggcagcctgtgcccgtagccccagctactcgggaggctgaggcaggagaatctcttgaaatcggaaggcggaggttgtagtgagaggagattgcaccactgcactgcagcctgggcgaaaaagtgaaactctgtctcaaaaaaaaaaaaaaaaaaagaatcagaaaaaaaaaatcagctttctcttttctcctttcagataaattgttgtaagattaaaacagtcatcccagaaatgccgttctctgttgatggttcttactggccgtggttaaattctgggcctcagcacagtgacctcaagtattttttctttaagggatgtgctgcagagctccgaagtagggcagtgctgtttgctttttaaacaagcaagtattttatagaagaacttgtaaaaccaagtggtgcatttcattagaactcaagtggcccggagaaaagaaaaagaactcatttcccatgagctcttagagccactgaaagctcagaacaaaaccaactgagcagggtttcaagtattctttttggtttcattttctcctcaaattttctgaagaacagctgagagtttagcaaatacgggtgcaaacgattctgcctgccacgtcaaccctgcctcgggtgtcatctgacgaggatgccaagctacaagggctgcggtgagactcagagacacgctaccaatggcaccgcggccccacctcgccgaagcagctgccggggagacgcgataaaactgccccacgcggaaaagaaggaagggcggtgagcaggcgcacagaacagacgccacagtgcggcacgcatgcctccacgcctaaaggacaaaactagcatggagatcccctagaggtcggattttcaacataatctcagtgagcccaggactccaatgtgacaatgtggaactggaaagacgagcaagaaaagcccctccgttcccgccagcgttgggcattccttctgcagtccaggctgtccccgtcactcgggatcacagccaagcggtgggttctgtgtggtgct

SEQ ID NO: 14954 - DNA, 2300 bp, Homo sapien
gcgcccggctcctggattctttttgatggctgaatcataacccagtgcacttttgattaaattcaggctgaaatgggcacgaccagagctgctggtccacctctccccggcccaagccctgcccccggtgacctgctctggagccattctgggcagtggatgggacccctgcggtcagcgtctcaagagagcagaccctgagggaaacttgagctcagagagaacaggagctcccagcagacccttccgctgactgctcccaccctgggcaaatgcagagccggagcccggagcgctggaagctggaacaagaggcccttttctgctctgcacaatgccccattgtgcccttcgcggggagagcagctcggcccagcgaggggaagctgtgcacaaagcctccttgtgagggcagccccacctgaggacagcgcagggccacacctgacgcagggcagtccctctcgccgtccgtcccctagcaggcctggcacccagacagggcccgctctgcaggcgtggtcccagggtgtggggctccctgttccccacagatgaggggaacagtgtgggctgtgccggcccttcctaagctggcccccaggtcacgaggagaggtacgggtcgtgggctctgtggagggacttgggtgccgggcgccagccagggccgatgcctcctgcgatccccaaggctccgagccctcaggcacacaccacgctcccggaggctgggccagcatgcggaggatgtttgtgtgttcgtacccgttgcaacatctttaacagggtcccatttcacagctgggctcctaaggggggtttcatagaaaagaaatggaaactaaaaatgaattaaaccataagatgtacacgtatgctacggccccagcaacacagggaaggtggaggctgagaggaagctcgggccactgctggtcaggcctggatttgggggcccgatgtccacagtcagtccctgcccacacaaggctcacactgcaggtggtgaagatataattaaacaggtaattaaacaagcaataaagacgggtcatttgaccaacccagtggcgataattgatacgccaaaacactaggaaagctagagaggcaaaagagaagaatacatgaaaacaaaaacaaaaaaccaggacaaatatttccaatatacacaaaagaacaggatttttcatacgtaaagagtgctgacaaatgaataaggagaaatctgcacttccacctaagtgccccacagtttattcactaacccctaggtctccaatgcctactctagcctcacgccctttctttcctctaaggaatgcctgtgaccccagcccttcctagcacccgcttcacatcagcctccagaaccccgctccagtcatcagagtgtagagtgctggcgtcctccttcatgttctgtttggggcattgggcagttagcccttccctcctgagtcctgagtccccctcttcccccacagcttgaagtccagtcccaagggcaggcaggagctgggttgtgcaaaggcggaagggtgctcaggctgggagaaaggggagggtcccccgagcattccaggcacagccctgcctactctgtcccttgctggctgcgacgatcgccctagcaccctcctccgcagagagtgagtgtcagctgtgaggcaggggcacgcagtggtagcaccgccagggcctgtgcagcccaccttccccaggaccacagctgggaaggcgcctggctgggggagggcacctggcctctgcaactcggactgacggaaggcacgcgtgcctgccccagtgagctcgggtcgggcgacgcgcaccacctcccaggtacccggccccgcgccctacccgcagcagcgcccagcgagaactgcgaaggaggcaggctccgggcacccgctcccgcgcgtgggcggggccggctggagggggcggtgcctccgggactgtgagcggggcctcccggggtgtgggtggggccttcggccgtgggcagggccggccagggagaggcggggcctccgagaatgggcggggcctccgagaatgggcggggcctccgggagtgcgccctccccgcacatgcgccctgacagcccaacaatggcggcgcccgcggagtcgctgaggaggcggaagactgggtactcggatccggagcctgagtcgccgcccgcgccggggcgtggccccgcaggctctccggcccatctccacacgggcaccttctggctgacccggatcgtgctcctgaaggccctagccttcgtgtactgtgag

SEQ ID NO: 14955 - DNA, 2300 bp, Homo sapien
ctccacggaggtcctcacccggatggcactgtgagcccgagtgggcgatgtctgctctcccaggggcagggggtggaaggtggcacagtttggaccggacccccaccctcactgcttccacttaaacccccacttctgcctgcctgcatcccaggcctaacagatgagttccgcgggcgccccaggcgatgctctgagggccacggaaggatgcggggaccccgagcggagggcagggcctccagggggaagaggcactgcagacggaggtgtgggtcttcccaggcaggtgccggagccaagcgagatggtgggacggggaagagagggcaggccaggctggcagccagctctccacctacgatgcgtggagcctcccaactcgcgcactccgtctccccaccgctgcttcctctgacctggctgcagagatgagaccgccctccgggcaggtgacacggcccttgctcttcagcctggaggccaatgcttcctccaaaggccctggccccctcagctccgggcctggctccggttgttcccaatgcaaagcagcaagggccccggggtctgcggacgggggcgggcggccgctgggggcaccagctctcggccgggccagaacagggggtaggaggcgcgtcctgtgcggtcggtggcggccccaggtgggtgcggtgcgctggcaggaagcggcagcacgacccccgactttgcatctggacttttctagtaacggaccagctccttctgccgaccgggccggggagaccgcgtggctcagtggctgcagcggccaccggcccgggcgtgggggctttgagggcaccggcgcggtaggtcacccgggtttcgcgggccgcaagctcggagacgcgcgtgtcccgcgttggctgcctgacccggaatggcgcagccccttcgcctccagcgcgctggttgaaaggatccgagccaccctcggggacggccgggccgaggccacctcgcggggcggccttgggcggggacccggacccgcggttggacgttcgcctcggggggggcaatgtcccctctccgaccccgcggtccccaccagggcggcacaccccgccctctccccgcctccgcaggcgcccagggctcacaggctcggagcggcctccgcctctgccggaccacccagggccgccccgccggaggggcctccccgcccccgagccctaggtcacgcccggaaggcccggggcccccgcgtccggccacgccatccgcccggcggccccagggactcagcgccggggtcagcgcaggccccgcccagcgctcccgccccctccagctggccggcccccgggaccgcgcccccgcccgcgctctccacgctcgcactcgtatgggcagggcggcccggggtcccccagctccgagccgcggccccttgaagcgcgttacctggacgtgcgctgtccgcagactctggacgagctgggcctgggcgctgcgcggcggaaccgaccctgtcctggaccgcaggcagcagctgaccccgcgccaccggcctgcgggcgagacctcaggcgcgagacgggctgtgtgtgtgtgtgtgtgtgtgagagagagagagagagagagagagagagagagagagagagagagtgtgtgtgtgtgtgtgtgtgtgtgtgtgtgtgtgtgtgtgtgtcgggggaggggcccgaggacccgcttcctagctgagcgtcaggacggggggcggactctcaggagccgcgcggcgcccgcagaggagaggaagcgccggagacccccctgctcccacccggcctccctgccccgcttcctttcccggggctccagagaggggagctccaggcgtggggcgcctggcccacgtggtgcggcgccgggcggggcaggcgggggcgcggcgagagccgcggagctttctttatgggtgggggggcgggggcggccgggctccgcctccgggggatcggggcgcgctccgccaatgggtagccgggcgcggggcggggccgcggggccgccgcttaaagaaacttgttgcgggtcccgcagcgggacccgagcctcggcggcggcggcggcggcggcaggggcgagggtcggggccaccgcgcggcgacctcgggtcccggagcgaccgcagggcagccccgggcgccggccccggtgcgcgtctcctgtgcgcgcccctccgcgcgcggccccgatgctggacatgagcgaggcccgctcccagccgccctgcagcccgtccggcaccgccagctccatgtcgcacgtggaggactcgg

SEQ ID NO: 14956 - DNA, 2300 bp, Homo sapien
ggcggcctgtcctgagcaacaagttcttcactctgcagtcctaatttctggaaaactgaccggccccaccacgccaaggcgtgcacacggcgcaccccgtcatctccactcctgccctccctgcttcggaccgagggtgtccaggagagggagaaactgcggggagggtactcgcaggcaaacctgctgcccacccatccgcctgccgcactccctccccatgggtggtccaggagctagaggagctgagccctttctaaggagggagcacctccagagagccgcatgcaacttgctgtcgtgccgggcgtgcctcccggggctggggccactcgcaacggctggagggcacgtcggggtgccagccatggccctccgcagggtgttccccgccaggagaactggctccagagcgcacccgccacgagggtgcacaccccaggcgctgccctccgcggatcccgactcccatagctggcgccggaccccggctggccagaggatgtttttccactgggacccgccctgacacccgcccggggtgcagagcccggagcctgcgtgtggccaccacctccgcgagctctgcgccctccaggcccccgctcgcagtccgagaccaggggcggccaaggtcccgaaccccgcccccggggcgccggcactcaccgccacagcttgcccagcgtcttgctgagctcggcgttgtgcaggtgcgggtactggtcggccagcttgcggcgcgccgcctgcgcccacaccatgaatgcgttcatgggccgcttcacatgcggcttggctttgagcgcgccgccgccgccgccgcgcaccggcatgggcaccagactccagtcgtagcccttgagcacctgcgacacggcgtcgcggatgcaggccgggaagcgctcgtccgccgcctccgccgggtcgccccgggcgccccccaccgcgacccccgcgcggcccaggccctcggagccggcgggagacggcggcgcgtccgagtccgagtcctccacgtgcgacatggagctggcggtgccggacgggctgcagggcggctgggagcgggcctcgctcatgtccagcatcggggccgcgcgcggaggggcgcgcacaggagacgcgcaccggggccggcgcccggggctgccctgcggtcgctccgggacccgaggtcgccgcgcggtggccccgaccctcgcccctgccgccgccgccgccgccgccgaggctcgggtcccgctgcgggacccgcaacaagtttctttaagcggcggccccgcggccccgccccgcgcccggctacccattggcggagcgcgccccgatcccccggaggcggagcccggccgcccccgcccccccacccataaagaaagctccgcggctctcgccgcgcccccgcctgccccgcccggcgccgcaccacgtgggccaggcgccccacgcctggagctcccctctctggagccccgggaaaggaagcggggcagggaggccgggtgggagcaggggggtctccggcgcttcctctcctctgcgggcgccgcgcggctcctgagagtccgccccccgtcctgacgctcagctaggaagcgggtcctcgggcccctcccccgacacacacacacacacacacacacacacacacacacacacacactctctctctctctctctctctctctctctctctctctctctctcacacacacacacacacacacagcccgtctcgcgcctgaggtctcgcccgcaggccggtggcgcggggtcagctgctgcctgcggtccaggacagggtcggttccgccgcgcagcgcccaggcccagctcgtccagagtctgcggacagcgcacgtccaggtaacgcgcttcaaggggccgcggctcggagctgggggaccccgggccgccctgcccatacgagtgcgagcgtggagagcgcgggcgggggcgcggtcccgggggccggccagctggagggggcgggagcgctgggcggggcctgcgctgaccccggcgctgagtccctggggccgccgggcggatggcgtggccggacgcgggggccccgggccttccgggcgtgacctagggctcgggggcggggaggcccctccggcggggcggccctgggtggtccggcagaggcggaggccgctccgagcctgtgagccctgggcgcctgcggaggcggggagagggcggggtgtgccgccctggtggggaccgcggggtcggagaggggacattgccccccccgaggcgaacgtccaaccgcgggtccgggtccc

SEQ ID NO: 14957 - DNA, 2300 bp, Homo sapien
gcgcccactgtgccctcggcgcaggcacacaccacagggggaaccggcagcagaggccggggccaggaggctctgaccagggaaacccgcctgccgtgcgctccggagcctcccgtggcaccaggcagtacactcctctgggagaaccggccggcgcctgtttgggaaggttggtatgcttacgacagccaaagaagaacaagccccacgcctcccatcttcctccttctatttccccctattccgggcctgctgttccctccctctggggctttctaagggaggcgggggaggcgggcaggacccagccggcggtggacaaaagcgaggcttcccgggaacggtgccggccttcggcgggcagctgggctgctgtccctccattcccagacacccagaagccctggcagggcccaggcgcccgtcctcactgagccacaggacacactccttgggactcttcccgaggctcacctccaaccgcctgtgcggcaggacttgggggagcaggggcctgccgtccacagcgccccgtggctgcgccctagatccagacagaaggcaggaggtgcaaatacgcaagctccaagctcccttcttccaggtgaggagcaggatacgggaaccagagccccaaaccaagagaaccatttgaaacccaaccagaggacactcggtgggggcggcctgtcctgagcaacaagttcttcactctgcagtcctaatttctggaaaactgaccggccccaccacgccaaggcgtgcacacggcgcaccccgtcatctccactcctgccctccctgcttcggaccgagggtgtccaggagagggagaaactgcggggagggtactcgcaggcaaacctgctgcccacccatccgcctgccgcactccctccccatgggtggtccaggagctagaggagctgagccctttctaaggagggagcacctccagagagccgcatgcaacttgctgtcgtgccgggcgtgcctcccggggctggggccactcgcaacggctggagggcacgtcggggtgccagccatggccctccgcagggtgttccccgccaggagaactggctccagagcgcacccgccacgagggtgcacaccccaggcgctgccctccgcggatcccgactcccatagctggcgccggaccccggctggccagaggatgtttttccactgggacccgccctgacacccgcccggggtgcagagcccggagcctgcgtgtggccaccacctccgcgagctctgcgccctccaggcccccgctcgcagtccgagaccaggggcggccaaggtcccgaaccccgcccccggggcgccggcactcaccgccacagcttgcccagcgtcttgctgagctcggcgttgtgcaggtgcgggtactggtcggccagcttgcggcgcgccgcctgcgcccacaccatgaatgcgttcatgggccgcttcacatgcggcttggctttgagcgcgccgccgccgccgccgcgcaccggcatgggcaccagactccagtcgtagcccttgagcacctgcgacacggcgtcgcggatgcaggccgggaagcgctcgtccgccgcctccgccgggtcgccccgggcgccccccaccgcgacccccgcgcggcccaggccctcggagccggcgggagacggcggcgcgtccgagtccgagtcctccacgtgcgacatggagctggcggtgccggacgggctgcagggcggctgggagcgggcctcgctcatgtccagcatcggggccgcgcgcggaggggcgcgcacaggagacgcgcaccggggccggcgcccggggctgccctgcggtcgctccgggacccgaggtcgccgcgcggtggccccgaccctcgcccctgccgccgccgccgccgccgccgaggctcgggtcccgctgcgggacccgcaacaagtttctttaagcggcggccccgcggccccgccccgcgcccggctacccattggcggagcgcgccccgatcccccggaggcggagcccggccgcccccgcccccccacccataaagaaagctccgcggctctcgccgcgcccccgcctgccccgcccggcgccgcaccacgtgggccaggcgccccacgcctggagctcccctctctggagccccgggaaaggaagcggggcagggaggccgggtgggagcaggggggtctccggcgcttcctctcctctgcgggcgccgcgcggctcctgagagtccgccccccgtcctgacgctcagctaggaagcgggtcctcgggcccctccc

SEQ ID NO: 14958 - DNA, 2300 bp, Homo sapien
ctccctagtgccctcaggcaccccacactggacccctccagacagagccaatctcagcacggcacagccatctgcacccccagcagcctggagggctgcagccttcaccccaacctcagcccccagctctcctctgcaccagccgcctccccacctcgcccctggctaggccagcgcccaagcccccacactcccctctctgagacagcaactgccgcccgcagcctcccatggggggtgtcgggcagcagggtggggcccccaggacaggcgtgaccctggctgaccaggggctgcccagccacactccccttacacctgcatccccagagtccacacagtgcagggcaagcgaggggctggggccctggccagggactccggggacctgagtcaagcgctttcgggtgtctttaacttagcagagcagccttggacggggacccggtggctcggagctgacatgcagctggtgggccgggcaggtcagctccgccgtcaggaagaccctctcgcctggccggccttctggaaaagtcgctccccagagggaaggccggcatgggctggggccagatggagggtgaggcggccctgagcacttgcacggcatggcggagccccccaccggtctggccacctcccctacctcccgggagcccccgctgtgtggcagacggttagaggggatggtcggtcacggtggggaacctactgccctgtgtctaccccagcctggcttcagccagctctgtcctcacaccaccgccggggagcatcctgactggcaggtcatgggtgggggtcaccgcagtgcaacctccgctcctgggggtgacacggggccgcccaccccccgcctgcactctcacagcttgctggtctgcataagcccgttggctgcggcgcggtgcgcgggtggcgtggcctcctgctgctgccggatcctgtctggacgcggctccgtggcgtcagcgtccttggcaccagagcccttgcggaggcacagaaccttctggaagctctggcggaagttgtcagagaggaagccgtagaggacggggttggcacagctgttggcgtaggagaggatgaccacgaagaagtagaggccggcggaggcgggctcctggggcagcgccacggccaggttgacgatgttgacggtgaagaagggcagccaacatcccgcaaacaccagcaccaccaccaacaccatgcgcgtcaccttccgctccgagcgccgccgcacgcagcccacgcgcacgcccgccgccctcaccttcaccacgatgagcaggtagcacaggcagatgaccagcagcggcgcgaagaagcccagcacggccgtgtagatgatgaagacggcgccccacagccccacgggctccggccagctggcgttgcaggtaccgccctcctgcacgtccgcgaacaccaggagcggcagcgacatgcacagagacaggacccaggccgcggcgctcgccagcttggccacacgcgggcggcgccagcgggccgagctcagcgggtgcaccactgccaggtagcggtccacgctcatgactgtcaggcagaagacactggtgaactggttgacgccgtccagcgtcatgaccaggcggcacaggacggggccgaagggccagaaggacgcggcgttctgcgtggccaggaaaggcagccccagcatgtacaggacgtcggccactgccaggttgagaatgtagatgttggtgacggtcttcatcttggcgaagcgcagcaccacgtagatgaccagcgtgttcccgcccagcccggccgcacacaccagcaggtacagcacgggcaccagcaccgcccgggcccctgccgagggcgccggccccaccagcgtcctgttgtcaccgcctccagaggcagcccccggggaggaggcgttccagctgggcgtggaggctgggaacaggggctccatggcggcagccctggggtgcgtcaggctctgcaagagaagaagggaggacgccagggtggtgagtccctgaaccagcacatgcaggcattccttcctcctgggccccagccccgcctgccaggaggcgcgggatcaccgggtaaacacgattagtcatgtttagcttggccgggaatcacgttaagcaaattgtttggaaaataagccaggagaggaaggagcggcgggcaggtggccccgggagcccagacggacggctgctgtcgatatggcgacagctgccctgtggccgcccctgcacccagatggcgcctggcctggccgcagcatcctggag

SEQ ID NO: 14959 - DNA, 2300 bp, Homo sapien
actttctgggtggaccccaaacgccttcctttagaaagatcatccactcctctcgggggctgagtgagcccaggcgtccaggagcccccagtctgtacagcagggagctgaaggctgggagagaggggtggagtcgggggtcttgctgaggccccctcccccagtgcctggcacctccacccgcacctcactggcacaagcgccccgcagcacggagagggggcggccctcccggggcccgcctgggacgctgctgggtgtctgtggggggtgggccccagggcacccggcagcagccgctcccccgtcgccacggcaatgccgcggtcatgcctggccagggctatttctgtccaggagacatgctgtcctgccccactgagtcaccccccgcgctccctgcccaccccactcaggcctggcctgcagcttctgtgccacatagttcaggcatcggccctgccagccgcctgcccagacggactctccccaggacgggtcatcccgggccacccgaacccaagggacccaaaggcacccttcccgggccgttcacccacccctcagcctccctccaccctgctctgtgcgtggggaggctctgggacctgccctcaagggggactgtcaggaacatgcctctctttttagggggcagttctgctggcgtcggggggcactgaggggcacagggttccctgtgtctaggcctcagggacgctctggatacttctgagctccatgggtgcccatttcacgggcatgggaggctgaggctcagacccagggcacagcagagtgtgggcgtccgcccgtctttctctgcaagccccaggagcacactgtcccactgggacacatctgcagagctgtgttctcgccgcccagggcacagccacgctgagccggctcggtcggatgcaggtgccatagtcacaggcgctcaggtcttcacaccccatctgtgtcaccacagccaacagggtgaagatggctgtccccagagggggccgctgggcctagtgggtgccgctgccaagggtgagctgtcaccgcccagggccacctggaggggggagcctggaaccggctacagctggtgcggtccccaccacagccctccccagcccgttgcccgcagcctggcacacgaagctcccacaggggggaccccttggtctcccctcacctcctgtcctcctttcctcctcggtctttagcatgggggtgctgagggccaggccaagctgaggggctgcggggagagcgggaccccaggtcgcacacaaatctgccgaggggactgagccagctcggggcccctccccgcccacagcctgctttcaggcaaggccgccacaattctcctgccacgtccagcacctcccacaacaggggccggcttgtggaggaaggacctgtggggaatggccgcgtgtccgtgtccagaggcccagggtcggagcgggacaaggccaaggtgctgtgtgggcttggcctggggcccacagagaatggagcccccgcccgctgaggcctgggaggcctagaagtcattcccgcgagtcgtccggcccagtccttatccgctgagaggcggggctggtgcggggcctccccaggggtgtcatgagggaatgaagagaccccacggagcctggggaggctgcgctcctgggctccatccagcctggcttccccgccagcagcatgagggctgtgcgtcacccggtggcttggtggccatgggggccccgtgcagcatggaggccctggtctgggccccgaacacgggcctcggcctacagcccccccgccgggcccgcccagccacagcttccatctgcctgcttctcctcagggcgccgcaccccaggcgggcagcaggcttggtttcccgatggaggagagctgcgtgcccacggcaccatcccccaacccagccggccaagacgccgggccccagccccgctcatgggcacggggctggcaggaggaccctggggccgcgaggcaggcttcgcagtggacacaggggccctgccaggatcctgtccagggctcggcggagctggcctctcggcctgttgctcttggacagcccagaggaagccacgggcgcccaggcgggcatgaaagggctctttgacggctgggttgctgggacagtaacacagacggccggccaggcagggagcatccctgagacggtaacaggaagcacagggcctggggctggttgtgggagtcttcacagccgccctgggcaggtcgggctccccctgaaccccagcggagca

SEQ ID NO: 14960 - DNA, 2300 bp, Homo sapien
ttttttgaggcagagtccactctgtcacccaggctggagtgcagtggcgtgatctcggctcactgcaacctctgcctcctgggttcaagtgattctcctccctcagcatcccgagtagcggggattacaggcatatgtcaccatgcctggctaatttttgtattttagtagagacgggatttcaccatgttggtcaggctggtctcgaactcctgacctcaagtgatccacacacctcggcctcccaaagtgctgggattacaggcgtgagccactgcacctggcccaccctaacttttaacgagcagggtgttgataaaaagatcagaggttccaagtgccctctggaccggactccgattcagcgtttgtgtctccccacctgctccagcctccctccacggatgtgtccaaagcacggggctctcctaggtcctgctcctctgtggctggaaccttaattggacctttgaaggcctaattcaccagctgtggccctccatcgctgagtagttgcattaaaatagactgaatgttttccttttcttgaaagttcccgtatacaggaggaggtgctgctgaaaggacctgtaccccagccaggcccccacactcctgccttccagttcctcggcccaccccaggtgctgtgtgtccttccgggccccagctgggcagggcctcttcttcaccctgcacgatgtggcccacccgggggaggtcctgcttctctgctgctcacccgcaggtgggaagccacagccgccccacagcctctccgggtctggggtctcagggtgcgccctggagcagggcctctttgtctggagggagaaggggtctctcccactaccaggggccccttgttggcgggcgtgctgaggtgcacacctgggagctcaagctccctggtgcacaaagcagtggtcccagaagcaaaaccacccttccagcctggaggggtgccctggggggagtcaggagcctgggcacctgcccccacctgctggcacctcgaggtgcggccagccctccctgggacaagggcctggccatccccaatgtctgaagggtccaccccttcccgaccaaaccacttgctctgagggtccaggggaaggcccttctgctggcctggctgaaggagcagctgctggcagggggaaggggcctgcacttctcctcgggggcccctgggtgagtctcgctgaggcagcggggttggaggatgcaggagcaccaggctgccgtccccagggtcccccagatccccacgcgggaggggaccggagacgaggacaagttcgcggaaactgcccgtgcgtgtcggggagagatgcgagtgcaggagcgcccagccgtaaagcacacccccgcccgcccccgcgccccatcacacacgcgcgcgcgggcacacccgggacacacacgcggcggggaaggggcacgcagcctctcgccttccacgcccgcccggtccccgcccctccgccgacccgggcccgcgtcgtagtgggggtgggggtgggggcggcggcggcgcgcgcggcagcgcgaagggggagggggagccggagcgggagggggaggggcgcggcatcggcggctcggccgcccccgcagttgggggcagggaaggacgtaggtgctccccctcccaccccgccggagcctcccgcgagcgccccctggtgcaccccacgcccggcattgttggggagcacgaaaagcggggagcccagtgcgggggcgtggagggggcgcgggcggggtccaacttcccgcacccgggggggggcggggcgccgggcggcgacagggaggggtcgctcgggcgcgcgcgtctcgggccgggggcggatcctccccagtacccccccgcccgccccgcccccggccccgccccggccacgctggccccgccccggtcgcgccggccccgccccgccccgccccccgccgctcagcccgaagtttcctgcgccgcgcgcggacgggctcgaggctcgctcgctgcctcaccggtccccggcccgcgccccgcgccccgcgccccgcgccccggcctcacccgtccgctcagcggcctccacgccgcgccgaggccgccgccgtcgcctccgccgggcgagccggagccggagtcgagccgcggccgggagccgggcgggctggggacgcgggccgggggcggaggcgctgggggccggggccggggccgggggcggaggcgctgggggccggggccggggccgggcgccgagcggggtccgcggtgaccgcgccgcccgggcgatgcc

SEQ ID NO: 14961 - DNA, 2300 bp, Homo sapien
tgcagccgagcttgacgacgactcggaggacgtgagtgcgtggccctgggcccaccgccgactcgccttcgtctgtctggggcaggttccctcaagtggggtttgagatgggattcagggcgtgttgttgactgaggggattcagaaggggagagaagcaggccaggccagggaggaatccagcagtgttcagggattcagccacagatgatcccagagtcccccctctgccgtctaggggctgtgagctaaacgctccacgcacggcctgcatacgggggctgggctctgcgccgtgggtcagccactggccgagagctgctgccgaggcagggccaggcatccgctaggctctcaggcttccgtgggtcaaggaccactcccagagtcagggacccaagagcacccgctcacctggccccgtggactccagcacgggtcactctgccgtcaccagcgtagggaagggggaggctccacggtatgggccccagaggccagaaagccagagcccaaaggccagcgggtgaggagtgaggatggagaaggctgagaaggtgctgggaggggtggccgagctgagcacagagggccctgatggggggccgggcaggcaggcgcaggctctgagaagccgccgcctcatcccacagagctgctgcctccgcctgcataaagtgctggagccctacaagccccagtggtgccggagccgcgaggcctgggccctctacctcttctccccacagaaccggtgaggcggccgggtcaggaggctgcatggctagttccaccccacgggacccccgcccccaggtccctcctgggtggggctagcacatggtggatatttccgagtgggcaccccttctcacaccgcagggaccggggctgaagtggaggcgtggccagggctgtcctgcaacccccatccactctgccatccacgccgccccgccccacctctcacccgcccccgcccacccaggttccgcgtctcctgccagaaggtcatcacacacaagatgtttgatcacgtggtcctcgtcttcatcttcctcaactgcgtcaccatcgccctggagaggcctgacattgatcccggcagcaccgtgagtcagccaaccccatcgtcccgggccaccacgacccccagggaggggtggagtggacacagccccccaccgtcctctcccggcaggagcgggtcttcctcagcgtctccaattacatcttcacggccatcttcgtggcggagatgatggtgaaggtaccgcggggcccggggactgcccttgttcccaggtccccgttctgccctcatccccacccccacccagcagcgcgccagctccccagaccccccacgcctgagcctgagctcagtgccattggccctccgcaggtggtggccctggggctgctgtccggcgagcacgcctacctgcagagcagctggaacctgctggatgggctgctggtgctggtgtccctggtggacattgtcgtggccatggcctcggctggtggcgccaagatcctgggtgttctgcgcgtgctgcgtctgctgcggaccctgcggcctctgaggtggggggctccccgtgggctcccggggcaacctggaagcacagtcccctgacgccactgcccattactcctcccgcagtcctgggctgttcgcaggccgcccactcggccccaccttgggacctttgctgagctctgccggcgcctggcagctgctgccatagatgactgcagtgtatccttcactcccctccagggtcatcagccgggccccgggcctcaagctggtggtggagacgctgatatcatcactcaggcccattgggaacatcgtcctcatctgctgcgccttcttcatcatttttggcattttgggtgtgcaggtgtgtggcccccacgtgcccgggggtctgccccgtcgcagacagggtctgccttcccagcgtggctcccagcagcgccgctgcgggacggggagggacagctcgggcctcactcgcgccccaggaagtccggtgtggggtggggcacaggccaggccctccgcggtgaccgtcgcaccccgtcagctcttcaaagggaagttctactactgcgagggccccgacaccaggaacatctccaccaaggcacagtgccgggccgcccactaccgctgggtgcgacgcaagtacaacttcgacaacctgggccaggtgggctgggcggccgggcgggagctgggggtctccaggacaccctggagcgagagggccggcgaccccagctct

SEQ ID NO: 14962 - DNA, 2300 bp, Homo sapien
ccctgaaggcccatccctcggctcctgttctgcaggcccagcgtcttgttaatgaagatggacctggaactcgggcccttcttcctccctctggcccatcccaccttctagggatcacagagacagcacggggtgacccccagggaacactgagcccctagaagcacttccacacgcccactggaggttttgcggggtgggagtcggagggatgagaccccgaagggaagcaagacggcccctcaggacagggctgccggtgtaaggaaaggtggacagcaggggccggtcactgggtggagggggagggcgggctccagccccagagcttcccaaattagatctaagatccctgggaagctcagtgaagctcagcccagtgacactggcagatgtgagcgtcagcttcagcaggaagggtctctcaggacgtggcaggcaggctgctggccagggctgcagccacctgcgttttgactgggacgggggcacctgctccaaggtcacccacgtggctgccggcaggaggccctggttccccgtcacaggggggtgtgaggcggagggcgagtgggggggacagggttcccaccgaggggacggcacccaggtggccaggccaccgcagacagaagcaatcccaggtctcccagggtcctggacaacaggagaccccaccaagctgggggcaatcaccagggccaggcccccctcccggttcctcagttggctctcctgtccaatggtgggggtgaacggcaccatgtcacaggactgctggggctcaggggatggtgcctgaagcttcttcctccccagcaggcctgcaatctgggtcgtgtggagcactctgcggggagtggcgtgctggggcacaggcagaaagacggggtccccagtgctgcaggtgaattgagttgggacaggtgagggccctgaagtccccacctgtggggacctggggacagccctagaggtcaggactagaggacctggttccatgaagaccctgcccctcaggctccctccccactgggtgacatcgccctgttaggggcaccctgggccggggactcgtggctcagaccccgctcccttgtgtggggtgggactgtcctgcctcccctgaggcgccccctccaggtgtgcggctgccgtgagggaggagggtgcccggccgtgggtgcactgctggccccgcatgctggtgttgtccttattggtcaccaggaaaaacactgaacctccagttctgagccttggctaccccacgtgctggcgtgcaggcggccacgtctgtgcctgggaggccacatcctggtgggtggtcaggcaactccccccaacccgtggctgagtttccccacatcaaagaggggatccctgacctagaaggtctcagctggaccctccagcctggcctgtgatttggatctggggagggcggcaggaaagtcccgggcgctgcccagggcccctaatcagctgagtcatcaggctggggcagccaggacggttaggaagggccaacccaggctgggccgtgaagtggtgcccatctgatctgccgcacgagcacaggacctgctgccggacgtggggacagggacttctcaaagagtggttgtcacgagggcctgagctgtctccaaagggctgctgggccttgagttgggaccctcctgaagaacccccaggactgggctcccagaggatgaaggagagggggtggcgtgccccgagggaaccagggagtaatttttggagggggcggcactcagaggaacactcacccctccctcagccctggccccggagcagagacaaggtgagaagtacttttgccttctgtccttccccgctttcccttgacggagccggccacttggtgccagggctgtggcgtccacacagggataaatggaggtgacgacccttctctgaggtgcagaaggaacaggtggggccgtctgtggagctccggcctcctcctccgtcctcccgccctgcctgacagcaggtgtgtggccacccctatcccccacgcccagcaggtccaagggtcaggctggccctccttctccctacagtgggcagacaccatggcccttggggcctgtggcctcctgctgctcctggctgtgcccggtgggtgacctggcctgggtgtggggatgggggggcatctgcttcctgcctggacccctgatgggggtgaaactgggggctggtctgagacggagaaacatgctgagtccccaccctgtggggccccgtgtctcctctgaagagactgcacc

SEQ ID NO: 14963 - DNA, 2300 bp, Homo sapien
ggggcggggtgcccaggacgcgccctgattggcccagtgttagccaatcaaggctctcgcatccccatggtgctgattggtccgcctcccaggcctgacccaatcggagcattcctaggaggagcggccccagagcccctgactcgggggtcccagagccctctgcacaccacagccccggtgtccccgtgtgtccctgggttctcccagccctggtgtcccctgagtctcttcttcaccgtcagccctggtgtctcccgtgtccctgccacaccctcatccctggtgtcccccgtcaccccatcccctcacctcctgggctcctgaaggtcccatcttgtgggcctcattcatggaaccaggacggggcaggtggaggcctctggggagtttgtccagagaatggaggagaagcagggtcatgagcaggagcggtctgggccacccctgcctgtcccccggggggtgcagcccggaaggagtccagatgcatatggccccgcagtgcagagtcagccccaaaccaggctggtcccaggcagggtgggggcaggaggagccctggagtggccctgtgttgggggtcggggggcaggcagggggtcctggggctcagaagcggaggaggtgggctggaggccccagtgaccaacaggcccaggggagtcaggaggtggggtggacggacctgcagggacagtgtcagcgctgaatgggatggagagcacagggagctggggccgggggcaagtccacagggagctggggccgggggtgagaccatggggagctgggctggggctgggggtgagaccatggggagctggggccgggggctgggactagtccatggggagctgggctggggctgggggtgagtccatggggagctgggctggggctgggggtgagaccatggggagctgggctggggctgggggtgagaccatggggagctggggccgggggatgggactagtccatggggagctgggctggggctgggggtgagaccatggggagctgggctggggctgggactagtccatggggagctgggtctggagctgggggtgagaccatggggagctggggccgggggctgcgactagtccatggggagctgggctggggctgggggtgagtccatggggagctgggctggggctgggggtgagtccatggggagctggggctggggctgggactagtccatgggcagctgggctggggctgggggtgagtccatggggagctgggctggggctgggggtgagtccatggggagctgggctggggttgggggtgagtccatggggagctgggctgggtctcctggggttgcacctgcactcctgtctgcccttccctctgccgatgaagctcagatcccatgataaggaggcacctgcagaccaggggtcctgcacggacagccccagaggtggacattgaggactcgtaggaggacttgggtctcatacggcgggtggggagcagggccccttcctggctgaggacacttggtgctgtcccctctcaaggctgtttccccatctgacaaaggggtctcatgtgagcctcccaccaagtgagtcgaggagggctggcgccacccccgtggattcggagtccgtaagaggggtgtcacccgtcatgtccccaccccgtgggcaccttcccgtctcttggagggtggcccatggacatgagttcctcaccccgtgtccctcttggggaaacaggtttcaggagcgatgggtcttgtagcctgggacagccaggccacctgggtgcagcaatgcctgaaggcctcctggcaccgagacaggggcaggagcagatcccaccagcgggaaggtggtgggttctagtgctgggatccaccagctgacaggtggagctgccagtctccagtgctcagccctcagcggggcctgcctggcagccccacacacagagggcatcggggtggcgggggcacgtgttacacgggggccctgggtctgagtcatccacttcctccgagtctggatgggaggacccagcgcccctcctccgccccctcctgatctggaagcataaatggggaggggagagcccactgggtagaaggaacagggagcggccagggtaagtccccactctcagagaccctgacatcagcgtcacctggagcagagtggcccagcctcagactcagagcaccaagacccaggcctgcaggcctggacccaccccggtccccccgtcccagctccattcttcaccccacaatctgtagcccccagccctgccct

SEQ ID NO: 14964 - DNA, 2300 bp, Homo sapien
ggatatgagaggagcccagaagaatcttgtaggaggaaaagttcaaagatggagacatgtcagacgacacagaagccagctcgcaggagctcccagtgtccgcatcaggatgagtttgcatattagaaaaatgattgggaaaaagaaagaaattaaaataattgaataaaacaggggaccatgagtctattcagttataaataagcaaatgaatacatagtctgatgagaacttggctagttacagggtctcaaggaatctttattctgcgtcttcattctgaactggatggaaccttcctgagcgcagagtcctttccactgtgaattatgggtttgttatcgtttttgttcgttgctggttgtacgtgacgggagttcagctttttgctgcgggacggcagagataggatgcggggcttcctgagaggcgccggggcagggccgcacaggtccatccacctcccctgggaccccagccctgcagcagccccaggggagcggccggggatcggggcggggtgcccaggacgcgccctgattggcccagtgttagccaatcaaagctctcgcatccccatggtgctgattggtccgcctcccaggcctgacccaatcggagcattcctaggaggagcggccccagagcccctgactcgggggtcccagagccctctgcacaccacagccccggtgtccccgtgtgtccctgggttctcccagccctggtgtcccctgagtctcttcttcaccgtcagccctggtgtctcccgtgtccctgccacaccctcatccctggtgtcccccgtcaccccatcccctcacctcctgggctcctgaaggtcccatcttgtgggcctcattcatggaaccaggacggggcaggtggaggcctctggggagtttgtccagagaatggaggagaagcagggtcatgagcaggagcggtctgggccacccctgcctgtcccccggggggtgcagcccggaaggagtccagatggatatggccccgcagtgcagagtcagccccaaaccaggctggtcccaggcagggtgggggcaggaggagccccggagtggccctgtgttgggggtcggggggcaggcagggggtcctggggctcagaagcggaggaggtgggctggaggccccagtgaccaacaggcccaggggagtcgggaggtggggtggacggacctgcagggacagtgtcagcgctgaatgggatggagagcacagggagctggggccggggatgagaccatggggagctggggctggggctgggactagtccatggggagctggggctgaagttgggggtgagtccatggggagctgggctgggcctcctggggttgcacctgcactcctctctgctcttccctctgcgtatgaagctcagatcccatgataaggaggcacctgcagaccaggggacctgcacggacagccccagaggtggacattgaggactcgtaggaggacttgggtctcatacggcgggtggggagcagggccccttcctggctgaggacacttggtgctgtcccctctcaaggctgtttccccatctgacaaaggggtctcacgtgagcccccaaccaagtgagtcgaggagggctggccccacccccgtggattcggagtccgtaggaggggtgtcacccgtcatgtccccaccccgtgggcaccttcccgtctcttggagcgtggcccatggacatgagttcctcacccgtgtccctcttggggaaacaggtttcaggagcgacgggtcttgtagcctggggcagccaggccacctgggtgcagcaatgcctgaaggcctcctggcaccgagacaggggcaggagcagatcccaccagcgggaaggtggtgggttccagtgctgggatccaccagctgacaggtggagctgccagtctccagtgctcagccctcagcggggcctgcctggcagccccacacacagagggcatcggggtggcgggggcacgtgttacacgggggccctgggtctgagtcatccacttcctccgagtctggatgggaggacccagcgcccctcctccgccccctcctgatctggaaggataaatggggaggggagagcccactgggtagaaggaacagggagcggccagggtaagtccccactctcagagaccctgacatcagcgtcacctggagcagagtggcccagcctcagactcagagcaccaagacccaggcccgcaggcctggacccaccccggtccccccgtcccagctccattcttcaccccacaatctg

SEQ ID NO: 14965 - DNA, 2300 bp, Homo sapien
aaggctctcgcatccccatggtgctgattggtccgcctcccaggcctgacccaatcggagcattcctaggaggagcggccccagagcccctgactcgggggtcccagagccctctgcacaccacagccccggtgtccccgtgtgtccctgggttctcccagccctggtgtcccctgagtctcttcttcaccgtcagccctggtgtctcccgtgtccctgccacaccctcatccctggtgtcccccgtcaccccatcccctcacctcctgggctcctgaaggtcccatcttgtgggcctcattcatggaaccaggacggggcaggtggaggcctctggggagtttgtccagagaatggaggagaagcagggtcatgagcaggagcggtctgggccacccctgcctgtcccccggggggtgcagcccggaaggagtccagatggatatggccccgcagtgcagagtcagcctcaaaccaggctggtcccaggcagggtgggggcaggaggagccccggagtggccctgtgttgggggtcggggggcaggcagggggtcctggggctcagaagcagaggaggtgggctggaggccccagtgaccaacaggcccaggtgagtcaggaggtggggtggacggagctgcagggacagtgtcagcgctgaatgggatggagagcacagggagctggggccgggggtgagaccaaggggagctgggctggggctgggggtgagtccatggggagctggggccgggggctgggactagtccatggggagctgggctggggctgggggtgagaccatggggagctgggctggggctgggactagtccatggggagctgggctggggctgggactagttcatggggagctgggctggggctgggggtgagtccatggggagctgggctggggctgggggtgagtccatggggagctggactggggctgtgggtgagtccatggggagctggggctggggctgggactactccatggggagctggggctggggctgggactagtccatggggagctgggctggggctgtgggtgagtccatggggagctgggctggggctgggggtgagtccatggggagctgggctgggtctcctggggttgcacctgcactcctgtctgcccttccctctgcggatgaagctcagatcccatgataagaaggcacctgcagaccaggggacctgcacggacagccccagaggtggacattgaggaatcgttggaggacttgggtctcatacgggaggtggggagcagggccccttcctggctgaggacacttggtgctgtcccctctcaaggctgtttccccatctgacaaaggggtctcatgtgagcccccaaccaagtgagtcgaggagggctggccccacccccgtggattcggagtccgtaggaggggtgtcacccgtcatgtccccaccccgtgggcaccttcccgtctcttggagggtggcccatggacatgagttcctcaccccgtgtccctcttggggaaacaggtttcaggagcgacgggtcttgtagcctggggcagccaggccacctgggtgcagctatgcctgaaggcctcctggcaccgagacaggggcaggagcagatcccaccagcgggaaggtggtgggttccagtgctgggatccaccagctgacaggtggagctgcgagcctccagtgctcagccctcggcggggcctgcctggcagccccacacacagagggcatcggggtggcgggggcatgtgttacacgggggccctgggtctgagtcatccacttcctccgagtctggatgggaggacccagcgcccctcctccgccccctcctgatctggaagcataaatggggaggggagagcccgctgggtagaaggaacagggagtggccagggtaagtccctactctcagagaccctgacatcagcgtcacctggagcagagtggcccagcctcagactcagagcaccaagacccaggcccgcaggcctggacccaccccggtccccccgtcccagctccattcttcaccccacaatctgtagcccccagccctgccctgtgaggcccggccaggcccacgatgctcctccttgctccccagatgctgagcctgctgctgctggcgctgcccgtcctggcgagcccggcctacgtggcccctggtgagtcccagccggggtccaccctgcccctcaccacattccacagatcagggcctgggtgggttctggggaggccgggctggcccccacacagggaagggctggtccc

SEQ ID NO: 14966 - DNA, 2300 bp, Homo sapien
tttgttgattttttgtagggatggagtctcactttgttgcccaggctggtcttgaactcctggcctcaggcggtcctcctgcctcagcctcccaaagtgctgggattacaggcgtgagccactgctcccggctcccaacagtaagtgttactgacgtttttccactctgcctcatttttttttccttttttttttttttttgagatggagtcttgctccattgcccaggctggagtgcaatggaccatttcagctcactgcaacctccacctcccacgttcaagcgattctcctgcctcagcctcccaagtaactgggactacaggcacgcgccaccatgctcaggtaatttttgtatttttagtagagacggggtttcaccatgttagccaggctggtctcgaactcctgacctcaagttatctgcctgcctcagcctcccaaagcgttgagatgacaggcgtgagccacggtgcccagcctgcgccccatctcttgtcacccgtatcagtgtcctgaggctgctgcacaaagtgctgcaaactgaggggcagaattttattctctctcaatcctggagtgtcagcagggccgcttgctccagaggcttggagggaggggccgctccatgcctgtctcctcgtgtccggcgctgctggctgtccttggcttgcagccacatcactcccatccctgcctgccttccccggccttcctccaccgctctaggtctcaggccccctctcctttctcttataaggatgcctgtcattggatttagggcccactctaattccagaatgatctcatcttgacatcctcaattacgtctgcaaaagcctcatttcggaatcaagtgacgttcacagttcctggggctcaggcttgaacgtatcttttcggcaaatgcagttcaactcaccactgcacccggctcctgaccccggaggtattttcctccttcacctgcacgtcctgtaggagcctccctgtgcagacacagcactgggcaacttgtagaaccttctccacacaacaatgcccaattttggccgacctcacatctgattccaagtataaagcaccgaataaaagataaaaggaaagtgtcacctgcatcctccacgtgagaatccgacgttcctgtctctgcacagggcgagcttggctcacccaacctggactcggctggggcccaagggctccttggcctctcccgggcaagcttggttcacccaacctggactcagctggggctcgaggggtcctcggcctctcccccagccccccgcagcccaggacccctgactgtaggctccaggcctccctggaagccctggccacgctcgccccgcagccctcagactggctgtgcttcgcggatcttggctggttcgaggctggtgccgtccccgccttacctgggcctcctggaccctgcctcccggcagctgggtgggggaccaggagagtcctgcacccgtgacgcagctgccacattatcctcgtgtcccgggagggagaggaatcaccaagaaagcccccaggctaagcagctgtcctctcttctcctcggccctctggctctaaacaaggaacccaggtgatccagacccgagcttccctcccatcagcctctcctggcctcacctggctggcctcccagccctcccatcctccagctgctctcctgtctccttcttgcatcttcagatggagctgcccactccatgggcctgggcagcagcttgaagtgggcgtgggccaagccctctgggagtgaggggtgcagcggctcccaaggcacagagccagaggtcctggcccatgatgggtgaatgcggccaggagggagggacggggcagctgggagtccatctcgggcagcctggggcttctctcctccccatgcagggaggtgcagggctgggcatgcaggtggaagtctggctgcagaggatttcacagctgcaggcccagcctcggggacccactccctcagcctccggggaatcctgaggcatcaccaggaagctgctggtagcatggagaaggctggatttgctccagctggaggacatgcgggcacacacacacactcatacacgcatgcacacacacatgcacacgcacaatgtacaaactcaatgcacactcactcatacatgcatgcacacacatacacgcatgcacacactgatgcatgcacacatgcacacacatgcgtgcacacacatacatgcacacacgcacacatgcactcatactcacaagcatgcacacacatgcatgcagacaca

SEQ ID NO: 14967 - DNA, 2300 bp, Homo sapien
aactcaggaggtggaggttgcagtaagccaagatggcgccactgcactctagcctgggcaacacagtgagactccatctcacaaaaaaaaggaaaaaaaaaaagcagattcccaggacctcaaggctgggggccaggacagcaggtgtctagacaggccacggaggctctgagcctgggagttgcagccaggccaggcccccgctggtcttggtgggacagggctgtgcatggcttccagggactggattctgggggaggctgcccctgctgccctggacccacatccccacggctgcgcctcccaggcaggcagacccagggtgtgtggctgcccctcctgctgcaggtgcctgacagggaaatgcccgctggggaccctgtgggaggtggtgggggaatgagtgagggagggagggagtgaatgagtgaaggagggaatgagtgagtgagggagggaattaatgcatgagtgagggagggaatgaatgaatgagggaggaagggaatgagtgagggagggaatgaatgagtgagggagggaatgagtgagggagggaatgaatgagggagggaatgaatgaatgagggagagagggagggaatgagggagggaggcaatgagtgagggatggaataaatgagtaagggagggaatgagtgagggagggagggaatgaatgaatgagggagggagtgaatgaatgagtgagggaggaagtgaatgagggaggaagggaatgagtgagggatggaatgaataagggagagaatcagtgagggagggagggaatgaatgagtgagggagggaatgagtgagggaggcagggaatgaatgagggagggtgggaatgaatgagggagggaatgaatgaatgagggagggaatgaatgaatgagggagggagggaatgagggagggagggaatgaatgaatgagggagggaatgaacgaatgagggagggaatgaatgagggaggaatgagtaagtgagggagggaatgagtttgtgagagtgggaatgagtgagggagggagggaatgaatgaatgagagaggaaatgagtgagggagggaatgagtgagggaaggaatgaatgagtgatggagggaatgaatgaatcagtgagggagggaatcagtgagggagggaatgagtgagtgagggagggagggaatgaatgagagagggaatgagtgagggagggaaggaatgaatgagggtgggaatgaatgaatgagggcgggaatgaatgaatgagggcgggaatgagtgagagtgagaatgagtgagtgagggagggaatgaatgagtgagggagggaatgagtgagggagggaatgagtgagtgagggagggaatgagtgagggagggaatgagtgagtgagggagggaatgagtgagtgggaatgaatgagtaagtgagggagggaatgagtgagtgagggtggcaatgaatgagtaagtgagggagggaatgcgtgagagagggaaggaatgattgagtgatggagggatcgaatgaatgagggagggagggaattagtgagggagggagggaattagtgagtgagggagggaatgacggagtaggggagggaatgaatgaatgagtgagggagggaatgaatgaatgtggtcactccccgcggtccccaagcacccggacaccgtgaccttggctgcggccccgccgtcggcgaaatgcgggcgggggggccgggagagcccgggggccagcacggtcgcgcgttggcgaacggactgtcccgcgcgctcgcgggtctgggggcctcccgacccggtcctgcttgttgcgtgggcgggaggggggaccggaagcgcccctcccccacgggctcgccccgcccccgccgctcgcggtcccccacgtcccgcccgcgccccggcccagggccagcccccggtttagggagcatccacacttctcctcccgtcggtcatgctcgcattcggccttttgtacggggtcagctcattgggcggatgagaaggtgtccccgcctaccgccccgaactggccaattgcaaggggtttcacagggcgctgaactcgcgggagcgtcaccgtcctgcgacgcttcagaggatccttaggcctcagtggtctttgacccccggccccaggacctgaccccaaggaaacctccgggacctgtggctggagaggtgaccgccaggcatccggggagcctttggagatctcggcttcctttttcccccgctgcttgccggcgtgtcctcgggtggacgcgggcagcccgaaggggagttta

SEQ ID NO: 14968 - DNA, 2300 bp, Homo sapien
ttgcagccaggccaggcccccgctggtcttggtgggacagggctgtgcatggcttccagggactggattctgggggaggctgcccctgctgccctggacccacatccccacggctgcgcctcccaggcaggcagacccagggtgtgtggctgcccctcctgctgcaggtgcctgacagggaaatgcccgctggggaccctgtgggaggtggtgggggaatgagtgagggagggagggagtgaatgagtgaaggagggaatgagtgagtgagggagggaattaatgcatgagtgagggagggaatgaatgaatgagggaggaagggaatgagtgagggagggaatgaatgagtgagggagggaatgagtgagggagggaatgaatgagggagggaatgaatgaatgagggagagagggagggaatgagggagggaggcaatgagtgagggatggaataaatgagtaagggagggaatgagtgagggagggagggaatgaatgaatgagggagggagtgaatgaatgagtgagggaggaagtgaatgagggaggaagggaatgagtgagggatggaatgaataagggagagaatcagtgagggagggagggaatgaatgagtgagggagggaatgagtgagggaggcagggaatgaatgagggagggtgggaatgaatgagggagggaatgaatgaatgagggagggaatgaatgaatgagggagggagggaatgagggagggagggaatgaatgaatgagggagggaatgaacgaatgagggagggaatgaatgagggaggaatgagtaagtgagggagggaatgagtttgtgagagtgggaatgagtgagggagggagggaatgaatgaatgagagaggaaatgagtgagggagggaatgagtgagggaaggaatgaatgagtgatggagggaatgaatgaatcagtgagggagggaatcagtgagggagggaatgagtgagtgagggagggagggaatgaatgagagagggaatgagtgagggagggaaggaatgaatgagggtgggaatgaatgaatgagggcgggaatgaatgaatgagggcgggaatgagtgagagtgagaatgagtgagtgagggagggaatgaatgagtgagggagggaatgagtgagggagggaatgagtgagtgagggagggaatgagtgagggagggaatgagtgagtgagggagggaatgagtgagtgggaatgaatgagtaagtgagggagggaatgagtgagtgagggtggcaatgaatgagtaagtgagggagggaatgcgtgagagagggaaggaatgattgagtgatggagggatcgaatgaatgagggagggagggaattagtgagggagggagggaattagtgagtgagggagggaatgacggagtaggggagggaatgaatgaatgagtgagggagggaatgaatgaatgtggtcactccccgcggtccccaagcacccggacaccgtgaccttggctgcggccccgccgtcggcgaaatgcgggcgggggggccgggagagcccgggggccagcacggtcgcgcgttggcgaacggactgtcccgcgcgctcgcgggtctgggggcctcccgacccggtcctgcttgttgcgtgggcgggaggggggaccggaagcgcccctcccccacgggctcgccccgcccccgccgctcgcggtcccccacgtcccgcccgcgccccggcccagggccagcccccggtttagggagcatccacacttctcctcccgtcggtcatgctcgcattcggccttttgtacggggtcagctcattgggcggatgagaaggtgtccccgcctaccgccccgaactggccaattgcaaggggtttcacagggcgctgaactcgcgggagcgtcaccgtcctgcgacgcttcagaggatccttaggcctcagtggtctttgacccccggccccaggacctgaccccaaggaaacctccgggacctgtggctggagaggtgaccgccaggcatccggggagcctttggagatctcggcttcctttttcccccgctgcttgccggcgtgtcctcgggtggacgcgggcagcccgaaggggagtttacagacgctccctcacatcggggacgcggctcctttaagggcgtaggtgtccagggcgccgcctgactggaaagtcgccccccggccgggctcctggggcggacccggggcgcgggcgcgcggcggcggggcgcgggcaacggggagcgctcggcggcgcgggaggcgctcggggccgggcg

SEQ ID NO: 14969 - DNA, 2300 bp, Homo sapien
aattaatgcatgagtgagggagggaatgaatgaatgagggaggaagggaatgagtgagggagggaatgaatgagtgagggagggaatgagtgagggagggaatgaatgagggagggaatgaatgaatgagggagagagggagggaatgagggagggaggcaatgagtgagggatggaataaatgagtaagggagggaatgagtgagggagggagggaatgaatgaatgagggagggagtgaatgaatgagtgagggaggaagtgaatgagggaggaagggaatgagtgagggatggaatgaataagggagagaatcagtgagggagggagggaatgaatgagtgagggagggaatgagtgagggaggcagggaatgaatgagggagggtgggaatgaatgagggagggaatgaatgaatgagggagggaatgaatgaatgagggagggagggaatgagggagggagggaatgaatgaatgagggagggaatgaacgaatgagggagggaatgaatgagggaggaatgagtaagtgagggagggaatgagtttgtgagagtgggaatgagtgagggagggagggaatgaatgaatgagagaggaaatgagtgagggagggaatgagtgagggaaggaatgaatgagtgatggagggaatgaatgaatcagtgagggagggaatcagtgagggagggaatgagtgagtgagggagggagggaatgaatgagagagggaatgagtgagggagggaaggaatgaatgagggtgggaatgaatgaatgagggcgggaatgaatgaatgagggcgggaatgagtgagagtgagaatgagtgagtgagggagggaatgaatgagtgagggagggaatgagtgagggagggaatgagtgagtgagggagggaatgagtgagggagggaatgagtgagtgagggagggaatgagtgagtgggaatgaatgagtaagtgagggagggaatgagtgagtgagggtggcaatgaatgagtaagtgagggagggaatgcgtgagagagggaaggaatgattgagtgatggagggatcgaatgaatgagggagggagggaattagtgagggagggagggaattagtgagtgagggagggaatgacggagtaggggagggaatgaatgaatgagtgagggagggaatgaatgaatgtggtcactccccgcggtccccaagcacccggacaccgtgaccttggctgcggccccgccgtcggcgaaatgcgggcgggggggccgggagagcccgggggccagcacggtcgcgcgttggcgaacggactgtcccgcgcgctcgcgggtctgggggcctcccgacccggtcctgcttgttgcgtgggcgggaggggggaccggaagcgcccctcccccacgggctcgccccgcccccgccgctcgcggtcccccacgtcccgcccgcgccccggcccagggccagcccccggtttagggagcatccacacttctcctcccgtcggtcatgctcgcattcggccttttgtacggggtcagctcattgggcggatgagaaggtgtccccgcctaccgccccgaactggccaattgcaaggggtttcacagggcgctgaactcgcgggagcgtcaccgtcctgcgacgcttcagaggatccttaggcctcagtggtctttgacccccggccccaggacctgaccccaaggaaacctccgggacctgtggctggagaggtgaccgccaggcatccggggagcctttggagatctcggcttcctttttcccccgctgcttgccggcgtgtcctcgggtggacgcgggcagcccgaaggggagtttacagacgctccctcacatcggggacgcggctcctttaagggcgtaggtgtccagggcgccgcctgactggaaagtcgccccccggccgggctcctggggcggacccggggcgcgggcgcgcggcggcggggcgcgggcaacggggagcgctcggcggcgcgggaggcgctcggggccgggcggcaggagcggcgcgcgaggcaggcgtgcagagggcagccccgcgttaggccccgccccgcgcgccccgcccgcgccagggtcctcggagctgctctggctgcgcgcggagcgggctccggagggaagtcccgagacaaagggaagcgccgccgccgccgccccgctcggtcctccacctgtccgctacgctcgccggggctgcggccgcccgaggtgagcgcgtgcgggggccgggccggggccgcggggcgggggtcgggccgaggcctctactcc

SEQ ID NO: 14970 - DNA, 2300 bp, Homo sapien
acctcctgccaagacctggctgctgctgctgtgtcccctgccccaaagcactcagcaccacggggtggtctcacaggcactgcaccgccagggcaaggagccacaggtgcacacccaccgtgtcccagacagaagccaggcccctccccctgcaccccctcctactggccttctggagaaagcggccaatctgttacaatgtaatcacaacacagatcaagcgttcaaaattccgctgaaaatcgaatttgcccttccaaattcacagataggcacttagtgaacggctagtagttactaaacgcttcagagcaagaaacttttatgatgcaaagacaaaaacaaccctcatctattagagccaggcaaggcccagacactgcagaaacggggacagggccgggcactccaggagcggcccgaaagtctgccttctgtcctcctgctgggcgcccgcaaccggctgagctttagcttctcggatcaccgccttgctctgctggttgacagcaccgacttcagagcaacttcctggctgagggtgagcaaagcactcacctcccacaactccaccgcactgatctccacaacgggtggtcgccacgacaggctggcacaagaagcctttaaaggccctcctgcacccaaatgcaaactctcccaggcttggggaggtattcccttctgcaagacccaagcacctgcagtcgggagacgcttacctggccgcacctgatctgccccaggccccgagaatgtttctgaagcaagatcccaaaccctgagacaccatacaagcgcacaccagcaatcacccagtggcctagggaacggacctctctgaatgagcaatcagggcaaactgaggatccgtcccgtcttccgttgcataggttctctacccaaaggcaacgtttcttgaagagcaagaaacacttggggtaggtcctgtaaaaggaaacaaaccgaactccccaaagacaggcactttgcaaacagagaaactaagcgtaacttccaattatacaaacaaaaccacttcattctgcgattcaagcgtgactacaggccacgatcacaagcccaactaatcattcccttacattcctcctacgcacgttaactaccagaaccaactactattcaaccgataaaaagagatgtccaaaacagaataaaactccccctccagcgaggcgctcacgttcagggccccagcaagcgccagcggagcatcttcagaggcacaagaaaacttacacttgttttggttttaaggcaccgaaaacaagcccgctcgccggcccccacccccgcgagccagcgatgttgcaatccaagactctccccccgcggcccatcctatccgtccgcggggcgaccgtgaccccggaagccgctccccgcgcaggaggaaggcgcggcctcgcggggccccggctgcaggtggctgccccggccccgcgccaggcgcacctcgggggcgaagtgggggagccccggccccgaaggcctgcggcggcccggccgctcgggccgcagcccagcggcgccagcagcgcggaccgagccggcgccgagcgcggggcctctcgggctccccggaaagctcggccgcggcgcggggcccggctcggcggggcggggcgcggggcagtcgggggcccgggcccaacaggagtagaggcctcggcccgacccccgccccgcggccccggcccggcccccgcacgcgctcacctcgggcggccgcagccccggcgagcgtagcggacaggtggaggaccgagcggggcggcggcggcggcgcttccctttgtctcgggacttccctccggagcccgctccgcgcgcagccagagcagctccgaggaccctggcgcgggcggggcgcgcggggcggggcctaacgcggggctgccctctgcacgcctgcctcgcgcgccgctcctgccgcccggccccgagcgcctcccgcgccgccgagcgctccccgttgcccgcgccccgccgccgcgcgcccgcgccccgggtccgccccaggagcccggccggggggcgactttccagtcaggcggcgccctggacacctacgcccttaaaggagccgcgtccccgatgtgagggagcgtctgtaaactccccttcgggctgcccgcgtccacccgaggacacgccggcaagcagcgggggaaaaaggaagccgagatctccaaaggctccccggatgcctggcggtcacctctccagccacaggtcccggaggtttccttggggtcaggtcctggggccgggggtca

SEQ ID NO: 14971 - DNA, 2300 bp, Homo sapien
aagtcgcagctgggctgctccacgtgggagtggagggtggaggaacgtgtggagtttcggagtccagcccagtgcggagacagccttgaaaccgtggttggcgggcgctccactccgctctgggctcgaaccctgcctgaccatagctgtgccccccactttctccctgtctggcccctggctccccccccctcacttagaggagggcacggggaagggcaaacggtccagagggcgggcggcctgcgggctcctctgcatcatgtgaggagggcgtggggaaggacatcccggtggggcccggtctggggctgcctccagcccgggctgcctgtcttggacttagtcgtggacctggaggccagtgcccggctggcccctgtcaccctctcgctgtgacgccagcgcctgctgactggaggacccaggttccttcgcctgctttttctcaggctgccctgaggatctgtgtttggtgaaaaggagccaaattcacctgcagggcaggcggctctagcagcttcagaagcctggtgccctggcgacactggacctgccttggcttctttgatcccaaccccacccccgatttctgctctgctgactggggaagtcatcgtgccacccagaacctgagtgcgggcctctcagagctccttcgtccgtgggtctgccggggactgggccttgtctccctaacgagtgccaggtgaggctgcggcggctccgacgcaggtggagctgctgacctggcccctttctgcggctgcgaggtgtgtgaggttcgtgggcctccacaggtgtgggagccatccaggtccccagggcccttgtggctattctaggacagcccaagccgtagtagggacggccccccacagcttagaagacctggctcagtcccccagctttgtagaggtggctcttgtttggtgttgagatatcagacttgggggtagtagcttcagtgttcccatggactttgaaaaccagcacacacttaggtttgaattcttgggcaagttttgtatcttgagcgctgtttttcgtgggtaaaggtggccaccagtagggtgacagttgagggtggcattgaggctgctggccctgtctgcctggtgtccccagtgacagtgctggccgacaggctcccgccgagaacgcaaaggcgaaggtgccaagcccccgaggtcccgtgcagatgtgtggagctggaatctggcgtgtgtgccgctgcctctgatcagggacctggtcccctaccccatgctcctgccctgccctgcaggacccgtctgtcccctgaagccacagggacgtggtagtggctgcacggtctgggaagggtgtccccgtggagggctcctctctcagtgaggctgagcctctgccctgtggtacttgttctgctctgtcttcaacatggtgaaaccctatctctactaaaaatacaaaaattagctgggcgtggtggcacacgcctgtagtctcagctactcgggaggctgaggcaggagaattgcttgaactcaggaggcggaggttgcagtgagccgagatcgtgccactgcattccagcctgagcaatagaatgagactctgtctcaaaaaaaaaaaaaaaaaaaaaaaaaaagaataacaggtgtcccctggcccagcctgagtctcagttctgagcgcctgatactaaggcagggacccagcaccccacatccatctggggccccagccctgcctagtccccacctgatggtatggtgaggaccctgccatgtcagccaccacagggtggcagctaccccccagccgcagcggcccagcctctgaacatctgtctcctcaccttcgagcagaggccgcagcatgtgtcgcagaccagggctgggttggggccatggggaggggtcctacctgcccccgcctcccggtgatctgggcgccgctcacaaggcctcccctggtagacccccggggtcggacgacggcttgcaagaagagagtccctgctgggccaggccaccgtatgttaggagcaagcctgcctgctgcgggccacgtgcgcgtgctggggtggcaggagcccgctcgcctctcctgaccccgtgctctgcctcctgtgttccagggactttgaacatgtcggggatcgccctcagcagactcgcccaggagaggaaagcatggaggaaagaccacccatttgtaaggagggcttcatttctgtgtgcagtgccgcggacaggctccctcggctgaaaccgcgccctccctactgggagggagctggtcgcgtgcctggg

SEQ ID NO: 14972 - DNA, 2300 bp, Homo sapien
caaagaggcccgtggctgtggccgtggcgccctggtccgggcgatccatggagctgggagggagtgagatcacagatttggaggtcggctttgatccctgatccccgcctcaggctgcagatgcgagtctgtttccagctccacgggtgggcggtgcacgtaatagacttagtctctcatcccagctaattggctgggaagctccagagtcctttgcagggagaggctgtgagatccaggctggagctcctgggctaggagtgcctggaccctcagtgattgttggcgatgaagacaggatttggtgcccacaagaccccagccctggatgggatggacgtgcagaagcgccaccactccgagtctcactggagggtttatcttgccccacctcactgctcttcctgtgggctctcgcagtctctcccacccggggctgcgtctgcagccgggcaggcatagagcaggggagcagcagagaaggcgcgagaagaaagggctgaggccaggttcgactttgagcctacagctaagttagtgatctcagtcagttcagcaaaactcaggagagggaggagagggccgccacgtccctgccgtcccatagctggaaatcggcaggccctttctgtggtgagttccacgcattaacacgtgcccagcacctagacagcgcctggccacggtgaggcgagagtgctgtgtaaaagcttccactgcaattgtcactcaagacacacaagtgttttccacagtggcagtgaccagaggagcttgaggactgctgacagcaccagctggtcgagacttgcttcatttttggattgtcctttgctgtttgattttttttttaaaccatgagcaggtattacttaagatgacttattttaattaagaaaaatataagaatgagacacagtagctgctttcattgattctgttcaaccgttgattggaattccaagcaaatgcagcaagacaagaaaaagaagtcacaacggaagaggtggggaggaaggccaggacaacagctcagtaaagctgaggtgcaaggctgggcacggtggctcacacctggaatcccagcacttttggaggccgaggtgggaggatcacctgaggtgaagaccagcctggacaacatggtgaaaccctgtctctactaaaaaaaacaaacaaacaaacaaaaattagcgggtgtggtggtgggtgcctttaatcccagctgctcgggaggctgaggcaggagaagtgcttgaatccaggaggcgggtccagtgagccgagatcgcgccactacactccagcctgggcagcagggcaagaccctgtctcaaaaaaaaaaaaagaaaagaaaagtagcacaggacctggtaaaggaaacaaagctaaataataaatataaaaatgaagtcgagattgaggtacacaaatctgcttttatatcatttcagcgagcaaggttttaaaactgccatttatagtagcatgaaatacgttggaataaatgcaataaaagattggttcaggacctctgtaccgaaaactgtagaatattgcaagggaaaccaaggccggcctgagcggtagctgagctctgccgtgtgtgtggaggggaacacacgacattgtacagacagcccttctctccaggctcgtctgcagattccatgtgatcccagttggagtcaagcacatcttgttggaaactgtcccatggacccaggaaatgcagaaacgtggaggccttggcttcttggtggggtggcgagacccaggctgaggctccgtgggtgcagagcacacccacccaccccccactagacctgccacgggacacggtgatggagactgcaggcttgctgagaagacaggcaggcagacccgcggacagaacgaggagtccggaggccacgcatgtggtggtttgggctgtgacacctgagggatattccagcaggagagacgagctctgcctcccaccatagagaaacagcttccagatggcttgtggtgcccaagcaggacagcgtggagaggaagacccgggatggtgtccgtgagccctgggcaggcagggatctcttcaccagggatgcagtgaagtgctggccggagggagattgacgagttgactaagttgaaattaagaatctctctttatcataaagactgcagttggcgccgggcaggagggcacactacagtgtatgtacgtacctcagccctcaccctgaatctaccaagagctcctgggaatcagtaagaaggctgccatgacgtccagcgtgtccctcaca

SEQ ID NO: 14973 - DNA, 2300 bp, Homo sapien
caggacctggtaaaggaaacaaagctaaataataaatataaaaatgaagtcgagattgaggtacacaaatctgcttttatatcatttcagcgagcaaggttttaaaactgccatttatagtagcatgaaatacgttggaataaatgcaataaaagattggttcaggacctctgtaccgaaaactgtagaatattgcaagggaaaccaaggccggcctgagcggtagctgagctctgccgtgtgtgtggaggggaacacacgacattgtacagacagcccttctctccaggctcgtctgcagattccatgtgatcccagttggagtcaagcacatcttgttggaaactgtcccatggacccaggaaatgcagaaacgtggaggccttggcttcttggtggggtggcgagacccaggctgaggctccgtgggtgcagagcacacccacccaccccccactagacctgccacgggacacggtgatggagactgcaggcttgctgagaagacaggcaggcagacccgcggacagaacgaggagtccggaggccacgcatgtggtggtttgggctgtgacacctgagggatattccagcaggagagacgagctctgcctcccaccatagagaaacagcttccagatggcttgtggtgcccaagcaggacagcgtggagaggaagacccgggatggtgtccgtgagccctgggcaggcagggatctcttcaccagggatgcagtgaagtgctggccggagggagattgacgagttgactaagttgaaattaagaatctctctttatcataaagactgcagttggcgccgggcaggagggcacactacagtgtatgtacgtacctcagccctcaccctgaatctaccaagagctcctgggaatcagtaagaaggctgccatgacgtccagcgtgtccctcacaggaaaggcctccacccagccagcaaatgcggcagggatgcctggctttgccaaagagtgaaagcctccccagtgggatctgccgtagcgcacaggggagcagacggagccgcggcgcagggcagcgggagcctcagccaccgctggagagagcggatgttctgaacgtttcccctggacgctgcctgccacaccagtggaagctgagctcatgctgtaggacctggctgttcacttgagtcagtcgagattcacagaagcacatacatgtgtccaccagaggcacagatgggtgccggtgtcacccccacttgccccagcccagacgtcctaggatgacaggtagggaagagtgaagaggccacatgatgcctggcggacagtccagacaggagggcaccccctttgtgttccttctttgaagcgcgggagcggccaagccggaggccatgaggaagtaggaggcagcctctaccttgggagggacaggtggacctggcagtgctggcatccagcatctgtgcctttctgcgggtaagttgtgatcggcagaagaaacgagattgagaatcagattaaattgaaattaggcaatttttgtttttgccaaaagattcccttagaagaggaaaaggtcgggccgggcgcgttggctcacacctgtgatcccagcactttgggaggccaaggcaagtgaatcacttaaggtcaggagtttgagaccagcctgaccaacagtggaggaaccccggttctaataaaatagaaaaattggccaagcttgatggcgggtgcctgtaacctcagctactctggaggccaaggtgaggcgggagaatcacttgagcccgggaggtgaaggctgcagtgagccgagatccagcctgggcaccacagtgaaactccatctcaaaaaattaaaaaagcaaaaagtcaagccccaagcagaagagccctgtaagacgtatcgcttgaggaacttctgcgaagcagtcgccaggaagcagcctgggccgaaaggggcgctcagcggtcaccagcaggcgcagcgtagcaccacggagtggctgccgtgcacctcacccggtggctggaatccgccagcgacgcagcctgcgtgagcagcctggaagcagcacggcttgagggccaacaccgtcaccccacattccacagcagcgcgctcacgcgtgttcgcactcaggacagccacgcagctgctggtgtcgcccgtgtgctcctgcggtgtgggatggtcgcggtgtgggacggtctgcggtggtgtcttcgcgttccccagggagtgtgccctgtgcatctccatggtacctgaagtccaggaagctgcctgcggatgttgcagtt

SEQ ID NO: 14974 - DNA, 2300 bp, Homo sapien
agaacaagttggagaatgaaggccttggtcactgagtggggtgtcgctcggatcgttcattcctcgactcctcaccaaatgtttgtggaggggacagtcctagtgaccgtcctctcctggggaaacggaggcccagggctggtttgggactcaacctatcactatgtggccctggaaaagccctttcccgtctccggactccagtctccctacctagaaaagagtggggagaggtctccaagggtgctcccgcacccaacggactgcagtgttggtttcagggttggtgctctcgtaggggccggagcagcggctgcccctcccaacttcctgtttaccgtagctgcagagcctgtcccttcacttaaagccagtgtgatcaccatggcaaccggcctgtgtttgttccaacaggtgggcagaacctggtgcaagaccgcagaggcaggggcgtcactcccagacccggtctccagacccaccagcccctcaggagaacactgctacagagtggggctgagggcccaggccccctcccctgcttcccccaccgcgtccctgtcccagccagtccctgcatttcctgcaagctccctgccctcccccaccggcctggctgtgctgggtcaggatccggcagagcctgggccgagcgtcccgaaggagagcccacccaggggtcctgcccccgatcctgcacagacaggtgtggggcgggcatggatttgagtgagttgggatccagaagccaagacagttgttggcagacgggccccctccctttgaagagctgtgttctggaagcctgtctggccttgggctgcccaggtgcccttcgggtgaaaactccaaagtctgaccaccccccaccccttgtccccaaagggctgcgagtgtccagctgtattcgaccaagggcaggtgcgaccggggggccgctgcgccctcggcaagtctgagagcctcaggcccccgacaggaccatgcttagcacggacttctcaaagtgtggtccctggactggcggcagcagactggagctgggaagtgcaggcgctggctggcgtggggaccacacctgtgatctcagcgccttaggaggccggggaagggggatcccttgagcctgggagtttgagaccagcctgggcaacatagggagacccccatctccacaaaagaaaccaaaaaacattagccggcgggtggtcccagctactggggaggctgaagcgggaggaccacttgagccggagagttcgaggttgcagcgagtggagatggtgccactgcgctccaacctggttgagagctatttttgagagctttttcgagactctgtctgaaaaaaaaagggaaaaaacgcagatcgcgcccccacccagacttcgggaccagcgggttggggacaggacccatcaatgccttaacaaaccctgcaggagaccgcgggcccgctggggttccaggacagcgcagcggaggaagagcggggagccacccgggaggggctggcggggtccagtgcagaccccaggggctccgggggctctggccggctgtgaccccacaagcgccaactgggccctcaccagagccccagggacgatcgccccacagaccgtccgcgtgggcgtggggcgtcccgagtggatccctgcaggacgcatccccgccccgagaagagagcggcggggcccgcgaggtgtccctgagtcaggcccttccagaaaggtctgcaccgctgctggtcttcgtgaccgtggcttccctggggtccgcggaggagaccccgccgaccacccccttctagaccccacgcgccacggggagggcgcgcgcggccaggcggggtcccgaggcagccaagcccgctccccgtcccgcagccacctgtgggttgactcacagccccgcatcccgggggagggggctccggcccggctcaaggcacggagaccccggccgggtcccctaaggcgccgtggacgcggggggcggggcgagcgcggtcaggccccgccccggtcaggcccggccccgcccccagtcagaccccgcccccgcagcggcgtccgcccagcagttgctcagtcgtcggcgcgcgcggctgggagcggtagctgtgcctcggcgtccccgagctggtgccgagcgcagcgccccaggagcccccccatccccgcgccggcccacggtaagtgccgcgggctgcggccagtgctgttgggccgccgtctgggctcggccccgcgccccaacccggacggaccgacggccgccgcccccttggtccgggt

SEQ ID NO: 14975 - DNA, 2300 bp, Homo sapien
tctcaaagtgtggtccctggactggcggcagcagactggagctgggaagtgcaggcgctggctggcgtggggaccacacctgtgatctcagcgccttaggaggccggggaagggggatcccttgagcctgggagtttgagaccagcctgggcaacatagggagacccccatctccacaaaagaaaccaaaaaacattagccggcgggtggtcccagctactggggaggctgaagcgggaggaccacttgagccggagagttcgaggttgcagcgagtggagatggtgccactgcgctccaacctggttgagagctatttttgagagctttttcgagactctgtctgaaaaaaaaagggaaaaaacgcagatcgcgcccccacccagacttcgggaccagcgggttggggacaggacccatcaatgccttaacaaaccctgcaggagaccgcgggcccgctggggttccaggacagcgcagcggaggaagagcggggagccacccgggaggggctggcggggtccagtgcagaccccaggggctccgggggctctggccggctgtgaccccacaagcgccaactgggccctcaccagagccccagggacgatcgccccacagaccgtccgcgtgggcgtggggcgtcccgagtggatccctgcaggacgcatccccgccccgagaagagagcggcggggcccgcgaggtgtccctgagtcaggcccttccagaaaggtctgcaccgctgctggtcttcgtgaccgtggcttccctggggtccgcggaggagaccccgccgaccacccccttctagaccccacgcgccacggggagggcgcgcgcggccaggcggggtcccgaggcagccaagcccgctccccgtcccgcagccacctgtgggttgactcacagccccgcatcccgggggagggggctccggcccggctcaaggcacggagaccccggccgggtcccctaaggcgccgtggacgcggggggcggggcgagcgcggtcaggccccgccccggtcaggcccggccccgcccccagtcagaccccgcccccgcagcggcgtccgcccagcagttgctcagtcgtcggcgcgcgcggctgggagcggtagctgtgcctcggcgtccccgagctggtgccgagcgcagcgccccaggagcccccccatccccgcgccggcccacggtaagtgccgcgggctgcggccagtgctgttgggccgccgtctgggctcggccccgcgccccaacccggacggaccgacggccgccgcccccttggtccgggtcccccaggaggcacgggggtggcctccgaggcggggggcggtgggaaggtctcgacgtcccctcggccctggggaaactgaggccgcgcatgcttggaggggcggggtctcgggggcatttcccctccgaacgcgcaggagagggtgcggcggtggggtccgcactgcggagcggacggggagggtatccgggcgctggcgacggcctcccccgcacttgagccgccaagcgaggcttcgacccccgcgcctccctccccgggggagcagacgggcccggggcctcccagcacccctcccgggcgggctgcaccccccagcgtcctcgtcccttccctcctcccgcaggtcctcgtaaggccctttagtccccccgaaatccctgcgagtgcaaagcggcccctccttcagccccactcggcaaagggctgtgggctcttgcctgggccggggtctccgggggaggagtttaaagtgacacactagacccgcccccagactcaccccggaccgcccgccccctccgaggggagagacccccatagaactgggggtgtggctcctgcgggcgcccggggccccgggaaagggggtgccgcgaggcggggcagggagggggtcggtgagcagagggaggagggagcgctgcgcagacacgggcgaggggaggaagaaggcgcctcgggctccggtctcctgcgctcctgctgggcgccagcggctggaccttggcagccgtctgaggcttcggggagcccaaggccaccggcagcgcttgttagaatgcagattcccggggttcgactggaatgagaccccggggagcagcgtttgcagcgggcccgccaggtgacctgcacctgggcaccgccatcggcttcgcaggggccatctggaggagtcggtgagaccagggagagattcctgcgggaaacccccagggcctggtgaaggggagtcggggggctgagggaggaagagcagggaagctggagagaa

SEQ ID NO: 14976 - DNA, 2300 bp, Homo sapien
cagaggtagaagagagccctgggtctgagtgatcatgaaattaagcccaaggacctaccgggtgctggccacaggcctgttggggtttccaaactctctccctgaatccacatcgaagggatctgagccgagagaggaaagtggcctctaagtgagctcagagcaggaccaggcctcccaccccccaggctttggagggccttggttcccaccccgccaaggctcaccgatctcctcctcctgggggctctccttggcattggccaagaactcctgctccgcctgcagcacctcctccgggctgccgcaggccgcgtacttgtccaggagctggcggttcaggtccaagaagcccttgccccatttaaacttccgcagcaaaatgacagcaaggtctggaaagcctgacggtgtgagaaacaggaaacccaaagaagtcgacggtcccctcaagtgcctcctgatcaccctgctgccggatggcggcgctctcccaagtaaccgcagggtccccagcaaacatcagctcacagtcctgagaacccgtgctgcccccagcctgcacctcccttgctacagtccacacctctgcaaccgaccaagtccccctcctttgctgcgaaacaaacattcccaccaagactgccccacgcctcatcagggcctctttagatcagcaattcagtaaggaggacgtggaggataaggaggattctctgggcagtggtgccctgataatgaatggcaccccacacaccggccctgatagaacagcgatcccattctgcctctactgcaactccacaggccgaaaacctgaagtgacagttggggctggaaccgtggtctgtctgaactgttcccctgtccgtcccttatgctcctcctggggtctgtcggcaggaaacatgatgctgggagcatagcaggaacagcaggccgccgggtcacactgctgtggggcccctggactcacctacgatgcagaaggtggcagcaaacgcttccacgcaggaaagtctgtagggccggccatagttcacggggttggcggccaccaggtagggcaacaggcgcaagtggctccctcgcatcttcccaaacggtgtctcgtccagcctggcccaggagcagtcgatgacggcgaccccagactgcgccaccagctgtctgccagggacagcatgggataagttcaggagccagcactacccaaggtggagcatgccccggagaatggcctagctaagggattcagggacatcattccgccatccccaaacaccctcaaacggacttcacgagcaagcttttgaggcagctgcttggggcacctggagcatgtgtttattcactcaacaaacgtttattaccccaaaacctcctttatcccaggctctgcgctacgcaacggaggcaaactagacagacgttccctgcccacgtgggtgtggatgtgggtgcgacatacaagtgccactaaaccatccctgaagggaaccacgcgctggaaatgaagacgacctcgggcaggcctcccgcgcctacctgtctgcgggggacgcgtactgcttgcccacggggctcagcaccagaccgccgaatctgtggcccaggcgcaggcagcgcaccagccccaggcgggccagcttgcggcccgtgcagcgccgggggtcgcagtggcccaactcccacatggccagcgtgcagggcagcgccgccgggcccgggccgccctcgccgtcagccgcccctggctccacggaagctgcacgagagagagaagggcactcggcctcagcgtgggacccccgggcaggccctcaaaccctgacccgctctccccatcacgcctcgctcaccctgcagcgcggcgccgacctcctcggcgaaggcctccagggagcgcgtcgggaggtgccgagggcggccgccttccgcccccggcccgcgcgctgccctcctgcggcccatggcgcggacctggggtgccggggactccccaccccacggccgcgcccctcggcctcccaatgggctgtgcggctgccagcgcttgcgccggacgccacttccggtccccgtggtcacgtgaccgtcacttcacgtgaccgcgcggcggccgctgcggcgcgatggcggcggggctggcgcggctcctgttgctcctcgggctctcggccggcggtgagtggcccggccgtccgcgtccccaggccccgcgcgcgctctgcaccccggcctccccgctcacggtctcgctccccgtagggcccgcgccggcaggtgcagcgaagatg

SEQ ID NO: 14977 - DNA, 2300 bp, Homo sapien
tttatctctgatctgtggctaccccagctgaatcccctctggccctggctgtcctgctcaaggcctttggccactccctttcctggatccctttccccaaatagccacagctttactcccttttctcctttagcttttggctgaaatgtcacttcttagacttttcctcagcaccctatttaaagcaatccccaccaagacaggaggattgcttgacgctgggagtttggggccagcctgggcaacatagtgagacttccatctctacaagaacacttaacatttgccgggcatggtggcgtgcacctgtagtcccagctactcaggaagctgaggttggtggattgcttcagcccaggagttcaaggatgcagtgagctatgattgcactactgcactccagcccgagtgagagagcaagaccccgtctctaaaaaataaaaaaagcgatcccccaaacaatactctaacacacatacacacactccctcctctgcttcacacatctacatggcatttttcatcattggccattctatgtattttatctaattctacaggctcagtgcctgttcctccatccctccccattagactgtcagctccatgaggacaagcattggtatatctgtgttcgtttctgcaaccccagcacagaccctaacacataaaggtattcgataataaaattactaaagctgggcgcggtggctcacgcctataatcccagcacttttggaggccgagatgggcggatcacttgaggtcaggagttcgagacccgcctggtcaatacggtgaaataaaccctatctctactaaaaatacaaaaatttgctgggcgtgatggtgatgcatgcctgtgatcccagctactcgggaggctgaggcatgaggatcgcttgaacctgggaggcggaggttgcagtgagccgagatcgtgccactgcactccagcctgggcgacagagcgagactcttgtctcaaaaaaaaaaaaaaaaaaattcttggatttttgtctattatatttaatactcattcagcgtttaaatgatatatatactcatgacccaccaattccacttctggaatcctgcactgggaaaccgctcacctgagggcaaaccaaagcacctacacagcatgttctccacagaactatttctaatggccaaaaaaatggcaagaacctaaatacaatcggggagtgcagtgccatcctatcgcgtgctgagcaccaagagaaagaacgaagacctatatcatcaccatgaagcgtcccgagagatacagcgagtgacaacgacaaatcagccaaatactcgcgcagcatgattttttaaaaaagcgattagattacaaaaactatacgttttccagttgcatagacacgcacgtaaaagcacagaaacgcgtctgcaaagtcaccagactattaacagcagttacctctcggaaaggaaaggaaggactaagtctggagataatttaattcgctacaagaacgttctggtatattctctcgtacttccacattaattttagaaggctgacaaaccaatgctttagactccgggccgtaactctcagggtcactcatccatcctccactgttgctgctccccgcggccacccccgcgccggccaacagcgctcctcactcaccagacacgggtgaaggatccctcttggcctggaggcgactggcctgaggcaagaacgggttgttcaccctacgggaagcggcaaggtcagcggggaacgggcccgggccgtcccccgctcgagccgccagcccgcgaggctgctcacccaaacgcgttgggctcctccaccaccttcatcttcgctgcacctgccggcgcgggccctacggggagcgagaccgtgagcggggaggccggggtgcagagcgcgcgcggggcctggggacgcggacggccgggccactcaccgccggccgagagcccgaggagcaacaggagccgcgccagccccgccgccatcgcgccgcagcggccgccgcgcggtcacgtgaagtgacggtcacgtgaccacggggaccggaagtggcgtccggcgcaagcgctggcagccgcacagcccattgggaggccgaggggcgcggccgtggggtggggagtccccggcaccccaggtccgcgccatgggccgcaggagggcagcgcgcgggccgggggcggaaggcggccgccctcggcacctcccgacgcgctccctggaggccttcgccgaggaggtcggcgccgcgctgcagggtgagcgaggcgtgatgggg

SEQ ID NO: 14978 - DNA, 2300 bp, Homo sapien
cactggagtggcttccaccctctgcctgggaataggctgctgtgaacttgggtgtaaatatttgagtctctgcttccaatttctgagagtagctttgctggatcttattagaattccatgtttagctttttgaggaaccaccaaactgtttgcatagtggctgcaccgtttcccattccagccagcattgcacgaggggtccagtttctccacattttcaccaacactgttttttgctaacagccatcctagtgggtgtgaagcggtaccttagggttgttttaatttgcatttccctaatgatcagtcatgtgggatcttttcagttgcttatggtgtttgtccttttttttttttgagatggagtctcactctgtggcccagactggagtacagtggcgccatcttggctcactgcaagctctgcctcccaggctcaggcgattctcctgcctcagcctctcaagtagctgggattacaggcgtgagccaccacacctggctcatttttatttagtagagacggggtttcaccatgttggccaggctggtctcaaactcctgacctcatgatccgcctgcctcggcctcccgaagtgctgggattcccggcttctctgcccatttttaacttgagtttattgttgggctgtagttctgtgttctggatgtgagtctcttacatacgtggtttgccagtgtttattttctcccattctgtgggttgtcttttcactcccttgatgggtttgtttttttttccatatagagtctaactctgtagcccaggctggagtgcagtagcacgatcttggctcacggcaacctctccacctcccaggctcaaggaattctcctgcctcagcctcccgagtagctgggactgcaggcatccgccatcacgcctggctaatttttttgtactttattagagatcaggtttcaccatgttggccaggatggtctcgatctcctgacttcgtgatccgtctgcctcggcctcccaaagcactgggattacaggcgtgagaccctgcgcccggcctctatgccagtctttatgccagtatcacactgttttgatcataacagctttgaagtaatttttggaatcagtatgtacgagtctctcaactctgtctttaagatttgttcgatgatttggggtcctctgagactccctatgaactttaggatgtgtttttctatttctgcaaaaactgtcattggggttttgatggggttgcattgaatctgcagatcactctgggtggtattgtcatcttaaaaatattgaatccatcaggctgggcgctggggctcacgcctgtaatcccagtactttaggaggctgaggcaggtggatcacctgaggtcaggagtttgagaccatcctggccaacatggagaaaccccgtctctacaaaaatacaaaaattagccagccgtgatggcaggcaccggtaatcctagctactggggagactgaggcgggaaaatcggttgaacccagtggtggagattgtagtgagccaagatcgtgccactgcaatccagcctggcgacaatgctagactccgtctcaaaaaaaaaaaagtggcgtatggatgtctcatgtcagctttatgtagtgggtggcactgtttgtgcgtggataattgtggtgtcttggcacattgacccttttatcaatgtataacatctttgtctcttaaaatagtttcagccacttcagctctcttttgcctgtttatatgaatacttttccataccttcactttcaacctgtttatgtctttaaatctgaagttagtctttcaggccgggcatagtggctcacacctgtaatcccagcacttgggaggccaaggtggacggatcacttcaggtccacagttgcagaccagcctggccaacacagtgaaaccccgcctctgctgaagatacaaaaattagctgggcgtggtggcgggcacgtgggatcccagctactcgggaggctgaggcaggggaatcacttgaacccaggaggcggaggttgcagtgagccgagatcgcgccactgcatttcaccttgggtgacagagtgagactgtctccaaaagaaaaaaaagaatctaatgcctgatgagctgaggtggaacagtttcatccccaaaccacccatccccacccccggctggtagaaaaactgccttccatgaaaccagtccctggtgccaaaaagattggggaccactggtttaagtcctgtagctttacagaccatagctagaaaggcaactggtattaattcaccc

SEQ ID NO: 14979 - DNA, 2300 bp, Homo sapien
gaaggcagggctggctgggtgaggccactctgaggcgggtccttcccactcagtcttgagccttgggaattgaggtcttggtgcttggcatgaaattgcacgtgaacacctgctccttgaaatcaccctcacagaaagttttttttttgtttttgtttttgttttttttgagatggaatcttgctctgtcgtccaggctggagggcagtggcacgatctcggctcactgcaagctccgcctctggggttcacaccattcttccgcctcagcctcccgagtagctgggactacaggcacccgccaccacgcctggctaattttttgtatttttttttttttggttgagacggggtttcaccgtgttagccaggatggtctcgatctcctgaccttgtgatctgcccacctcggcctcccaaagtgctgggattacaggtgtgagccaccgcacccggccctggaaagttttttaaacagtcgaatgtgcacacgtggacagatgctaacacacacttaggtatttaaactctgaggggcagcagcagcgtgtcagaggcgaggacccagctgctggtctgtggtgcggggcgtcccacctgagcacgctcgttttgccggaggaacagccaagcctcacactgcctgtggggggctgcgaggacgggctgggggtgtccttccctggctgccccagcaactcccacgccttctgcccttggtctcactctaagcccaggtgggacggtcgtcctcctcagctaggcttcctgagctctgcagcgctgggtgggctgtggatgatggggggctctgttgacaggttctgcgttagacctgcatcttagcaatgtgaatattgcatccctagagaaggacctggaagagcaagacggccacgacctgggagcagcaggtgagggtggggaggacctggggccctgctcctccagccgctgaacagccaagtgctgtggccggaggatcgcttgagcccggggaggtcaaggctgcagtgagctgaggttgcaccactgcactcctgcctggaccacagggcaagacccggtgtctggttttcggagcgggaggatccccttctggcggtacctcctcctcctctccctgactgcctctccctttccctcccctgcacatggactcctcagcatctctcctgcctcgggcctgcccacttcttcagttgacctttgtcccagcaaagtggccgcgcagagacaggcggggcctttcctgaaagtcttgatggtccccgaaggataaatgtattcacattgtagacaaaagattgacatccatacaaatgtatctttttttttttttttttttttgagacagagcctcgctctgtcgcccaggctggagtgcagtggcgcgatctccgctcactgcaagctccacctcccgggttcacgccattctcctgcctcagcctccggagtagctgggactacaggtgcccgccaccacgcccagctaattttttgtatttttaatagagacggggtttcaccatgttagccaggatggtctccatctcctgaccccgtgatctgcccgccttggcctcccaaagtgctgggattacaggcgtgagccagtgcgcccggccccatacaaatgtatcttaacatcgtatacaacatcttttcattcagcctaaaagtgtatcttttctttcttttaaaagaaagtaaaccatttcagggggcctggacaagtgctgggaggaccgtgccaatggcttagttggccggcagggcctggtgggtgtccggcctctttggggggggcccatgttaaacccccgtctccccacctctggttggaatccctttgagcccatggcttgcccagctgtgttggacatggccaccgggggcgctgtggctccaaacacatagatggtggtggctggcctggcccctatattcccaccccccatatccccaccaccaccacctgcagggtccgtcttccacggctgccgcccatggcagatgtttgggcagaggcctggcggtactcccttcgctgactggtccgcccccgccaggtcccaggtcgctggccggctctgcacctgtcgccatccccggctccctgcccagagcaccatcgctacactcgccatcctctgcgtccacctcgccgctcggttcgctgtcccagcccctcccagggccggtgggctcctcagccatgacgcctccccagcagccgccacccctgcgttcagagccgggcacactgggctctgcagcctcatcctacagccccc

SEQ ID NO: 14980 - DNA, 2300 bp, Homo sapien
ttttaatttgagatcactatcatacatgggttgcataatccagggccctggatcttactaaatcacaccctcaaattcacacatccccttcagaaactcagaggtcagggatgaagtctacacagtggctaaagctccatgagggtctggcctctgagcaggttctttttttttcttgctctgttgtgcaggctggagtgcaatggcacaatcttgcctcactgccacctctgccttccgggttcaagcgattctccctcctcagcctccggagtagctgggattacaggtgtgtgccatcatgcccggctaatttttgtatttttaatagagacggggttttgccatgttggccaggctggtctcaaactcctgacctcaggtgatccgcccacctcagcctcccaagatgctgggattacaggcgtgagccaccacacccggtcacttatttttttcttttaaacaaataagcacacattctttttaaataaagtttctcttccccaacctaaaagtagtaatgctagaatttgagcatagcagaaaaatatttaggaaaattaaatcccaaacaagagagaccatcttggactgtgctcactcgggtggaaagtcgacccaggtgcctgtgtgcttgacagaggcgtggctgcatccgcgtagctgaccttcagatggactggagttagcacatttgtagtcatttttccaaccattctttcgtatctgaggtacgtttttgacctgttttagtatgtcactcgcgatcttgaagcacactctttcatttacttaaatatttcctgagccgtgagcagtggctcacgcctgtaatcccagcactttgggaggccagggcgggtggatcacctgaggtcaggagttcaagactagcctgaccaacatggtgaaaccccatctctaccaaaaatacaaaaattagctgggtgtggtggcttgctcctgtaatcccagctactcaggtggttgaggcacgagaattgcttggaccgcaaaggcggaggttgtagtgagctgagatcgtgccactgcactccagcctgggtgacagagcgagacttgttctcaaaaaaaaaaaaaaaaaaatcctgaaccagctactcagaggtgaagagatggattttttttttttttcaggatcgacactgccttagttagaggcaatgtattgttgctgctgctgcggctgaaattgtgagctttgccacccagtgccagcctcacttttttcctctgtccatgtctgagacatcgctgtaaagttacatccctgcactagccacaggcactggaggcagtgtcctgcccgctgaccccagggcactcctgcgccccaggctcagggactccctgcccatggctcccgggactgtctggccccaggtgtaggcccgcctggctgcgtgtgtattttattagctgttgtagagggttttggacaaagctggtgtgtagactgggtcgttttttccttgtgttaatagtacagtttccttcaggttgtaggtgtactgtgactggagcacggaatagaagaaatgagcggattctgtatttaagggatttttagtgggatcatttcagacccatctgataggttccattttccttcatcttacacttcataggaacaggtttcagattaagagagacctgcgagctccgtaccccgcgtttagatggggctgggcaggcacgcggacttgggagggaggagggtcctgcagggcaggcagcggccccagctcacgccgccccgccccgcgagcgcccctgttgggtcgaccgtgtttcacctgagtccgcccggagcagctgcaggtgcaggtgggcagggcaggaggagccgggcagcggggcagctctggggctttctgcctgaagacctctggcccccgctgcccgcgcccacttgcccgcccagctcgtagccaggagccgcggggaccgggtgcgcccgagtcggggggaaggttgggggagggcagcgcggggggcgtggccagtgcgacgggggcggggccgagtcacgttgcggggcggggccagcgcggagggggcggggcgcgggccgggtttgaatccccggcggcggcgcggggcggccgcggaccgtgagtcagcattggcggcggccccagcgcgtggcagccgtgcgccgccaaggtgcgggtctcgttactcggcggtcaggagcgggccctcccttaggtgcgccccccgccaggtgcgtcccccgcgtcacggagccgggtgtgacagccgcggggtgggcc

SEQ ID NO: 14981 - DNA, 2300 bp, Homo sapien
tctgtttcctagctttagcaggctccctagacacctctgctggacagctcacaggctccttaaactccaaaatggaattcatctcccccaaacctgtttcttctcccttgctctgtatccttgcaagcgagagacctgggcgtcaccctagactccctttccattcctagcaccttgggagtcttcaagatctgtttattcgtctctgaagaatttgcaggccctgcccttcctgcttgacttcattttcctgcttgacttcacttgaaaatatgttcttcattatcattttaagatttaaatgtaatgtttgtagagataattcattaagaaaatgtgatcctggctggcgcggtagctcacgcctgtaatcccagcactttgggaggctgaggcaggtggatcacctgaggtcgggagttcgagatcagcctaactaatgtggagaaaccccgtctctacgaaaaataaattagctgggcgcggtggtgcatgcctgtaatcgcagctactcaggaggctgaggtaggagaattccttgaacctaggaggcggaggttgcaacagtgagccgagatcgtgccattgcactccactctgggcaacaagagcaaaactccttcctccccccgccccccgccaaaagaaaaagaaaatgtgaacctatgaagaaatttatcctaccagcaaatgatagtttttgttgttttacagtattaatattaaaaaaaaccctgagatacttggaacaaatctgtaggaagtgatttgctttcaacctaaatgggcccatttttcttttcgttttttttttttttttttttttttttttttgagacggagtctcgctctgttgcccaggctggagtgcagtggcgcgatctcggctcactgcaagctccgcctcctgggttcaagtgattctcctgccttagcctcctgagtagctgggactacaggtgcccaccaccacgcccgggtaatttttttttttttttttgtatttttagtagagacggggtttcaccgtgttagccaggatggtctcgatcttctgacctcgtgatccgcccacctcggcctctcaaagtgcagggattataggcgtgagccaccgcgcccggccaatgggcacatttttcatatcactaaaaatttcttttttattttttgagacagggtgttactctgtcacccaggctggagtgcagtggcgcaatctcggctcactactaaacctccgcctcccgggttcacgccattctcctgcctcagcctccggagtagcaggaattacaggcgcaagccaccacaccccactaatatttttgtatgtttagtagagacggggtttcactgttggccaagctgttgtcaaactcccgaactcagctgatccgccggcctcggcctcccaaagtgctgggattacaggcgtgagacaccgcgcccggcctcctaccactaaaaattcttcggaagcactgtttcaaatcacgcagagcacttagagttttcccttttctcagctactgcgctgttgggggaagggggacctcaagtgtttgcaaaataactgtgataattacctttgtagataaatctctgagtataagtttttgaggtcaaggttcgaaatggaacaaattcctttctacaaaggccaggaccccttggcccttccgcccggtgcctggctccccctgacatcagcctcttggttcgtttgtggaagagcagctctattgagatacaactcttgtgattaattcatgtaaaatacacggttatgtcgggtcatgtcacagcaggggcgaccatcgcgggtcccacgcgcggccccgggcaggaccagcgtcccgggccgggggctgcagggcagggcagggcagggcagggcagggcagggcagggcagggcagggcggggcgcggggctggggcggggtctgcgggccgggggcggggctgcggggggcgcggggctggggcggggccggggtctgcgggctgggggcggggccgcggggggcgtggccgcgggggcgcgcggggatatccgggggcgggggcgccggcgcggcgcatgcgcgctgcattgttttgactgaaaatgccgtcggtttcgaaagcggcggcagcggcgctgagcgggtcccccccgcagactgagaagccgacccactacaggtcagcgcccgtccggcctgcggccccccgcccgcgcccggtgcagctcggagcctcccgccggggctcgcgccgcctccgccgcccccgcgccccccggcctccgcgcag

SEQ ID NO: 14982 - DNA, 2300 bp, Homo sapien
ctcccaaagtgctgggattacaggcaggagccactgcgcccagttgtatttaactatttttgtagtgtgtttgtcttgttttcccaactgggctgtagcttttattttccccagggtacatggcacactgacctccccagataagcatttgagagggagaccattgtaagcatgctagaacagacgcagctgcagcgattcctaagatgacaaatggctgggcaggaggtggaaattgttttttgtttttttgttttttttttgagacggagtctcgctctgtcacccaggcttgagtgtggtggcacgatcgcggctcacagcaacctctgcctcccgggttcaagcaattctcctgcctcagcctcctgagtagctgggattacaggcgtgcaccactgcgcccagcaatttttttttgtattttcagtagaaacggggtttcaccatgttggccaggctggtcttgaactcctgacctcaggtaatccacccaccttggcctcccaaagtgttaggattacaggtgtgagccactgcacccagccggaaattgttttaaaacaaaaattcttgaacgggcgcagtggctcatgcctgtaatcccagcaccttgggaggccgaggcgggcggatcataaggtcaggagatcgagaccatcctggctaacatggtgaaaccccgtctctactaaaaatagaaaaaattagccaggcgtggtggcgggcgcctgtagtcccagctactcaggaggctgaggcaggagaatggcttgaacccgggaggtggagcttgcagtgagctgagatcatgccactgcactccaggctgggcgacagagtgagactctgtctcagaaaaaaaaaaaaaaaaaaaaattctttcaaggaagatgttaaccaaaccatctcaaaaacaaaaacaaaaaattctttcaaggaaggtgttaaccaaatggtcacgtctaagctgatgaactgtctatataactcaggtaccaccctagactttaaagaacatttcttccaaagcatgaaaaaacatgatactttcaatccttaagtcttacatcagtttcctttgatttcttcaaggaagatgcccccagggtgtggaggaacagcaggtgtcttcactcatacctttacagcaaagatccccaaattcctaaaccctaaggctccaaatctgtttcctagctttagcaggctccctagacacctctgctggacagctcacaggctccttaaactccaaaatggaattcatctcccccaaacctgtttcttctcccttgctctgtatccttgcaagcgagagacctgggcgtcaccctagactccctttccattcctagcaccttgggagtcttcaagatctgtttattcgtctctgaagaatttgcaggccctgcccttcctgcttgacttcattttcctgcttgacttcacttgaaaatatgttcttcattatcattttaagatttaaatgtaatgtttgtagagataattcattaagaaaatgtgatcctggctggcgcggtagctcacgcctgtaatcccagcactttgggaggctgaggcaggtggatcacctgaggtcgggagttcgagatcagcctaactaatgtggagaaaccccgtctctacgaaaaataaattagctgggcgcggtggtgcatgcctgtaatcgcagctactcaggaggctgaggtaggagaattccttgaacctaggaggcggaggttgcaacagtgagccgagatcgtgccattgcactccactctgggcaacaagagcaaaactccttcctccccccgccccccgccaaaagaaaaagaaaatgtgaacctatgaagaaatttatcctaccagcaaatgatagtttttgttgttttacagtattaatattaaaaaaaaccctgagatacttggaacaaatctgtaggaagtgatttgctttcaacctaaatgggcccatttttcttttcgttttttttttttttttttttttttttttttgagacggagtctcgctctgttgcccaggctggagtgcagtggcgcgatctcggctcactgcaagctccgcctcctgggttcaagtgattctcctgccttagcctcctgagtagctgggactacaggtgcccaccaccacgcccgggtaatttttttttttttttttgtatttttagtagagacggggtttcaccgtgttagccaggatggtctcgatcttctgacctcgtgatccgcccacctcggcctctcaaagtgcagggattataggcgtgagc

SEQ ID NO: 14983 - DNA, 2300 bp, Homo sapien
attgcactccaaccctggcgatgagaatgaaactcctcctcaataaataaataagtaaataaataaaggctgggcgtggtggctcacgcctataatcccagcacttttagaagccaaggccggcggatcacctgaggtcaggagttcgagactagcctggctaacatggtgaaaccccgtctctactaaaaatacaaaaattagccaggcttggtggtgggcgcctgtggtcccagccagtcaggaagctgaggtgggagaatcacttgagcccgggaggcagaggtctaagtgccgaatgggttcaacttgcctgctgcctagagagagccaatttatcaagacagggggagtgcaatagagaaggagtaattcacgcagagctggctgtgcgggacacaggagttctattattactcaaatcagtcagccggagcatttggggataggaatttttaaagataatttggagggtagaggcttgggaagtggggagtgctggttggtcaggttggagatggactcacgttcagactcttctgttcctggcgggcatggcagaaccggttgggccagatgaccggtctgggtggtaccagctgatccatccagtgcacgctctgctaaatatttcaggcactgatctttgagcttaggtttttgttgttgttgtgctttttgagacagagtcttgctccgtcacccaggctggagcacaatggcatgatcttggctcactgcaacttccacctccagggtacaagcgattcttctccttcagcttcccaagtagctggaactacaagcgagcgccaccaccccaggctactttttgtatttttagtagagacagggtttcaccatactggccaggctggtctcaaactcctgacctcgtgatccacccgacttggcctcccaaagtgctgggattacaggcgtgagccaccacacccggcctgatcttagattttacaatagtgatgttatccccaggagcaatttggggaggttcagactctttttttttttcagactgagcctcgctctgtcgcccaggctggagtacagtggctccatctcggctcactgcaacctctgcctcccaggttcaagcgattctcctgcctcagcctcccgagtagctgggactacaggcgcccgccaccacgcccggctaattttttgtatttttagtagagacagggtttcatcgtattagccaggatggtctcgatctcctgacctcatgatctgcccgcctcggcctcccaaagtgctgggattacaggcgtgagccacggcgcccggccaatttctaattttgcagctgatttattagtcctgcaaaggcagactggtcttcaggcaagacgggggttttttctggaaagggctgttgactttgattcagagtgaaaccatgaactgaaatccttcccaaagttagctctgcccacgcccaggaatgaaccaggacagcttaagggtgggaagcacgacggagccccttaggtctcatctcttccactgtcatttcctcagtgataatttttgcaaaggcggtttcagaggccgcagtgacgtgagatcgcgccactgcactccagcctgggcgacagagagagtccctgtctcacgaaaagaactaaacggaaaaaaaaaaaaaaaaaaaatagggcggtgccacggccttcggggaagccggcagagaggtgcgggcgcccagcccagggcaggcgggcagggctgagggcgcggatccccaaccaggccccgcgcaccttcatgacggttcagaactgctccgaggcaaactcagacaactctctgaggacaacgtccgcccccgcggcgcccgcctctcttcggggccagggaccggggtgtcggtcctattcgaaagggacggagaactacatttcccggcatgccatcgcgcactccgggcctgcgacggaaagagctcttcgcagccgaacgtcatttccgctgcgctactgggaccacgttctgtagtcgtgagcggaggcctggtatggcgcccggtttccggtttccggcgacggaagtgacgctatcacggcgcgccaaggcgtcagtcgaggagtcaaggcagcaatgaatcgtgtcttgtgtgccccggcggccgggtgagctcctcaaggtctcggagggccgagggcagacaccggcgggcgggcggagcgcttactgctctctctcttccagggccgtccgggcgctgaggctcataggctgggcttcccgaagccttcatccgttgcccggttcccggg

SEQ ID NO: 14984 - DNA, 2300 bp, Homo sapien
gtcggggaggtgaactgcgaggcctcccgaccctggcctgcccagctgtggtcctgatctcactgaagtactggggtccccctcgcaggaggcatccagtgtcctgagcgctggactttggggctgactgctcacggacagcccagatgcaggtgccctcccatggcggcctgtctgccccaatgccggcccagtcctgggcctgcccagtggtctgggggtctctcccaggggtgggtgctccccacagagccctgggcaggactcacagactccagatccccagtgctgtggtgtccccagcagcgtctgcctcccccaggccctggctcctacctggccggggccgacagctcttgctccacaggcagaccttcacccggacacaagcatttatagccgcgctctgcagccgccaggggctggcaaatatttggcgacagcattgtcatcgcagactgggcaaatagagcccgtttgctttagcgcccggcaaccagggccccgaggggggagcacgccccccgcctcacctgcacgcggcctgcctggggaccgtggagtgtttgtgcaggcgcagctggctcgcccccgggccccgggacccttatctctgctgtggactggggcccggacccagccttgtcaaataagcggaaaattaaatttcatgctattttgagttctggagtaggcctctctagaggacatcctgcctctgcagccagcggggtgaacagcactcccggccgcaggaggaccctggggaagggggaggggaaggaagcgaggtcccagggacccccagccagggcccggtgtgtgggctgcaggtggggctcctggagcacctgcccagctccctcggccatcgggacctcccggacagccatgaccatctccactggcccagtggttaccaggacgcctgctgggctgctgccgcccacctgcccagagctcagaggtgtttgcaattgatccttaatggcggaacccccttcttccccaggcttcttcccaggggccttccttcctcagctgcagccacccctggggtgggaaatggggggctgggaaccctcccttcacctactgctcccaggaaagcctcccccagaagcgtccccaagggcttctgccgctcccaccgactccctggctcttcctgggtggccccagctggtccactgtgggggccatgttagcttccttggactgctgtgacaatgaccacaactcaggcagcctggaacacaggtcaggaggccagaggtcctggtccagggcctccaggagtggctccttgcctcgtggttgcgtctccccagtctctgcctctgtcctcacggggtcttccctgtgtgtgtcctctgccctcctagggggaccccgtccctgaatttagggccaacgcccacccagtgtgccctcagcttcaccagttacacttgcagggtgcccgtttccaaatgaggtcccattcggagactcaaggtagacacgcattgtggggacatggctcaggtcgcacaggcgccacccgcatgtgactgtccctgaccttggcattcgccaggtgtgcccccgcttggcactgtactccccagagcagccccaagtggcccaggttgggaggactccacagtgtccttcccagggactctggctctgaggacgggacagcagcccccagcctggcctggccccagcaccccctgtcccgagcccccagctcctgggccttcaccttccaggggccaggagggttctggatgctaccccccaccccggtcctcacccctacgctccaggcgtcccccagtcagatgggagaccagctcctctcacccagtgacatccaacacacagagatttggacacaggcccagcccttgtctgcacctggggacctctggccccgccttgatttcttgggcacccggagggcaggagatcccagggggcctcaggcagtcaatgcaatcacccagtgtccggggctgcagtcaggacccccagcttccagggaagggacaggaaacgaaaagttcaaacttaagagtaagattctgcagagggcaggccggcggcctccacatgggtctcatggtgaggggtggggtcacctgcaggtcccaggaaaggctgctgggagtggggacagggacagcatcggcacagccaccagttacggcttctccttactgctccttcacaggcagaagccgagccgacgccccggtgagctcacagcccaggtgaccccatagcccagtgagcccacagcccagcgaccc

SEQ ID NO: 14985 - DNA, 2300 bp, Homo sapien
atgtccttgatgaagacccgcggcctcaccagggatgggagcgccttccagctgcccagcggcgtccgcgggccctcctcactccacagccggagcacactctcccacagggtggccatctcctgcgtgcgctgtgggacggggatgctggtgtcacccaggagccagacctccgggcaggggatggcaaacgggggcttatctcccaccgggagcctggaagccatttatcttcagggaaaccctgcccatggccagacacttggacagacagacactggcgcctgcagcagggcaggcggggaggcggcagggctgagggagcgggtgggagctgggcggtgccggccgggcaaggcctcctcaccagccgggcctcagtgttgaacctgaggttctggatggtcttgttggcctggacgcagttttccagcttcattatttggttctgaaactaaacatggcccccatttgggcacagacagggccagtctgctggcatcctgctgtccccacaggcaccccgatatccactgttgagtgcttacagcttgggcaggggccacctgctgaaatgctggtcctcgtccccactgcagggcccaggacaagctccgctgaggaagcggcagcctgagagtggccctgcggggacctggccagggctcagggttgttccggccctcgtggctgcggacggcaccccggtgtgggggctccaggcaggtgcctccacttagaactgccagaggctgagacaagctggggtggcccagggacagctgtttttgtttttgtttttgttttgttttgttttgtttgagatggagtttcactcttgttgcccaggttagaatgcaatggcgcgatcttggctcaccgcaacctccaccttccaggttcgagtgattctcctgcctcagcctcccgagtaactgggactacaggcatgcgccaccatgcctggctaatttttgtatttttagtagagacagggtttctccatgttggtcaggcgggtctcaaactcctgacctcaggtgatccacccgcctcggcctcccaaagtgctggaattatgggtgtaagccaccccgcctggcctccgacaggtggttttctgagcgtctcctgctggctggaaaatgccccgtaggctgggggtcctgcctctccgcacggctgccccgtctgaacctgatggctccccctctctcccagctgggtgcgggcagccccaggactaccgtggccagcttgccctgcatctccgcgatcttccgcccagggttgtcttcctttagcagctgcacggatgatagtagcgtggccagctcctgccgcagggccccaaccttgaactccctatgggcaccagaggccgaggctggctgtcgggtgtgctcgggggtagggccaggaccggggacaaaggccactcccacagccaccacagggttaaggaggctcgagggggctcagccctgtcacccctccagtggggaaggtgggggtccccaacggggggtagagggaggggctggaggcgcctcagaggctgcaccagggtggcagggtgagcccggtgctgggccaggcccgggctcagggggaacaggtctgtcacgataccaggggattgtggagagtagcgtggggaccggcccagcccagtaacggtcagcagagcccctgcccctctcccagggcctggaggctgtacctggccttgccttcggcggaaatcctgaggtctgagtcgctcttatgaagcaggcacttgtcggagacactctctatctgaacacagagccgggagcggcgggcagccccagggcgccatctaggaccagccttggcctcgacccacacagggagagggaggaggggagaggacaaggtgcagggagaagggtcccacgccacctccaaggcccaagtacaccaaggctggctgtgccttcgcccacctgctgggggaggccatccaccttctcccgcacccctcgcaggtgttcggtcacctccttccgccacctggccaggtcctccagggacttcctctctgcaccttcccattcggtctttgcctggggtacagatgcccagtgagggacaaagccaagagaggggggacagacagatggaaagacggacacggggagctctggggagcaggcggcccccacccccacttccagctctgagacatttgtgcacaggcctgcaggcggctgggatggcctggccgggcacgctctggagacacacatgccaaggcagggcctgggcagccgagg

SEQ ID NO: 14986 - DNA, 2300 bp, Homo sapien
tccttcaggaagaacctcagccccatccgcactcattcccatccccacttcccctggcgaccgctgggcccctccctgtctcgggggctgcctgttctggacgtttccaggaaacagagccacgcacggtgcggccgctgtggcggtgacacccacgggcatcccgtttcccgctcctcggggcctcgtgcgcagagcttcaccccttccaccgcggcgtaacgtgcattgcgtaggcgccgccccccggttcccgctcatccaccgacacgcgagcgcggctgcaaacgtgggcgacaccctgcgtttcggggctgggtcccaccggggcctgccctgcctccctcgggcacctgtgtggtcggaacagcccccacgggccctcggctgcccaggccctgccttggcatgtgtgtctccagagcgtgcccggccaggccatcccagccgcctgcaggcctgtgcacaaatgtctcagagctggaagtgggggtgggggccgcctgctccccagagctccccgtgtccgtctttccatctgtctgtcccccctctcttggctttgtccctcactgggcatctgtaccccaggcaaagaccgaatgggaaggtgcagagaggaagtccctggaggacctggccaggtggcggaaggaggtgaccgaacacctgcgaggggtgcgggagaaggtggatggcctcccccagcaggtgggcgaaggcacagccagccttggtgtacttgggccttggaggtggcgtgggacccttctccctgcaccttgtcctctcccctcctccctctccctgtgtgggtcgaggccaaggctggtcctagatggcgccctggggctgcccgccgctcccggctctgtgttcagatagagagtgtctccgacaagtgcctgcttcataagagcgactcagacctcaggatttccgccgaaggcaaggccaggtacagcctccaggccctgggagaggggcaggggctctgctgaccgttactgggctgggccggtccccacgctactctccacaatcccctggtatcgtgacagacctgttccccctgagcccgggcctggcccagcaccgggctcaccctgccaccctggtgcagcctctgaggcgcctccagcccctccctctaccccccgttggggacccccaccttccccactggaggggtgacagggctgagccccctcgagcctccttaaccctgtggtggctgtgggagtggcctttgtccccggtcctggccctacccccgagcacacccgacagccagcctcggcctctggtgcccatagggagttcaaggttggggccctgcggcaggagctggccacgctactatcatccgtgcagctgctaaaggaagacaaccctgggcggaagatcgcggagatgcagggcaagctggccacggtagtcctggggctgcccgcacccagctgggagagagggggagccatcaggttcagacggggcagccgtgcggagaggcaggacccccagcctacggggcattttccagccagcaggagacgctcagaaaaccacctgtcggaggccaggcggggtggcttacacccataattccagcactttgggaggccgaggcgggtggatcacctgaggtcaggagtttgagacccgcctgaccaacatggagaaaccctgtctctactaaaaatacaaaaattagccaggcatggtggcgcatgcctgtagtcccagttactcgggaggctgaggcaggagaatcactcgaacctggaaggtggaggttgcggtgagccaagatcgcgccattgcattctaacctgggcaacaagagtgaaactccatctcaaacaaaacaaaacaaaacaaaaacaaaaacaaaaacagctgtccctgggccaccccagcttgtctcagcctctggcagttctaagtggaggcacctgcctggagcccccacaccggggtgccgtccgcagccacgagggccggaacaaccctgagccctggccaggtccccgcagggccactctcaggctgccgcttcctcagcggagcttgtcctgggccctgcagtggggacgaggaccagcatttcagcaggtggcccctgcccaagctgtaagcactcaacagtggatatcggggtgcctgtggggacagcaggatgccagcagactggccctgtctgtgcccaaatgggggccatgtttagtttcagaaccaaataatgaagctggaaaactgcgtccaggccaacaagaccatccagaacctcaggttcaaca

SEQ ID NO: 14987 - DNA, 2300 bp, Homo sapien
ctagaatgttccgtcatcccagaatggaaaccctgtgcccaccgaccctcgtgccccgctttctgcagcctccatgcctgggttctgtggcccagcctgatgttcccggggctctctgtgtcgtgtgtgccggggtttcactcctcatgctggacggtgctccctagttggcctgggctgctgcgtggtgactgtgccctctgcatcctccatgcctgccactcccctgttgctcgggtgctgagcgcctggttcaggccaaggatgcagcctccgcagcagggtgtactgtgctaggttgttctgtgtgtatgtacgcggccacgaggtttgttcctggctgtggggctgctgggcctgggcagggcctcctccgtctgtgtatcttggtgggtttgggcctgccaccacactgacacctcctccgtgtcacctcccacagatctgggcggaccccggcaaatacgccctgatgggagctgctgcccagctgggtatgtcccagctcttgcccgatgggtggggagctccacggggtctggagggggccatggctgtccttgcggggctagggtctgggagcaggtggatgggatgggtgctgcagagaaggcagtggccacgtgaccctgagccaggagggtggacgtgctggggttcatgatggctcccgcaggcgggattgtgcggatgacactgagcctgaccgtcatcatgatggaggccaccagcaacgtgacctacggcttccccatcatgctggtgctcatgaccgccaagatcgtgggcgacgtcttcattgaggtgcgccagggcctcgaagcctcaccctgagagcgtgggtgctgccataggggaggggcccctgtgagcctccaaacagccggtcccggggggtaggctcagggtttctgggggcggcctctgggctcccaggggtaggctcggggctccaggggtgggtgtggactcctcaagccctgtgttcccgccccgcccgcagggcctgtacgacatgcacattcagctgcagagtgtgcccttcctgcactgggaggccccggtcacctcacactcactcactgccaggtacagcgcccaggacacctgtgggtggggagggtgtccagcggcctcttgttgcacaggggcagggtgcacggcttgcgggctccaggcagccccgcgtttcctgtccagcggcttcacacctcaccagcccgcagaggtaactgtgggagttggtggcgtgtgacgggcatgtgtggccgggctcctccggcagggaggtgatgagcacaccagtgacctgcctgaggcggcgtgagaaggtcggcgtcattgtggacgtgctgagcgacacggcgtccaatcacaacggcttccccgtggtggagcatgccgatgacacccaggtaccgggcaccccatagacagggtcctgcctatgtgacctctgtcgagtccattggtgggaagcacacggcaaggtttgcaggatggggaagctgcacgtttgggtgcactggcagttccaggagtgccggaagctgagtgtgcagccatggagggctgtgtggacgctgaggctggtggggggggctgcggcctggcagggtcttggggttggcacccaggctgggctgagagccgtggcactgggggccgtgactttgtcaggaggccctgacaggacacacagctcggccactgctgtgtgtcttttagacgtggacactgggtgtttggaggttggtttttattgggacccagtggggctgcatctgccctgcagcaaagccaccatccctgggcccttggctctctgctgtgcgcggtcaggccccgctaccctgtcgccgatccttgggtcccgtggcattgtgcgtgtgggatgccatggcgaggctggtgtgagcaggtagccaccgacacggggcccatgcccagatgggaaatctggccggaacagggtcagagcggggcccgacacagcattccagcgcagcctcccaccctcgggcccgtggccctgaccgcgggcctgtcttgcagcctgcccggctccagggcctgatcctgcgctcccagctcatcgttctcctaaagcacaaggtgcgtgccaggctccgggccattgggcgggtgggggccccgggggtgctgcctgggtgcctgacacagggctctgccgcccgcaggtgtttgtggagcggtccaacctgggcctggtacagcggcgcctgaggctgaaggacttccgagacgcctacccgcgcttcccacccatccagtccatc

SEQ ID NO: 14988 - DNA, 2300 bp, Homo sapien
ccttgtgtgtcctccttgccctctgtgaccgtggccctgacccaatggcaggatcgtgtggtttcgcgcctgatgctggccaggcacagggtacacggcctctcacggcgacaccaggtttgtgcctgcagcccaccagctcatctcccctcccaacgtgtgctctctcccgaccccacagctcttttgtgcagatggcgagtacaactccatggctgcggccttcttcaacaccccggagaagagcgtggtgagcctcttccacgacccgccaggtgtgtgtgggcagtgccgctgggcaggccctgggatcagggcctgggtgatgccttctggctgagtgtcccctgtgggctgaggttgcagccctgggctggggggtcatccctagcatggatcatagcagggactcactcctgtaatcccagcacttggagagaccaaggcaggaggatcacttgagcctaggaggttaagaccagcctgggcaacttagcgagactctgtctttgcaaaaaagcaacattatctggctacggtagtacacccacagtcccaggtacttgggaggctgggccgggaggattgcttgagcccagaaggttgaggccacaatgagctgtgattacatcactgcataccagcctgggtgacacagcgagaccctctctcaaaaaacaaaagaaaacccagcctggtgactcccacaccaagaccacggcctggcctcgctcgaccacaagtgtttcacggaagcgcagaccgcgaccttggagtgccggcctttcacctctgcagttgtgtccctggcggtctcacccgccctgcacgcagtacagtgctgcctgctccaggaaaggaaccccaggctgtggggggcaccctcttcccggagccaggctgcgagctgcaccacggtgcacacccatggagtgtagacctggcgctgctagacccagctgggccgccccgctggacgcggctcctgcttctgctggcatcagggccccgcagagcctcttcccctgtggcctccccatgggatccttttagcctttctgcttcccagggaggctgagaacagggagccttctggggaccgctgggctcgggagctcaggttgctgggctcctggaaggtgactgtgaggcccgagactgggcagcggggcagggcagtcctgcggaggcgggagtcgtggaggccccgtcagcccctcttctctcctaggctcctacaaccccctgaccctcggcctgttcacgctggtctacttcttcctggcctgctggacctacgggctcacggtgtctgccggggtcttcatcccgtccctgctcatcggggctgcctggggccggctctttgggatctccctgtcctacctcacgggggcggcggtgagtggggccggaggggaggctgtggggccctgcagctgagccaggtcttgcggcatcgcgggccggagcagaagtcccagggcaggacaaaagtgtcgcacctcacgtggttcacgggccgtgggcgttgtcctcgcgtggttcacgggccgtgggcgttgtcctgctgtggtggcagcgtgtactgtggcagcgcagcccatgtgtggagtctggaccaggcgaaggtagggggcggaggctcgtgtccttattcttgagaatgtgatgaaaagcagaggtgattgtgggctgctgcagagctgtttctagactccatggggtggatgtccggccagggctgctctctgtgaggccgggggccagagcggcatacactgccctccagacctcagcccccgcaggccttccttctctgcctgcctctgctgggactgggttctcttatgtgtcttctgtttctcatttcagtcgcttaaataagactgaaaacctgtaagaggccctggcaggaagcccccggccatgcttctcatccccggcaggaagcgcccactcctgctccccaggcccgtgtgctctgcccatctccctccgcacaagggtttggtttggtttttaaaattgaaacatgattcaaataccgtaaaactcatcgttttaaagagggcagttcagcggcgtttctcacgttcacgaggcagtgcggccgtcactaccacttctagaatgttccgtcatcccagaatggaaaccctgtgcccaccgaccctcgtgccccgctttctgcagcctccatgcctgggttctgtggcccagcctgatgttcccggggctctctgtgtcgtgtgtgccggggtttcactcctcatgctggacggtgctccctagttggc

SEQ ID NO: 14989 - DNA, 2300 bp, Homo sapien
ggaccccctagccccctgccgtccccttccctctgcaaaccctccagcttctcctgccatctgggagccggcgggcggaggcccgcacttttcctccggtgtcgctgactggcctttcccctgttcgcaggcggtgtgcttggagcagtgttcaatgccttgaactactggctgaccatgtttcgaatcaggtgaggagaaaccgcattgcatatcgcgttggcaggcgtggccacacaggccctttgaaagcggacgtggtggaatggggtttacactcctaggccacagccgaaagaaaggctgtgtatgcagcgtccttcctgatggtttccccggtggagctggtcagagatgtgtcccggggcctggagggtgacggactagcccaaggctaggagtgcgagggctcctggaggacggcccctgggtaggaagtgaggccctgcgtgggatcgggcctgggcgaggcatgcccaaccttcaccgcctggctctgcctggtagcaaccgcagctgtcctgggacaccggggccccccggcttcttccttcttggtctgtgctgatttcaatactgtcgggtacagccggggcacgggtagcgccacttcccacacatctggagaagttgctgccgaggagtctttaccccagggaagaggacgaccccaggacatttgggtgcctgattgatgattaaacacaggcctggccgggcgcggtgcctcacgactataatcccagcactttgggaggccgaggcgggtggatcacctgaggtcgggagttctagaccagcttgaccaacatggagaaaccccgtctctactaaaaaattcaaaaaaaaattagccagatgtagagccgggcgcctgtaatcccagctactcgggaggctgaggcaagacaattgcttgaacctgggaggtggaggttgcagtgagccaagatcgcagcactgcactccagcctgggcaacaagagcaaaactccgtctcaaaaacaaaaacaaacaaacaaaaagcaccacgggcccagtgtcctccatcagggactcgagttgccatggggcctgcggaggggccgcgctgccgtcctgcctgccatgcagcctgattcttggttccaggtacatccaccggccctgcctgcaggtgattgaggccgtgctggtggccgccgtcacggccacagttgccttcgtgctgatctactcgtcgcgggattgccagcccctgcaggggggctccatgtcctacccgctgcaggtgggaggctgggcccgggcggggtccagcaggcagggcagccacagggcggcctccaggaggctcgcttaggctacgggaggagggctgcccaccccgccgagttccagaagcgcatgggctggcgtgtctcaaagagggttagtcctgtccacccagatctcagaggaggccaggtgtctgctgaggtgccaggggaatgggcggtggtatgggggccagaggctccccccagtcctcttcccagaatggcagcctgacggggcgagcctcaggcgccctatgggggcaccatagatgtggacccaggagaaatgcaaacctccgtccacaactggacctgtgcctggcgctcacggctcaccgccgtccgtgcgtccatctgcactgtgacacggttgccctggaaagcactacgctcagaggaaccacacgtgaggtcacgcgacgtagccccattaacatgaaacatccagaacagggagagcctagaggcccagcagaccagtgggtgccacggcgggagtgggcaggatgggacgggtcaggtgtgaaccgttagagacgtgggaggcccggggccatggggttgaccagccttgctacactctgctccagccccgtggataacaccccctgtgctgctggagcccaggaggctctgggcctgtggcaccggggcgccaacagcctcttctaggagctcatgtgagcgcctgggcccaccttccccggcaccagggatggacagcgtctcagcccatggtcctgctaacccaccccccagggctagacacggccccctgctgggcctaggccgtgtgtgtcctcctttccctccgtgaccatggcttgggccttgtgtgtcctccttgccctctgtgaccgtggccctgacccaatggcaggatcgtgtggtttcgcgcctgatgctggccaggcacagggtacacggcctctcacggcgacaccaggtttgtgcctgcagcccaccagctcatctcccctcccaacgtgtgctctctcccga

SEQ ID NO: 14990 - DNA, 2300 bp, Homo sapien
cgtcactgaaacgagatttcaaggtgagttgaaatcttgtgtgggtgggctccagatgccatgggcacgggcacgggcaccactcagggagatgggcttccctcagcacccccaggccgagagccccagccccatctgaggacagcctggcgggtggctcccagagccagcgggcacagtccctgcccggcaaggcctccctacggcccgctgcttccctccttgggtcccctgccacacgtgcatcagtgtttcccgtgggagggtctgtggctccaagcggcttctcagaggagtgcagaacctgagaccaagtgtgcccacctgttgtttatttgtcaagacacactttggaacactttttccccaaaaaagtccccagcatgttgatggggattgagctgcatttgtgtgtgattgtattttttttttttttttgagatggagtctctctgttgcccaggctggagtgcagtggtacaatctcagctcactgcagcctccacctcccaggttcaagcaattctcctgcctcagcatcccgagtagctgggattataggtgcccgccaccacgcctggctaagttttttgtatttttagtagagatggggttttgccatgttggccgggctggtctcaaactcccgacctcaggtgatccgcctgcctcggcctcccaaagtgctgggatgacaggcgtgaggcaccgcgccggccatgtgtgaatttagaggcaggcagcgtcccgcaggacaaagaacagcaaggctgggtttccatccgtgcgcttttcgttagagggtagaggtttttggaatcttgcgtgcgctggaaagtggagctcctggctgggtgtttgcgtgtttccctgggctgccggtggtggtgctgaccctgctgtctcttgccgtggtctgcagcacggtgctcttcaggaatcagagctgctgactcggttgtcctgaaagccccttcccctgcacagcccctgtcctggcagttgctctccctttctgagagccgtgccctcaaggaacctgccccgaccctggtctgtccctgttgcagatcttcgagtacttccgcagagacacagagaagcgggacttcgtctccgcaggggctgcggccggagtgtcagcggcgtttggagcccccgtgggtgaggagggccgcaccgggtccaatgctttgccctcgccctgtgtgttggaaggaacggtctcctctctgtaggcccagtgcccgctgagggtggcagaggcttggagtcacggccggggcatttggaagcggccggcagtgtacttgggtccagccctcagacctccctcagggtccctctctgtgtggctggggcccaccccattagcttctttctgacgtggtctgggttccctggagcctgggggagggagttggtggtgggcatggtgccctgtgtccagctggcacccgagccggccgcctgccttccaggtggggtcctgttcagcttggaggagggtgcgtccttctggaaccagttcctgacctggaggatcgtaagttcctgctgatggctgcctcctgatcagggtgcatgctgcgctctcatttcccaccatggggtccaccttggggccacccatcgagctgcggctggagctggaccccctgtgggtctgtcaggccttggtcctgcccaaagcagcggtcctgcctttgctgcccagttcgcccttggtcctgggcaccattgccagccctgggtggctcccgggtaggggatcaaacagccgggaacccagccctgccccaccttcccctcttgctctccactggcaagtccagagagggctgggccgctccttgcccgcacagtgcgcccacccctggctccagccccttcccttctgccttgggcggggtctgcagactcctggccccggggctgacaggaggggcgatggtccctgctggtccgtgagccctgggctgggagcgtggctctgagggcgctggtttcctgccctctgccgcagttctttgcttccatgatctccacgttcaccctgaattttgttctgagcatttaccacgggaacatgtgggacctgtccagcccaggcctcatcaacttcggaaggtttgactcggaggtaacctgccccatcgcccacctcgcccacctcgtatcctggtccaggaccctgtttgcttaaggcccaggttgagaatttggtcctttagaaaactctggttgatagctgtggagctgagagctcttgtgtaagctccagggccccgaggggctgc

SEQ ID NO: 14991 - DNA, 2300 bp, Homo sapien
cgtggagaaatcccatctttactaaaaatacaaaaattaggcctggcgccatgactcatgcctgtaatcccagcactttgggaggccaaggcaggcggatcacaaggtcaggagattgagaccatcctggctaacacggtgaaaccccgggtctactaaaaatacaaaaaattagccgggcgtggtggcgggcgcctgtagtcccagctacttgggaggctgaggcaggagaatggcgtgaacccgggaggcggagcttgcagtgagccaagatcacgccattgcactccagcctgggcaacagagcgacactctgtctcaaaaaaaaccaaaaggaaacaaaaaaaagaaaaattagccaggtgtggtggcgggtgcctgtaatctcagctactcgggaggctgaggcagaagaatcatttgaacccaggaggcggaggttgcagtgatccaagatagcgccattgcactacagcttgggtgacaagagtgaaactccgtctcaaaaaaaaaaaaaaaaaagaaggaaaaagaaaaaagaaatgccaaccatggccgggcatggtggctcatacgaagagtcctagcaactcaggaggctgaggaaggaggatcccttgaacccaagaggtcaaggctgcagtgagctatgatcttgtcattgtacttcagcctgggtgacaaagtgagactgtgtctcaaaaataaaaaaataataataataatttaaaaaaaggccgggcaccgtgactcacgcctgtaatctcagcactttgggaggccgaggcgggtggatcacgaggtcaggagatcgagaccatcctggctaacacagtgaaaccccatctgtactaaaaatacaaaaaattagccggccatggtgacgggcgcctgtagtcccggctactcgggaggctgaggcatgaacccgggaggcagtgagccgagattgggccactgcactccaacctgggcgacagagtgagactccgtctcaataataaaaatatcgaccttttaaaaggaagaggatgaggcacaaaatataaagagtttactctagaggctaacgtggaaggatcacttgaggtcagaagtttgagaacagcctgggcaacacactgtgagctccacagcaaaaattagccgggtgtggtggtgcaggcctgtggtccctgttactccagaggctgaggcgggaggatggcttgagtccaggaggtcaaggctgcactgagctgtgaccgcaccaccgcactccagcctgggcgacagaaggagaccctgtctcaaaataaataaataaatgacccagaaggtggggacagggtgggggctgatgtaaagctgtcaagaattctctttggtttatggaaataccattgattagtgatgggctgtgccctggtgcgggtacagggtccgggcggctatttggctaattcacagctatctgcgtagtagccggcagtttccagaggcgaccctcctgtactgtctctggggcctgatcgttgaagaggactcgccttctgttcttttctcattaggcgggaggaccctctggggctgcctggaggaagcctccactccgaccctcgcccgagtgcctactgcgagggcggatgcatgcttcgggacttctaatttcatccttcacgtctttagccgccgcctatggcaaggaaaggcctgccctcgcccctgcctccctcctcccttccccaccgcggctccgtcacgatcggcgcgggcgaccgggcctgggggagcccctccagccggctcctgccctcaggccccgggcgcttccctcgccccgactcccgggcccgaggtcccgggggcggccattcgcctcccaagcactcggcgctcagcccaacggggccgcctttgcagtcgcgtgggcagaacggggtcctcagggccgcggcgattctctagggcgggcggcgccacgacccgccgggagcgcggctcccaggagcccccgcgcgaccgggcctcggtggttgccgttgcaggtcacatggtcgccgtcgctcatcacgtggccccgtcgcgcgtcacgtggccgccggcgcgggtcacgagaacaaacacgggggcagccggcgcttcccggccggtgtcgctccgcggcgggccatggccaacgtctctaagaaggtgtcctggtccggccgggaccgggacgacgaggaggcggcgccgctgctgcggaggacggcgcggcccggcggggggacgccgctgctgaacggggctgggcctggggctgcgcgccaggtgaggcc

SEQ ID NO: 14992 - DNA, 2300 bp, Homo sapien
tatgtatctcctaagatcggggagctttcctgacgtaaccacaatataatgatcacgcgtgggagatttactactgctccaacaccgttagctcatacagtgtatgtccaatctttgccaattgtctcaaccatgccagacccacgtgaggttgtctcctcagcctctctttgtctctttcacaatactgacattgtggaagaagatggcctagatgttcagcaggctgtccctcaaagtgggattatctggtgtttcccctttatgagtggactcaaggtgagcatgttttgcaggaatgctccggaagggacgttgtgtccttcctggtgcatcacatcaggaggcacacgatgccaccttatcccatcaccagcaatgctgaactgggttgcttggttcaggtggcgcctgctaggtttcttttttcccttcaccgttaagaaatgctgaccctgggccgggcacggtgcctcattcctgtaatccccgcactttgggaggccaaggtgggtggatcacctgaggtcaggagttcaagacatgcctggccaacgtggagaaatcccatctttactaaaaatacaaaaattaggcctggcgccatgactcatgcctgtaatcccagcactttgggaggccaaggcaggcggatcacaaggtcaggagattgagaccatcctggctaacacggtgaaaccccgggtctactaaaaatacaaaaaattagccgggcgtggtggcgggcgcctgtagtcccagctacttgggaggctgaggcaggagaatggcgtgaacccgggaggcggagcttgcagtgagccaagatcacgccattgcactccagcctgggcaacagagcgacactctgtctcaaaaaaaaccaaaaggaaacaaaaaaaagaaaaattagccaggtgtggtggcgggtgcctgtaatctcagctactcgggaggctgaggcagaagaatcatttgaacccaggaggcggaggttgcagtgatccaagatagcgccattgcactacagcttgggtgacaagagtgaaactccgtctcaaaaaaaaaaaaaaaaaagaaggaaaaagaaaaaagaaatgccaaccatggccgggcatggtggctcatacgaagagtcctagcaactcaggaggctgaggaaggaggatcccttgaacccaagaggtcaaggctgcagtgagctatgatcttgtcattgtacttcagcctgggtgacaaagtgagactgtgtctcaaaaataaaaaaataataataataatttaaaaaaaggccgggcaccgtgactcacgcctgtaatctcagcactttgggaggccgaggcgggtggatcacgaggtcaggagatcgagaccatcctggctaacacagtgaaaccccatctgtactaaaaatacaaaaaattagccggccatggtgacgggcgcctgtagtcccggctactcgggaggctgaggcatgaacccgggaggcagtgagccgagattgggccactgcactccaacctgggcgacagagtgagactccgtctcaataataaaaatatcgaccttttaaaaggaagaggatgaggcacaaaatataaagagtttactctagaggctaacgtggaaggatcacttgaggtcagaagtttgagaacagcctgggcaacacactgtgagctccacagcaaaaattagccgggtgtggtggtgcaggcctgtggtccctgttactccagaggctgaggcgggaggatggcttgagtccaggaggtcaaggctgcactgagctgtgaccgcaccaccgcactccagcctgggcgacagaaggagaccctgtctcaaaataaataaataaatgacccagaaggtggggacagggtgggggctgatgtaaagctgtcaagaattctctttggtttatggaaataccattgattagtgatgggctgtgccctggtgcgggtacagggtccgggcggctatttggctaattcacagctatctgcgtagtagccggcagtttccagaggcgaccctcctgtactgtctctggggcctgatcgttgaagaggactcgccttctgttcttttctcattaggcgggaggaccctctggggctgcctggaggaagcctccactccgaccctcgcccgagtgcctactgcgagggcggatgcatgcttcgggacttctaatttcatccttcacgtctttagccgccgcctatggcaaggaaaggcctgccctcgcccctgcctccctcctcccttccccaccgcggctccgtcacgat

SEQ ID NO: 14993 - DNA, 2300 bp, Homo sapien
tctgacgcttgacaaggggagcctgggggccaccgatggtttcctggcctggcaccctcttggctcatgccaccttgggaatgatggatgcccccagtgggacaactttgtggatgatcttattcccatgagctgggcggcttgaaacaacagaaatgagtcctatcacagttctgggggctggaagtcttgaagtgaaggtgcacactccctcgaaggctctgggctgggggttcccactttacctcttccagcttctggggcctctgggggttcctcgtggcagcgtcaccccagtctctgccccatcttcacaggccgtgtcctctgtgcctcctcctctgtctcttgtacccctgtcattggctttagggccacctggataatccaggatggtctcatctcaaaatccttcatgacatccgcagagaccttttccacataaggccctgcctggggcttatgtgtgtttttaggagggtctcattcaagccagtacacaacctgtaaccaaaaataccagcctggcccacatggggcaaccccgtctctactacaaatacaaaaattggccgggcgcggtggctcatgcctgtaatcccagcatttcgggaggctacagcgggtggatcacctgaggtcgggagtttgagaccagcctggcccacatggtgaaaccccgtctctactaaaaatacaaaaattagccggatgtgggggcacatacctgtaatcccagctacttgggaggctgagacaggagaatccgttaaacccaggaggcggagcttgtggtgagcggagatcgcaccactgcactccagcctgggtgacagagcaagactccgtcaaaaaaattaattaattggccaggcgcagtggctcatgcctgtaatccgaacacttagggaggctgaggcaggcaaatcatgaggtcagaagtttgagaccagcctgaccaacatagtgaaaccccatctctactaaaaatactaaaattagccgggcatggtaaagcacgcctgtaatcccagctcctcaggaggcaggaggctgaggaaggagaatcgcttgagccggggaggcagaggttgcagtgagctgagattgcgccattgcactctagcctaggcaacagaacgagactccatctcaaataataataataattaattaattaaggtggctcccagtcacatttccattgctttactgagagagacggggcctcccaggatgcagccgtgcacggcctgggtgatgggtgcctgtgcagacctggctctgttgactccccagcccccgtcgggttccctgtcttgcttcgacttctcgggagcacaagtccatgtgctcctgttaaagccatcgcctcctgcccgcgggcttgcacccagctgaatgattcttcaaagaaactgtttgcatctgttttaagcttgtctccttaggaacctgcaagtctcagagcccactggcttgaaggcagatgcctttcatggaggcggcaggaagaacctgacatccagccagggccaaagaaggaaaaccactcaacaggagagctggggggacgagacacaagacagacccacggagccaccttcaccctctcctgcggctggagggagactgctggggccttgccgtctctccggatgggttgctcgtggaggaagaccttgtctttcttccttgtttttgtgcctatatatctacatggggcttcatcgcaggaagccgccccagtggggcccaggaaaccgtttttcgagaggctccgtaggctggaggaacaggcaagttatacccctgacatggcgcagtcgggtttttaaattggcagcagatggaagacggatgttacagaagcagattggtaaacatcagggcttggcggacacgaacaccgcgtgtgacgctctttccatccatgaagattatttcacctgcagttggacaccagggaagagctgagctgggctccactcacacaggacacaagcctcataacatgtgggggtcaggtggggccagaggctagaagggggtctggaagggagtcaggggaactgggggccatgggggccgggtagtgtcatggggagtggaaactgggaggtcacaggtccaccttgtggcagtcggtgtgaacggcctcccggactcccacgcggggtccacggacagttccggagtgctgtgggcctgtcgggcctgcgctgggtgcttcctgtttgggcctcgtaaagcactcatgaggccaccctgccgtcccctgctcacaggcaggagctgga

SEQ ID NO: 14994 - DNA, 2300 bp, Homo sapien
ggaatagggaaggacggagctgccgtgggcactggcgagggctggaacccagcagcggacggaggaggagtttccgggatgatgggatgctgcctgccccatatcccatccatcagctctgcctgcagagacatgccctgagttcagctgcttctctacacccccattccgccccaagctcatcctcacaatggccacctagtcccctcgtccgtgtcgcccccctaccgtctgctctcctaactgcaccagcatggacccgtgccttcaatggctccaggagatgcctgccacacaagcaaaatcttagtccctgcgagggccttctgtggcctggcccactgcctcactccctccaggcctcacccctgcatatgcctccctcggctccacctcccgggcaacagttgcggcctcaggcctttgcacctgccgttttcctgccagtgagactcttccctggctgtcaacacattcagggctctgctctaaggtgttctgttcagagctctcaccttacgtaagacagcacccactgctctctggctcttttctttttttttttttttggaggagtctcgctctgtcacccaggctggagttcaatggcacaatctccactcattgcaacctctgcctcctgggttcaagcaattctcctgcctcagcctcccaagtagctgggatcacagacacatgccaccacgcccaactaatttttgtattactattattattattattattctttttttaggagagacggggtttcaccatgttggccaggctggtctcgaactcctgagcttgtgacccacccgtctcggcctccctaagtgctgggattagaggtgtgaaccactgtgcccggccactggctcttattttcttaccctaccggttttttattttgattccttttttttttttgaaacagggtcttgctctgttgtccaggctggagtgcagtggcagtgaacatggctcactgcagcctcaacctcccgggctcaagccatcctcccacctcagcctcctgagtagctgggatcacaggctcatgacaccgtgcctggctaatttttaaattttttgtagagacagggtctcactatttttcccattcttgaacttctgggtgcaaacgattctcccacctcagcttcccagtgctggaattaccggcgtgagccaccgggcccggcctctgccagtttttctgctcgaggcctgtcacctggcatatttcgtatgtactttatctgttcccccgataggtgagcaggaactttgcatcatttgttgctcagaaggcttggtgcaccaagcaggcatttaatcaatgtttgttgaatggataactgttccccagcttttcccacatccatcactgctgaaatggcgcctctttaggtgtcttcctggattgccccctccacaaagatgaagccccccacactccgctgcggtgtacagaaggcactgcatgttgtaaatgttcagtgtccggctgtccagcctggcggccacagccaaaggtagtaccgagcccttgagatggggctagtgctgcaagggaactggacttatttaacttcagttaatttacagagccacatgcgtctagcgcttaccctactggtcgcagtttttattccacgacccggcctcatttacggagctgcaattgttcagatctgacatgatctcaactgctcttttacttccttgtgtaccgtgcgtttcccttactggcctctgacccttgaaagcagagccttacatccggggaagacgagccaggcctgtcttggtaaacatctgccttagagcgaacgctcggcgttctggagagaatgtgggacccgaggcggagggaagagacggctgacatcactccagggtagggacgaccgagatgggagaaactaaggcgagaacccaccacccgggcgcagcgaacccagctcgcagccacgtggggaagcgcggccctgccctcaggccccgccccactcacgcgtcaggccccgcccaccccaccgccccccgctcccgcgtccaggctccgccccgtccccgcgcagcgcaggcgcagatgcgccctcccgcctggcgtcctccgcagattcgcgctgagaggcccgcggagacccgccccagaggctcaagaaaacccgcgggagcctcgcccggacccaggaactcgtgctcggggccaaccggctgggccgcgatcgcgtttcgtccggggccgcggcggccgtggggaatcggctgcagcgaatcggtggcgcgcg

SEQ ID NO: 14995 - DNA, 2300 bp, Homo sapien
cctcaagcaatccacccacctcggcttcccaaagtgttgggattataggcgtgagcccctgcacccggctgactttgcattcttgattctgggtgagggtgtgtgtgtgtttaaggcatttgtattcttttctctgtgaactatataatcatgtaatcacattctattttatagtttgttttggtgttgttgttgggggggattgtttttagagacaggatcttgctctgtctcccaggctgcagtgcagtggtgtgattatagctcactgcagcctcgacctcctgggctccagcgatcttcccacctcagcctcctgagtagcgggaacacaggtgcgcgctatcatacccagctaatttttaaattttttgtagcgacggggctcactttgttgcccggctggtctcaaactcctggccttaagtgatcctcctgccttggcctcccaaatgtttttttaaccgttatttctttgtgtggaattttaagtgataagtgagggagaaatccagccatatctgtttccacactggctggatagacttgtggggctctttctggagacccataacctctcaccgggaggactctttcagtctggaccaggggcctacaggctacttggacaaaatttggcccgctgcatgtttttgtaaataaaatttttttggcactgtcaaaggaggccttcgagggtggacccgcctccgcccgggctgaggtgcagggaaggaggctgtcgggggtggacccgcctccgcccgggctgcggtgcacgcgctctctgggttgtggcatttatgccccagagaagggaggatgaaggcccagctcaggcagtcggaggatggaaccagaggctcgtggctaggaattggcaggccgggagtcaggccgccgtctgtgggcatcggagttcacgctctcgctcctccctgtctccaggccggcttgcagctctggcccctgactctgtcttgcaggcctgaggtcctttcgagactgctggggaacctggtggtgaagaacaagaaggcccagtttgtgatgacccagaagcttctgttcttacagtcccggctcacggtgaggacgccacggagggtgcaggctgctggctgccccatcacagcaagaatggctgcaaaacatggggtcggagcggtgtctgctgcctgggagaccctgcctgtgatttggcagtggctggcaggagttggcgaggcggtgggtgcctccctgccctgatgacaggccctgctgtgacggctctgagtgagggcttctcatgtgtcaatcttctagactcccgagaagccacccgccctagctgcgttctgtgccaggggcctgagggggtggggtggggtgggtgggggataggtgaggacacagaggaggtcgtgcatttccgggacttatgactcccgtccccatggcctggagcccggagggggtgagccaggtcccctgagcccagagtgggtgagccgggtcccctgactcccggccacatcttgcttcaccctcctcctttgctcacacgagaacttaagatggcgaggccctgccccagcacggcagcagctgcatcctacgtttttatatggaaccgttttatcacgttcagttcaaaggaatagaggcgggtgggtcgcttgagcccagggggcagcttctgcgggaggggaggggtcccgcattccaggaggcagtggccgcccccatgcttgtccgtctgctgccctcagtctggtcccagtcctggcatggctcttggccttgggagccccgggctggccaggcggcggcctcagcccagtggacaggcatgtgcttttattgcagacgcccatgctgcagagcctgctgggccatctggccatggacagccagcggcgcccgctcctgctgcaggtacgtgcctcctggctctccgtccctgcgaggccctgggagaagagccgtgcggggctcaccttttgggcggcagggtgaggctggctgggctggggcggagctccctcagagtggctgtgggcctggcggggacagactggccccgagccccacacagtcgtgggccatgccacctgcaggtgctgaaggagctgttggagacgtggggcagcagcagtgccatccgccacactcccctgccgcagcagcgccacgtcagcaaggctgtcctcatctgcctggcgcaactcggggagccggaactgcgggacagccgggatggtgagcgggtggtttgggctccccccggcctcgggcgccccgaggtgctcaggggg

SEQ ID NO: 14996 - DNA, 2300 bp, Homo sapien
gagggaaaccccatccctgtcagcagtcgccccgaccctcccagcctgggagcctccggtctggcgctggcctgttgagaaggtgtcctagagatggaggcgcacatgggtccttggtgccttctctgcaatgttctgaggtccccccgcccgtggcacgtgccgctgcagcgttgcttttgctgtgaggccgacttcctgggataagggcatgtggctctggcgtggcgggactgcgtggctttaggatgaggctgcgctcggccctgggcgtgttctcatctcctggagcacggtgcccaccttccccaccttcccgcctaccaaggcgcggttgctgtgagctacggggaagtgacttttctccttgttcccagaacacaccttctcccaggctgggcgggcccccgggcccgtttctggggctttggctgacttgactcttgggaaatgttcttccctggagcagtggcgacggccctgggcctgtctccctccaggtgctgactctggctgcccaggagctgtctaggcctgggtgcctcgggaggactccccaacctggctccccaagtcccaacaccccgtgcctgccagaggcagccgtctctcagcctggcagtgccgtggcgtctgactggcgggtggtggtggaggagcggatcagaagcaagacccagcggctctccaaggttagtggcgcctggtcagctcctcacgggcatggggaccgtgggtgggtgggaagggcggtcagacacctccaggcgctgtctgcagcgaggggcggccacattcgctggggatggtgcctttgccgggattcctgaaaggcagggtccatggtttgcaccgaggaactggattttggctgtaggagacccagactgggcttggggacatgataagtgacaggtgtcctggtggtgctctgtcctcagagcccatctaggccaggggtggtgttgctccacctgaggatgtttaggggcgtctggagatgtttttggttgtcactaggggtgggttggaggccacggaggcatcctgcagtgcccagggcggcctccccaggacgctcctccagccttgaatgtcctgcctgcaagttcgggaacgcctggtctgctgtccaggcattggccgcggagcctgagtcccgtcaccaaccccatggggcctgggagctgggcggggccggaagagtagcccggggaggcaaggcgaggctgaggtccacgctgctttgtgggatcctctcgggctaggggtgccgtgcccgctgcccaagcctgcacctccgtgatcgctgtagttgtgtctggcagggtggcccgaggcagggcccggcaggcagccccagcagattcaactccgtggccggccacttcttcttccccctccttcagcgctttgacaggtgagtgggttttccgtgggcctgtggacttgggggacagggaccctggacgtaccactgtggccaagaagttcgggctgggatctgagtgggtttgggtgtgaacagggtcgtgctttgctgtggctttttgtaagcctgtgttaaatggcagggagcgtcccgcaagattcctctgtggttgagctttgccatgaggcaccaggcatctgctccgatgctgggcttgtggcatggccggcagtgccgcccgcacgtgcccgacgccatcacctgctgggccctgctcgcctcctcctgcctcagccggcgctgcactggccccacgttcagggcgtgaggctctcgagatggcagagaagtgtggggcctgggttgtgctgcagcaggggtgggggtctcggcgttgggaactcctggcccaggtggacttgtgccagacagccctgcagggggagtaggcacccggaaatgtctgctcctacgatctcggtgcaggcaaggcggtgggcacgggaggaggggctgtgtggggctccctcggtctcccacggtggcccaggaggttggggacctggccctgaggcacccgctgcaccttgggctccatcctgtgctctaggcctctggtgaccttcgacctcttgggagaagaccagctggttctcggaaggctggcgcacaccttaggggccctgatgtgcctggctgttaacaccacggtgagccgggagaggtcgccgggcgccggcctgtgctaaccatggatcaggagcgctcctcagcctcacctgcgcccagggatgggtgtctgagggaggggctgcctgtgtgggcccccgggcagcgggagcatcccctcggctgtcaggcaggccct

SEQ ID NO: 14997 - DNA, 2300 bp, Homo sapien
tagaaatacatatcaaaattcacggagatgccattttttactgggctactaagggtggaaaggctggagtgcagtggcgcaatctcggctcactgcaagctccacttcctgggttcaggcgattctcctgcttcagcctcccaagtagcagggactacaggtgcctgccaccacacccagctaatttttgtattttagtagagatggggttccaccacgttggccaggatggtctcgatctcttgacctcgtgatctgcctgcctcggccccccaaattgctgggattacaggcgtgagccaccatgcttggccgacatattctctttttgttttttgaaatggagtttcactcttgttgcccaggctatagtgcaatggggcgatctcagctcaccgcaacctccacctcccgggttcaagtgattctcctgcctcagattccccagtagctgggattacaggcatgcaccaccacgcccggctaattttgtatttttatttttatttttattttgagacagagtctctctctgtcacccagactgcagtccagtggcacaatcttggcttactgcaacctcagcctcccgggttcaagcaattcccctgcctcagcctcccgagtagctgggactacaggcgcccaccaccacacctgtgttaattttctgtgtttagtagagacgaggtttcaccatgttggccaggatggtctcgatctcctgatctcatgatccaccctcctcagcctcccaaagtgcttgagattacaggcatgagccatggcatccagcctaattttgtatttttagtagagacggggtttctccatgttggtcaggctggtctcgaactcctgacctcaggtgatttacctacctcggcctcccaaagtgctgggattacaggtgtgagccaccatgctcagccatattctttttttttttttttttaaatataaatgtgttattacttcatatatatttgtgggttattactgtttttttttcttgtggagatgggggtctgactgtgttgcccaggctggtctcaaactcctaggcccaagtgatcctctcaccttggcctcccaaagtgctggaattacaggcatgagccaacatgcccggcctaagacatattctcaagtgaagaatgtaaaatttttcttaaaatgagggctgggtgtggtggctcacgcctgtaatcccagcactttgggaggccgaggtgggtggatcacctgaggtcaggagtttgagcccagcctgaccaacagggagaaaccctgtctctactaaaaaaaattacaaaattagccgggcatggtggcgggcgcctgtaatcccagctacttggtaggctgaggcaggagaatggcttgaacccgggaggtggaggttgcagtgagccaagattgtgccactgcactccagcctgggcaataagagcaaaaccccacctcagaaaaaaatatatatatttcttaaaatgttaggaaaatcaggccggcacggtggcttgtgcctgcaatcccagcactttgggaggctaaggcaggcggattgcttgagcccaggagttcaagaccagcctgggcaacattgcaaaaccccgtctctactgaaaatacaaaaactgaggtaggaagatcacctgaccctggggaggtggaggctgccgtgactgcaccactgcactccagcctgggggacagagtgagaccctgtctcaaaaatttaactttaaaaattcagaattatagaagaaaattaccaatttccttttctcccaaacgtaatattctcttgagcatatatcacttgagactattgtttccttcgttccattctggaatgttaacagcgtgagaaagtaacgtgaatgattgtaggttggtgaggcaggggagacatccttgtcccctccatacccaccccagctagacagaagccgccgctgagccgaggggcctggtttcctctgaagcggtggcagatgaggggcgcacttcagttcccggccccctcggcagccccgtcccatttctgcacctttgcagtatcaggaagccctgcagctgtgcctggggcagaacatgagcatcaccgaggagatggcggaaaagatgaccgtggccaaggactcctcggacctgcctgaggagtcgcggcgggagctgctggagcagatagcagactgctgcatgcgccagggcagctaccacctggccaccaagaagtacacgcaggccggcaacaagctgaaggtgagcctctcccggccccagcccgcggc

SEQ ID NO: 14998 - DNA, 2300 bp, Homo sapien
agcacggccacgcgggcctctagctccggctcctgctccgcctcacgcagcgctcgggccccgcgggcatggcccatgttccccaggcacaccttggccacgtccagccgctgggtcttcacgcacatgcgcgccatgttctcccagacggcctcactgtgggcagacgggggtctgtgaggctcctgcccagcacctcagggccccctggccctacggccccttctcctggggcaagtagtcatcaggcacagctgccaaacgggcatgaggaggggccttcacccatcggctccgcccctgggcaagactgcaggccatgcagagaggtgcccgtcacgagtcccacggccttcctaaccccaagaggcaggggccgggtcccattaaaagacagaaggatctcttatgcagatcaccaggctcctcctcctttttccctgctctaagcggctgtctgatcaggaaatgtgggcttcctgtgttgcttgcacacacaggacctgctctgagacaaagcctcctgctctcacctgagcctgagattgcagggcccctggtaaaccagccctgcacagcagggaccctcacccgacagtctggcagccaaagggtggagcctgggggacggggtacagggcccagaccctgacccagccctggaacctggagacaggcctgtctccccaggagacggtgacccagcccacgcagggttctgcagagccctggaggtctgccgagcagagggccctggaggcaggcctgcagacgggctgaccagtgggtcacgggggacagcaccttccaccccagccctgtgccccactctcgggcagtgaattttgtgtgtgtgaaggaacagggtgccaagtgggcagagctgcgtcagggcacaggtgcagggacggtggaagtcaccctgcctcttagggtttttttgttgtgtaagacagggtctccctctgttgcctaggctggagtgcagtggcacaatcacagctcattccagcctcgacctcctgagttcaagtgatcctcccacctcagcctcccaaatagctgggaccacaggtgtgtgctaccacacccagctaagtttttgtattttttgtagagacagggtttcgccatgttacccaggctggtctcgaacttctgagctcaagtgatccacctgccttggcctcccacactgctgggatgacaggcatgggccaccgcgcccagccccccgcctctccatgaggtttcctgcattcttcccctgctggcgctgatccaggcaggaccagaaatgactgaggacttggtttgtgtcagctccagggtaggcaaaggctgctgacagccactctagggacatgacgctgcatgagaaccgtgtgtccgcatgtgtgtgggggcactcagccaggcctcctggtggggctgggcgggaggtgggtccaaggccatccagggagatcccgccccaagggccttggggccgggctggcctgcggcttcagccctgacgtgggctcagggcttcagacaaaggccctgttccaagacacagctcagtgtggtcaccgagcagggacaggcagaggacgcactggtcacttcctgaatctctctcctctgccacacgcgcctcccctacaagccccaccaaagccacacacacacgcacgcatgcacgcacgtgtgcacacacacgcatgcacgcacgtgtgcacacacacgcatgcacgcacgtgtgcacacacacggatgcacacacatggacgcacatgcacacacagatgcacacacacattcacatgcatgcacacacacatggatgcacacacaagcacatgcactcacatacacacacatgcaggcacacacacaggcacacacaagcacatgcacgcacatgcacacacacgcacacacatgcacgcacgtactcccacaagcacaggcagcacaccctgcaagtggcctcggagcatccccacccagggccaccctcgcattccaggctgctccctgcagataagcctcagtccagcccacagtcttagcagggcagcagccctgcagcctccccgctggcacggtcacaggccgctctgaggactggagggaccagccgcccacagagccccgagcccgtggtcccggtgagtgagcggagctgtgctgcgtgcagctgggcgttttcctaacggccctgcccctgtgagaaggaggggctcgggaggacagccagggagcccagtcccacggtggtacctccatctccgggaggtgtgggctgcccacat

SEQ ID NO: 14999 - DNA, 2300 bp, Homo sapien
gggggaagcccaccgcccagctgcgagtccccttactgggagtcaccccccgagagccacagatcctcccaggagggtcgctcttaacttacatgctgctcccaggccttccgccctcccgcgcccagcctgccatagcgcgcagggttagaagcggcgtgacagctgagggcacagggacctggagcaccccagaagtgccaggagagtggaggccgatgctggcctctgcgaaccaggacttctgggggtgctgccgctgtgtaggagtctggccgtggcctcctccccactcaacctgaggaaaggaccagagcgggccgctgagacaatcaaacgtgtcctctgggctctgaaacccagcattggctttttgttggaagttagccatttgaagactcccgaaagattaatggtttagttaattaaggaggaaataaattcttcccccatggaaacttttgggagacttccctttcaaggcccccttctgcaccgtgtgcttaggaacactgagtgtttgagacactgcacccccgtccacctccgaggagcagggcacaggcaggaagggctggggacatccccccagggccttccgagccacccgggagagtgggggccggcagcaccactgtgccccgcacgccccgtcaggttccgggggctgagaacagaaatagaaacagcagcttttccctgggcacaagccaaggaagaggggaaaggagaaacctgacggacacgtctgcgacaaatccccggggaaaatcccccccaggcacgtccctcaggaagccagtggagaaacgcttctcaggacccagcacgcaccacgggctggtgaggacggagctgctgcctttctggaacagacacagggcgtgtgtggggaaccttgcttcacctgtggatatacagagccacatgccaacgtgtgaatggagactggtcccaggaagtggcagctctcgggaccgccctgagccagggcccaagcacgggcagtgcaaggacaggaaacggtcaaagctctgctgttaccacaggctgggaacaggactctctgtcccagcactgtcttgggcgtgtgcccatgaacagtttgcacggatgtgggacacctgcattcacgaagctttggagcctgggtaggctgggaatcccatgctgggtttcgggtctctggagatgggacagagtaggagaccctctcgtggtgtctgcccagctgggcagaataattctgagcagaatagacgaagatgcttctgagctccctggcagcataagctctgcccgagagcctgaccactcacaaggtgacctgcctagtcctgtccccagctgtggggggtgaccgttcccatcaatagcagaggtggcccaggccccacgtgacattcgctctgtcccaggccccgctgagagccccacccagcacatccagaatcttacccttcttgccacctaagaatgacctggcctcgaggtcctccaagtacaggtccctggccccgaggtcctccaagtacaggtccctggccccaaggccctccaagtacaggtccctggccccgaggtcctccaagtacaggtccctggccctgcaggtctgggtgaacttgctccctccaggcacacgggtctctccccttcccagcaatcctgtgatatctgccccccttttgagggcagcattcccgtggcgggggcaggcctggaacacacgggcggggggaggcttgtggttcctatggtcctgggggtacctatggtcctgggggcaactggatggctggggggtgtgaagtccccagggcaggcaatagtcgctcagtaccagcctccaggccccgggggccaccaggcttaaaagcaacaggcgagacgagggatctgtcccgcacccggcatccctggcctctcctctgggacaggaagatggggaggggcggcaggaggtgggcctggagcagggcctcagaagtctcctggcctttcccatcaggaagcacatcctgttggtgtctggctgccgcggcagggccgctatttgttgcggttggctacgccttccagctcaccaaaaacagtctcaaaaacaaccatttcctctctgctgagagccagggaaggcgagctctgcgcacacgggcgtccctgcagcagccactctgctttccaggaccggccaactgccctggaggcatccacacaggggcccaggcagcacagaggagctgtgaacccgctccacaccggccaccctgcccggagcctggcactcacagcaggcc

SEQ ID NO: 15000 - DNA, 2300 bp, Homo sapien
gcacacgtgatgtgtgttaccccagtactccgggactccctcggaagcctggagcagaggcactgcctcagagaccagcattatcttcagagcagaaggagcgtccaaccccgagtctgtgaggctctgcagcagagacttggggtgtctgcgagtcaaaaccttgctgacagtttcagagagtcggcctttgggagaccttgtgtccctgtgccgtgactgttgagatgaccccatgggctgtaagcgccttcctatttatgcagcctcacacctgccactcaaaccccacggtgcggtggcatcattctgagccccttcctctcctctgcaaccactgagcatccctgtccccttccgagcgtcctggcctccctgtctcctttccagcgtcccatctgaagctcatccctggggatcctgctgctgctctctgcctcaaagaccccaacaaccgtgagaacaaagccagaactcacccgtgtatttttaaacttcttgtttattttactcatgagtaaagaaagagcattttcattttttttttatgttcagagacagggtctctcgctatgtaggctaggttcgtcttgaactcttggcctcaagcagtcctcccgcctcagcctcccaaagcgctaggattacagacgtgaaccactgcgcccagccgtaataattattttcaaccaaggaaaaatgcctttccttgatttgattaatgtacccatctcttaactatgtgtaacggcagagaggccccccaaatgcctgagatgaattcctgtgtaaaagagctggaggcagattctgtgctgagcaggaggagtgtgtggggccaccactcaccagggagagggggccttggggcctggttccctgggagacacagtgccccctcctgcctgcccagaggccacgctcagggcagagcaggggccaggcctccccacccgctcaccaggtccgcgcctaacatctcccatgtgccctcgagcctcggccacgctgaaggcatcaggaaaacaattggacttacgtttgacggtgcctcgggactcctggaagccggctgcctcggagccccagcccagcgcctcacagtcatgtgcgtccacctggccggctctggccccagggctcggccctccccgggtcctgtccaccagccagcaggacctccacagccccacgctgcgcctgcgcccatcctccagcgtctggcacacccagttggaggtgaaggccgccacgttgttgaggatgagtgagaccagggccaccagcacggccgcggccacgagtctctgcacggtcatcgctgacgccggtgccgccgcttatccggagaaagccaagtcccagtccgcggccgcacgtccagggagagccgacgctgctaggggtggctagaggacatcaccactcatcctcggggcggcgcgggcggaggcccatgggatggtccaggtgtgccgcctctcggcccggccttatcctccttcctgcacctggagcagggccaggcctgtgctgaagctgctcgcctcggggcccatcccagggagcagagggtgggcagcagcaagaacccagggccaggagtgcgccgtcttcccgggaagcggaggccggcctgtgccgcgcgtgcctcttctcgcctgcagcagtggaaaacagagtcactcgggaggccggcagcagtgggagtcgagcccgcgccacactccttagcaccggcctgctgtgagtgccaggctccgggcagggtggccggtgtggagcgggttcacagctcctctgtgctgcctgggcccctgtgtggatgcctccagggcagttggccggtcctggaaagcagagtggctgctgcagggacgcccgtgtgcgcagagctcgccttccctggctctcagcagagaggaaatggttgtttttgagactgtttttggtgagctggaaggcgtagccaaccgcaacaaatagcggccctgccgcggcagccagacaccaacaggatgtgcttcctgatgggaaaggccaggagacttctgaggccctgctccaggcccacctcctgccgcccctccccatcttcctgtcccagaggagaggccagggatgccgggtgcgggacagatccctcgtctcgcctgttgcttttaagcctggtggcccccggggcctggaggctggtactgagcgactattgcctgccctggggacttcacaccccccagccatccagttgcccccaggaccataggtacccccaggaccataggaaccacaagcctccc

SEQ ID NO: 15001 - DNA, 2300 bp, Homo sapien
agcatcgtgtgattcgccaaatggagggctccctgctctgtcaatgcatgtttccttaattcccgtattttaatagacaagtgtcaccagattggcgttcctccgaatttcatgctggctttacgtttcttatgtgctttaatttctcttttatttcagaactcaaagcattaacaatgttttacattatttctgttgagtttttccccattaattttgcatggtggcgtttgtgtcttgcacacactcatgcatctgttcttttctctctcatttctcaccttcccgcatgcgtccactcctcatagttgttgttccagagagcaggcgtgtatgacgcagtcgtaagtacagacgcccaggtcgtgtgtcatttgcttcaccgggttgttttcctgagatccttttcctcccttattttcagtacaattgtctgtgcaccgatactttctgcttaccttgcatgttcgctttaccgaggtctattggaagcctgagacactcagtgtcagctctctttatttgagcaggatgcctctcacctagcaaagctcatcaggagccagctgtggtcatggctgggacatgtgacacagcagctctttcctctgctgtgtgggacacaggaagtacttagtttacctacatttgcaatagagggagttttcgtaactcagccattcaagtctagtgaggactagccatgacgtcttttgtctgttaacgctgcccttgttcacattttcaaacggctcggcctagtttctccgaggtatgagggtggatccgggtccagcagctcttaggaccctgcctctgcaccgtgtgactggtcagctgtgacgtgggatagacagtccctccctcacagagctgtgagcaggacatggtgaatgatgagaattcccattcacacagcgaactgggtacccattctgtccacaccaagctgacattgttatcagaggtcagggcgcttccttgcagtttattaaaccagagcaggcaggaattccctgttgtttttgtgcgtgtacgttttctgacagtttccactcaaggcagaagcagtccaaacccttcagcactcagcaccctgcagatgggccccagtcacatccgtcctcaggccctccactccatcgcctctctgcagggcctcggggcctttgcttatgctctgcactgtgccaagaagggcctccccatcacaactgcgtctgacaaatcccccagatttctttgagacccaggccaagtgccgtctcgcccatgaggcctactcaccggggccgcaagtcagtttctgcaggagcagtgagctgatgggagcgcagctggggaggcaggtggctggagtcacccttcaggaagtcacagaatagcagatacaagaccagggaagcctgaccccagaaggctgcgtcgtgatccgtttcacacgggggagtgcgtgtgctctcagagaaacgggatccagatgaggggcagggctagagcccagagagcgcgtgcagagcccctgccccacggaggaagggacccatgattaaagaagaggcaagcagttggaggggctcgtggagggccagtggtccctcgggagcaccgatttccaggaactgggtgtaagaagatgcccaggtgaggatgggcctccagcaagccatagcagtgtgctcccacactgggcccacagccgcgtccctccctgtgccatgcggggcctcactgcccaggctgagggctctcctgaaaaatacccgtagagggtacacagccaatccaggttattgttttggaaaattctacctgaaatcatgctcctgttacttaattttaagagagtttaaaaaacaaattcctgcacgggcagcctttgcttacccattatctgaagccagagccaaaagctctgaccattgccagtgaccctaaaagttttcagggcatctggcagggactgggcctgttggtaaatatctgtctgtctgcagagggatttctcccccataagggagctaaatccagaggacgaggtctgggtgagggcttcagctttacatatgaattaacaaacacatgggtcctttgtcatttagcccgaagaagcagacagagaagacgaggtggagcctgggtgccaccacatccctcagatggtgtccaggagacccctgcgagactttgtggggctggaggactgcgacaaggccacccgggacgccatgctccacttcagcttctttgtcaccataggagacatggacgaagccttcaaatccatcaagctcatcaaa

SEQ ID NO: 15002 - DNA, 2300 bp, Homo sapien
ctgggcgagggctgatgctttgaagaagggggttagagaacagagcttgttgctgttttgttccctttttttaactctgttcacatgcagtttgtttctacctgtaggtcttctggccgctggtaccgacagagggcgagtagccatgtggaggaaagtaccagacttcctgggcagccccggggcagagggcaaggacaggtgggcccttcagacccctaccgagctccaaggaaacatcacgcaaatccaggtacagcctccaagggtgttcggtgcactcattttctgctgcatgaaagtggagaccatggccgggcgcggtggctcacgcctgtaatcccagcactttgggaggccaaggcgggtggatcatgaggtcaggagatcgagaccatcctggctaacacggtgaaaccctgtctctactaaaaaatacaaaaaattagccgggcgtggtggcgggcgcctgtagcctcagctactcaggaggctgcggcaggagaatgtcgtgaacccaggagctggagcttgcagtgagccgagattgtgccactgcactccagcctgggagacagagtgagactccgtctcaaaaaaaaaaaaaaaaaaaaaagaaagtggaggccataaatgactctgaacctatttttatcagttattcaacttaagactatgtgaaaataacaataataagacattttaaaagaccttttggatttcagaattgcagataagagattgtggacctgtattagttataatatgtatctacccacgaacccatccctccctctccatctctctctatctgtatgaaaaagagctttactgagatataactcatgatatatacaaagtggtttttggtatattcacaattttacaaacatcactgcagtgaattctagaacagtttcagcgccacaaaaaatctgtaccttttagtggtcgctcttattttcccctctccagcccttggcagccactaatctacctcctctctctaaggatttgcccattctggatgtttcatggaaatggaatcacacaacacctggtcttttgtgcccggctgctcccactgagctgaggtttcaaggcccctccagattgtagcctgtgtcaatgctttgctccttttcatggctgaatcacattctctgctgtgaacagaccacgttttctttctccattcatcagttgatggacatttgaataatgctgttacgaacacttgtgtacacgtttttgtgtgaggatgttttaatttctctgcagcatttggttctttcttatgatttctctctgttcctgttctctacctgatgagacactgtcgttgtagcttccttcacttcaccaggctggtttccttcagctccttcaccacgtttccagtggctgctttgaagtctttgctaagtccaacatctgagccctttcagagcagtttctgatgtctgggttttttcctatatggaatttatactttcctattttgcataggtctttatttatttttagatagatttagaagtttaatataaaattatgaaaccaacatttcacatcagcagaagaaagctggataatttaatccattatgtaaacttcctgtctgtttataaaaaacataaacatccctatgtcacactcagaaaagtgtgtcccactcagaaaaactctagaaaacgctcttcccatcagaacagacataccagtgctgcctgtccaatcacaacccttgagcatcagtatcttgaagtctttctacacagcatactctttacctttataagacttttcttataatgtcttataagatcattttttaagtccggaacaatggtacttggaaatggtttctgagttctcgtgtgtgtaagtattctcctgaccgcatctttctcctgctctgttcacacatctggttctttctcttgcaacctggaaatgaagtggggttccaggaagaacctgctggcagtgaacagcgtcatctccgtggccatcctcagcgagcgggccatgtcgtcacacttccaccagcaagtggccgccatgcaggtctccccgagtctgctgaatgtgtgcttcctgtccacgggggtcgcacacagcctgcgcaccgacatgcacatcagtggagtgtttgccaccaaggtgactgccgaggggacccgtgggtgggacacagacagaagaactgccccatggccaggtagttcagggcagcaagggccccagatggcaggttaggccactctcagttccatcctagattctcttatttcctg

SEQ ID NO: 15003 - DNA, 2300 bp, Homo sapien
actccactcgcacctgtctgtgccgcgcagttgcgactgtgatggttttagattgagcacgcagcgcaccaagcacgaggacttcacttcttaccccattctccaggaaacaaccgtggctcctcggagaaatggctgattccagaactggaatacaaaaatgagcctaggccaggcgctgtggctcacacccgtaatcctagcactttggaaggcagaggtgggaaaattgcttgagccctggagtttgataccagcctgggcaacatagtgcgaccccatctgtacagaaaatacaaaaattagccagctgtggtggtgagcatctgtattcccagctactcgggaggctgaggtgggaggatcacaggagccctggaagcagaggctgcagtgagctgtgattgcaccactccattccagcctgggcgacacagtgagaccctgtctcaaaaaaaaaaaacaaaaaactttttttataaaatgaacctaggtaatcttagggcaccagaaaggaagtgctcaccaaacccaggtaatgggggcacatcaaagggacagagaggccaactagagagcttaaagctggcacaatgtgagcaacagaatacatgaagcagccttggatgataacccagcatgggaagtaaatacccacgtgtccaccctgatgcaaacacaggattgaatgaatgagttaatggtggtgaagaggcaggtctcccatgctgaagaagcccgggtggtttacatggatgctccacccctgagggtagggtgtatctcccactcctcaagtacaggctgcagagagtgacttctttctgaacagtacgggatggagggggatccggggaagagctgcttcacagtggagagaccccacaagcacaacctccaccaggtggtcgaggtcaatgccggcagtgacaatgccggcagcatgcagagaaggcacctcagctttatgctcctcctccccaagtcctccaccccaggcaactatgagaaaaactatcaacaatcccagtggaggggcatcccatgatatacccagccagcaggtctcacactgtccagggccttaagacaaagagcctgagaccctgtcatagcccagaggagcctgaggagacacggcggccagatgtcacgtggggtcccagcctggccaacatggtgaaaccctgtctctactaaaaatacaaaaattagctgggtgtggtggcatgcacctgtcgtcccagctactcaggaggctgaggcaggagaattgcttgaacccaggaggcggaggttgcagtgagccgagaccacaccactgaactccagcctgagtgacaaagtgagactccatctcaaaaaaaaaaaaaagtttattttaaaaagttgaaaatatagcagttgctaactctaggcatgaagatgtggagacgctctgtagaagagtttccagttctttctttaaaaacttttgaattgtttgaaattttcatcgtgtatacacagtagttttgtaacttttttaaaaaaggaatatgcatgtgttctgttgcacagtttaacttttgccttccaccagtcactctgccaggacacctgtccctccaccagtcactctgccaggacacctgtcccaccaccagtcactctgccaggacacctgtcccaccaccagtcactctgccaggacacctgtccctccaccagtcactctgccgggacacctgtcccaccaccagtcactctgccggggcacctgtccctccaccagtcactctgccagggcacctgtccttccaccagtcactctgccaggacacctgtccctccgccagtgactccgtcagggtaccttgccagccttcatggggaggtcagtgctgggcaccgtgtggctggtgttcacctgtccctccaccagtcactctgccgggacacctgtccctccaccagtcactctgccgggacacctgtccctccaccagtcgctctgccgggacacctgtcccaccaccagtcgctctgccaggacacctgtccctccaccagtcgctctgccgggacacctgtcctaacacgtggtgttgggtctttccagcttggtgtcttgctcttgtggaggttggaccaaaggggccgagtgcaagggacgcctctgctgaaacacgagtatgggaaacacctcacgcactgcatcttccggctcccccctcctggcgagtaagtgtggggcttgccctgtgacctgtgtgtgtgtttacatcgggggaggtgggaagcgggctgctcctgaccca

SEQ ID NO: 15004 - DNA, 2300 bp, Homo sapien
taaagccatcaagccctgagagagctcccttacccaaagccggggggaaccttgaaaaaccccaggcaggaaagaaagcaattagggccgtttgccttcatagttattgcacagtgtcgtattaatgtatcactcatttttcagagaaatattttcacagagtaaacttattagatcctaatttcccttagcccaggatttgtaaccttggggctggctgcaacatgttaaaacccccttttttttttaaacagttttgctctgtcgcccagactggagtgcagtggcaagatctcggctcactgcaacctccgcctcctggattcaagcgattctcatgtctcagcctcctgagtagctgggattacaggcaggcaccaccacacccagctaatttttgtattttttagtagagaagaggtttcatcatgttgtccaggatggtctcgatcttctgaccttgtgatccacccgcctcggcctcccaaagtgctgggattacaggcatgagccaccatgcctggccaaaactcattttaagaggtaatcccagctacttgggagactgaggcaggaggatcacttgagcccaggagttcaaggctacagtgagccatgatcacaccactgctctccagcctgggggccctgtctctaaacaatatatattttttaatttaaaggtttcttttgctattttaaattgcccaggttttgatctggagtgtttgtttgttgttcgggtttcttttttttttttttttttttgaggcggagtcctattctgttgccaggctggagtacagtggcgcgatctcagcttaccgcaacctctgcctcccaggttcaagtgattctcctgtcttaggctccggagtagctggaattacaggtgcctgccaccacacctggataaccttttgtatttttagtagaggcgggtggcgttcgccattttgcccaggctggtctcgaactcctaagctcaggcaatctgcccacctcggcctcccaaattgctaggattacaggcatgagcctgtataattttaaatggtggcaaacccggctacaagtatgttcttctctgccagttaacttccccaaattgactgaggtgtaaaaaagtgagcagtaaccagaccgtcactttatttatcaccctaacccgcctgaaaagggacgatgtgtatatcttttccagatctgaaaggaagaatgaaagagagagattaagttcacgtaagtgatcaagctcaacttctcacagctgctgcggctgtgcattcttgactctctaatagaggaagacttctgtcttctaccacctgtgagtcagaggtaaaagacagtctttgattttatgctttattggaaattcagtactggttttttttctgtaccagtactcttttctggagcagtttgcatttattttgtttgaaaatgttgtttaaaaggcagtggtggcccacggctgtaatcccagcactttgggaggccaaggcaggaggattacctgagccaggggttcaagaccagcctgggcaacatagtaaaaccttgtgtctacacaaattacttaaaaattagctgggcatggtagtgcatgtctgtagtcccagctacttgagaggctgaggtgggaggatcacttgagcccaggagtttgaggctgcagtgagccgtgatcacaccactgcactccagcctgggtgacagagcaagacttggtctaaaaagttaaagggaactacagaaatagaacttgtccttattgtgactggaatgaaagttactgaggattgcgtgtgtagttaggctgcaggccttttctttctttcctcctttgatggccatgagttgtattcgtttctgtcacagcctgggtgattccgggtctaactgcttctcttctgcatgtctccctgttggagatctcctcgcatcaggttgcctgctcagtccgcaaggcattttcaagttgccgatggtcttccgatggtggctttgggatgcttccttttcgtcattccatgtacagtcatattgtttgttttatttaaaactgattggacttggtcatttttttttccctgcaggtttcagcgctgaggaggcctgagttccgtcatggccctctattatgaccaccagatagaagccccggatgcagcagggtcaccctcatttatcagctggcaccctgtccatccattcttggcagttgcttacatcagcacaacctcaacaggcagcgtggatatttacctggagcaagtgagtgctcagaagcaagg

SEQ ID NO: 15005 - DNA, 2300 bp, Homo sapien
tcctcgccctgaggccagttgtggctgtaccgggcgctgtggaagcgacgccccccccgcgctctcccgcgccgcccgacaggaccccccggccgggcctcgccatgacagccccgccgcccagccttggtcacctttttcatcaacgccgggcggcagcctggcttcccggggcctccccgggtgcccgcagaaccagccgggccgggcagccccggcccccgagcgccggctgcagggaggccgcaacgccgggctggtcgtccgcctcggaagcgactggtcgagcggcgctagccccggcacgtcccctccgcgggccggcgcgcggctgcgggggctgcggacgcagatactgccgccactcaccctagcgaagccggcccgccgccctcagcagcagttccggctacggcggccggtggggacctcacggacggcgcgcgggggcggggccggggtgcgcgggcgcgcggggcggggcgacgaacgcgggggcgagcacccccaatgtttcttcgggcccgtctccccaaaacggcgctcccattggctagcgctgggcgggcgcgctcgcacgtacgagcccggtgggcgtcgggggcgagcccgcggcgccagtagtgttgtgacgccagcctcgcgaccttgcggactgtgcgtctctttggattggtggacagacagccaataggccagggcccgtgctgtgattggccgcagcagtgttgacggatacgtgagaagaaaacggcgtggtagctcggagtgtggaatcgggcgcgaacctgagttctgagaagtgtggaagcacgtctgaggcagttaagcgcaccctttcctgggtggagtatgtgcttctgcgctacgttagcgtagccgagcggcgctgggcacttggtcattttcttcatagcaagaaagcagaggggtgtttttcaaattccagtgtttctttctttctttttttttttttttgagacggagtttcgctctgtcgcccaggctggagtgcagtggcgcaatcttggctcactgcaagctccgcctcccaggttcaagcgattctcctgcctcagcctcccgagtagttggaattacaggcgcgcgccaccatactcgctaatttgtgtgtttttagtacatacggggtttcaccatgttggccaagctagtctcgaactcctgacctcaagtgatccgctcgtctcagcctcccaaagtactgggtttgcaggcgtgagccaccgcgcccggctcaaattccagtgtttctttttcttttctttttttttttttttgactcgctctgtcgcccaggctggagtgcagtggcccgatctcggctcgctgcagtctccgcctcccggggctcaggcgattctcctccctcagcctcctgtagccgagactagaggcgccaccgcgcccggctaatttttgtaattttttagagacaggatctcgccttgttgccaaggctggtctcgaactcctgggctccaacgatccgcccgccccagcccccaagagctggaagcccaagcgcgagccccgcgtccggccgccagctgctttcttgggggcgctccctgcctcgcttggctctgtggagtccggggcccggcgatggaacaggccctcagtcacccaacacctcaggacactgccgagcgcatcgactttcccagaaacgcttgacccacgccctccgctccgaaactagaaaagcggagcccagggaaggcctgggccgagaccgccgcgtgctggaaaggctccgcctcgggatgcacgggaagggaacacgcccaggaggggaggatgccgcggttgatcggggctgtgacagcgcgccctccacacaaaggggacccagacgccggccctgcgccgccgtctctcctagaaaaagctcgtcccgcttctctcttgcagagcggaataacctggcccccgacgctcgggcctcggagctgcacgtgcgtgcccgatcgccttcggctctttccggccgctcggggcgcttcgggagtcctcggggccgcctcgctcaccttcggctatttccgcgttcctggcgcgccgttgtcccggcaacgcgcggcggctcagcggcctggcagaggtgagtggccttagggctagggcggccgacccaggtccttaggagccaggccggggtttggggccgaggatgtgaccggtggcgggcgtcgggaccctcccgtctcctcccacgatcccggcgccgccgagtccccgcggcccctcgcgagtcccatcgaggctggggcggg

SEQ ID NO: 15006 - DNA, 2300 bp, Homo sapien
cgtccccatcccgagacgcgagccggtgcggagcgggacggggctggaggagactgcgcctccgagaaaagtccggtctcgttggaggttctcgcgaaaaggaggccatccccctgcttgttggcccttagggtaaagtctggacggcgtcggtcctttcagtggcgaaaagcgcttccccgtgctcggtcggcgtcttgggtgtggagcccggcgagcgggcgagttcactctggtggccgagtttgttttgcttgggtcccgggtggcctgcgggcggacaggtccctgggcagcggggttctcagcccgagacgaggtctttgggggtttaggtttcttgagtggaaagaggtgggttgagggggaagagtgggaagtcttgccacgaaatcccttaagttggggtgtttgtcgtgggtggttttgttctttggcagagttttttttaaaactagcatgaactcgagattccctagaccaattccgacaggagaaaacggccacggatccttgtgtgatctgcacctcagggtgggggcatcattgcgactttgaagccatttcccgatctctcggaaagagaggtcctcgcccgcgtccctgtatttcgtggttggtgttggtgcctcgatcgtgtgttcctttgaagtggaaatgcccccgttctcaacagttgagttgaacgcagggtcagtatctgctgaggaatctaatcttcagcgtttttgcttcctcacacgtgcccgtcccggactgtttctgggctgcagctcttgctgtgtacctgattgtctgagtttatttttgagtggctctgctttctgggctgcagcatttttagtcactgcactttgttgttgacattttacagggcggtgggtagcaaagttgatgcaataattttattaattgttgccaagagttttaacaccattgtcttctaccgcttcttgcacctggacccggacataactgggctgtcactttcccgggtggttccaacctgttccatgcaacaggctcctttgttgcaaaagcatttttaactagtaaatccccgcagcagctcacatttcccaccctgggaagaagattcccagagacccggagctgattattctttatgtgtgttttaaaataagcaggcgggccggcggcattgggccaccatggagttccccgtgcgggcaggcgagcccgcgcttctcccgtcccggggtggatccggcctcctctgtcctcctccagggccagctctgggggccggcgcgtggggcaggtgcgcggggcccgggagccccgcgcctttcggggggcggggagggggtgggacgaggggctagggctggggctgcggcccggccggccgaggcggcgcagggagcgaggccggcgcgcagggccaggccatgagccgcggccccgccgggtaggtggctgtgggcggggcagcggcccggacccgcaaccgtgcccagacccgcgcccgcgccggggctcccatagaccccggggccggggccggggccggggccgggcagggtccgccgagctgtcgcgccctcccgccgccggcccgggcgtctggacgcgagcctcggccagggggcgtccggggaggcccgggagggtcccgggctggtgggcagggccgggggcggcggcgtgggggcggcaggggccgcggcgggctcgggcgggctcgggcgggccgggccgagccgccgagaggggatttggaacaaacaacggcggccatgttgagagcgcgtcggggccgctaaacttcccggcctgcgcccgcctcaccggccgcctcccctctcccggccgcaggatgacagtgaagttgggcgacggcggcagcggggaggacgggctcaagaagctgggcaagcgggcggccgatgaggagtccctggaaggagaaggggccggcggcgcagacgcggccgaggagagcagcggcacaaagagggacgagaagaccccccgggccggcgccgacggcccccccgcgccccccggcgcgccgcaggcgccgtccccgccgcagggcagcccccaggaccagcaccacttcctccggtccagcgtgcggccgcagagcaagaggcccaggaaggatcctccgagcgctgtggggagcggcaacgccggtggctcggggccccgcggaaaaggtagggcggcccgtccccttgggagaccccagcccctctccggggtgtgccgcgggggagaggaacccctcgccccagccgggctccaccctagctcacccatcccgcggccta

SEQ ID NO: 15007 - DNA, 2300 bp, Homo sapien
tgacgttgcagaggtgagtgcattgacctcacagctgcacctgaccaccaaccctcgtgccagaggttgccagcactctcctgcacacctgtgggttagtaagagctgtttgccaagagtagaagaacaggagacagcacgtccacactcaggtccctgactactgagaatggagagatctggggacgctgggccggctctcgtccccacatgcagaatgacagacttagtcatagctgagctctgcaggcctctgaactggaaaccctggtctggggcgcagagcagggtctctgaaggcagccagagccgagtggggatgttacctctccttccctggctgtgaggtgctgaggtgcggggagtgttgtggagggaggagtaaggggtggtggcagcagttgtgttgtcagtgctcccatcctaacagcaggacctttgagtggcatctccctgtcatgttgagctgcggtgcaggggaactgggatgggctctgctgtcctcatgcttctcccacgcccagggtagtgataggaggagtcactggggcaggttcttgaggggaaggcgaaacgtggtttgtgactctccacttttgacgagatgcagcgtccctctttgttggccaggccatctggttgtagccctcaaggcgtccaccacatggtttgtgtggcattcgtgggcaggtcaggcttgcagggtgaagacaggcccgtttcactgtgacgtaaagtgcagagtggcaggtgtgtgggcagtcgggtgagggctctatggacagggagggaactccaggtccaggagatcatccgcatgggcttagcccatgtgaaagtcctggagcagcattccccgaatctagtccccacaatgttgagacattggcaggtgttccttgaggattttgtgggtagatacttgagggacaccctggatccaaaaaagctcaaaacagctgtttctcacggacacctccgctacccagtatccgaatgtgaatcgtgactcttgagatgatgaactcatgggcaggctttggagaattccaagccaagccatgatatgactggaaattttagccaaatatacacatagacacaattaatagcgtagacctccatctcacagtgtgtggcgtttctcaaacctgtttggccccagaatcattattcagggcacaccttggactctgatgtttcccgagaagccagtctctgtctcttcccctgtttgtgcgcatgttcctaagtgctgggctctgtggagatgggcgctgcgtacgtgccctgaggcagcatgctcacgccatgctgttgaaaggacgggccacagcccagtgacaggagccccttggagtcagaaatccagagtgttagcctcaccccaatcagaatttgcacctttaataaaatcctgggcaacagatggcacttgggagtgagtagcagagaaagggtgcagttagtatttgtgaaacgctgcccgtcgcgagtaatgcaaacgtgttcaccttcagaaagagcagatcagcgtttagcatgagattttcccgagagccctccactcagaacgtgagtatgtttctcagcaggtcctcgtcatctggaaggatgggctgaggcatttgtggatgaaagggtctggtggtagggctagcatgaagggggcgggggtggagctgggtggccctgggatgaaacgggtgggagctgctgatggacatacaggggaaggagaattactctttgctctgcttttgaaaacaaattttaatttgtctgacatttcccataatcaaagcataaaatttcatttacgccatagctctattcagaattttccagacttcttgcattcacagtgtcatgcagttcattaagggatatttctgcagggtctgctgtgtgcaaacaatggcccctgtcctcatgaggcttctactctagagcaggacgcagacaataagcgctgaaaacggcacattctacgtatttgctcatgggacaagatcccggtgccgaggccctcccgtcctccgtctcctcagctctgtgctgcctcactcactctgtcatggccaccaccttggtcgtgcttttcagtcaaagcctcttcctgtctcagggaacatgcctgttgcttctttaaaaaggaacgtactccccatgtgtcctcatgtctctgacgggaacgtgctccccacatgtcctcaggactgatgggaacgtgccctcaccacatgtccttgggattctgacgggatcgtgccctccacctgtcctcatttctctgacgg

SEQ ID NO: 15008 - DNA, 2300 bp, Homo sapien
ggtcagagtctgctttcgtaggctctttagacagcacctaccacttggttctccagcgtagactcctgggagcagccaactgcagccattgccatccagtggggagatgggttagggaggaggacgggctgactcctctcctgtaataaagctgacaagagttctagaggattctgcttctctagtaactagacaggtgatacgcatttgcttgccacattaagggaaaatggtgtcatttgttgcagaaaaacaatggatacattttcttctggcctaaatgaatatttatgtgcaaacataggcaactgttaaaggctggaattttcaaaagatccaaacagagacttcctgcatcttctgcctttccaacagaagcggtgatcgtctaagtatgagcctgtggcttcctttgtgcatttgagcatgctgtaattaagatgagatcagtttcttagaaaaagctttcctgaatccctctgacgttgcctgggatctttctgttgattcgtcttttctggagattgggacagagcatctgtggtccagggaagttagtcctctggcctcaattctgttgtggatgtgcagtgataagcgggcattgcgtgcctcgggggatgcctagttcgtggcttcctggctgttttgtccttctgtgtcttgtagctgtagggtgccagctcagggagtggggtgttggcggcgtttccgcggttggcctccttgctttgccgcacctccaggttctgggcatgagaggccgtggcctcatttctggtggataacctttttagtttaatagcatctttaattagatcacagcattgaattcaaaatttcttctgcaaagaaagttgtggggcataagacaccgggaatgagggaggaggaagacagttgtgttttctctttaaaccttgagctctagccgatgcatttgtcaggaaatacagcactttgtcttaagaaaacaaggaaggaggccgggcgcagtggctcacgcctgtaatcccagcactttgggaggccgaggcgggcggatcacctgaggtggggagtatgagaccaccctgactaacatggagagaccctgtctctactaaaagtacagaattagccgggcgtggtggcgcatgcccataatcccagctactgaggagacttgaggtaggagaatcacttgaacctcagcggcggaggttgcagtgagtcgagatcgcgccagtgcactccagcctgggcaagaagagcgaaactgggtctcaagttaaaaaaagaaagcaaggaaagagtaatttacaacgaaggaaaaaaacccacagcacacccttcgcggctgtcagcgctctcctgatgtcacagtggctgcgtgtccttggggtgggtgaggtgtggggagcccagcccctggccctgcctcccgcgccccgctccccttctctctcttactcggttaagccatagcgaggcctccgctcgtttcagatatgaatttgttttatagattataaatatgcatatacagtgtatgtataaagcagaatgcctgcctttcctggttattttttgtaccatattgtaaattatattatttattctttaccaattttgggaataaaaggtgttttggttatttaatataataagagctgttaaacttctgtttaaatttccagttcaacttgtaaatgtttttattgtgcataaatacatactaatgttgatctaaggactgtcgtttgtgcctgttcttcagggccgcgcgcccatgcccgcagtccctggtcgggcaggtgcggcccaggtgcggccccgcggtcggctcgcgggctcccgcagaccgggcttcctcccgagggcgcggccgtcccagggcccgcccggcccgccgcccaatgcgagctcccacctccgcgagcggcgtcgccttccccaatcggctgcgggcgcggcgccgaccgttcaaagcctaagtcgtcgggggtgggcgtgaggggcggtggccgcgctgagataggctgcggagggatgattggcgtcttggcgcccaatgggcgctggcgggcggccttgagtacctgcgctgggcgggcgggaacggcgcgcggcgagctgagggtggcggcggtcgacatgttccaggtcccggatagcgagggcggccgcgccggctccaggtgcggcgcggggcacacgggaggcgggcggatagcgcgaccacgtggcgggagcgggccagcccagggcgtccaccagccgtgtggggttggggtggggttggggggcagggcgacctc

SEQ ID NO: 15009 - DNA, 2300 bp, Homo sapien
ttgcttgttttcaaataaaattcagaaaagcacatagaacaatattaaatattgtgtttccatcaccccaaagtaacactggtcattgcaagtaactaccactcacctcctgcgcccattggtccccattccacatggaggccacagactcaatttgggtttcacctcttccaaattttggagtcccgatggcactaggcgtctgtcacgtcactcacacagacactgaaaccacctgtgcagagctctagctttcctgtttaaacttgaagctcctccggggtaaggacttgctttcctctatctacggcgtctggggaaggattgccaatgataggtgctcgagagatgtgcaagttgaactgaagcaagggtgaaaggcagaggagacaggagactgtgaatgtagggaatgtggggtcgggaaagagtcctacagagcttgcagtcaaggcgagtctacctggaatcagatctgacagtttgtagcaccttgagggcttgagagaaaagccatatttgaaataagtcagtaaaaggaattatagctcatgctcagctcacataagacttgataaattcagttcagttcgaaagattgcaggccttcatcccttatttccaaagagagaactgtagagacccgtgcatgtttagacctgctacactatccaagaaaaatcgcagaattggctgggcacagtggctcacgcctgtaatcccagcactttgggaggccgaggcgggcggatcacttgaggtcaggagtttgagaccagcctggccgacgtggtgaaaccccgtctgtactaaaaatacaaaaaaatagccaagcacggtgacgcacacctgtaatcccagctactcggaaggctgaggcgggagaattgcttgaacctgggaggtggaggttgcggtgagctgagatcgcgtcactgtattccagcctggtaacagagtgagactccatctcaaaaaaataaaataggccggacacagtggctcatgcctgtaatcccagcactttgggaggctgaggtgggcggatcacctgaggtcagaagttcaagaccagcctggccaacatggtgaaaccccgtctctactaaaaatagaaaaattagctgggcatggtggcgggcatctgtaatcccagctactcaggagcctgaggcaggagaatcgcctgaacccaggaggtggagattgcagtgagccgagattgtgccattgcactctggcctgggcaacaagagcgagatttcgtctcaaaaaaaaaaaaaaatgtagaattaggagggctgcgtgattcaaaaatggatatggaagtcagatggccttatggccactctaagagcacctcacctaaaatcttgttaagccacgccctcccacccaccaccctttattttttttccttttggtgaaacaagtcctcactctttcgtccaggctggtgtacagtgatgcaatcatggttcactgcagctttgacctcctgggctcaagccagccttagcctcccgaataactgggacaacaggcgcataccaccacacccagctaattttttgtttgtttgtttgtttttttgagacggaatctcgctctgtcacccaggctggaatgcagtggcgcatcttggttcactgcaagctccgcctcccgggttcacgccattctcctgccccagcctcctgagtagctgggactacaggcgtccgccaccacgcccggctaattttttgtatttttagtagagacgggatttcaccgtgttagccaggatggtctcgatctcctgacctcgtgatccgcccacctcggcctcccaaggtgctgggattacaggcgtgagccaccacgcctggccttatttttgtattttttgtagagacagggtctccccatatgcccaggcgtgtctcgaactcctgggctcaaacagtcctcccacctcggcctcccaaggtgctgggattacaggtgccaggtactgctcccggacagccctttctcatttaagcttggttattggttatttttaaaaaataatttttcttaagtgcacctgtctttttttttctccctcctcaaatcctccaggaaatggcaactgctgacaggaagtttggcatccacctcccccagcctcctgagtggacaggggccctgggcaccacttcagaggtcggccagcacacgcttggtttctggggtacagtagccagcccgtgggtctctgcaggcggagactgaagcactctctgccttcctgctttatagcaggagatctgaga

SEQ ID NO: 15010 - DNA, 2300 bp, Homo sapien
gaaattggaatctgaggctgaatgaaacctcttagtgggatggttgaacatgtatacggcaaattatgttgcaagtggaaaatgtgaaaaacacaatagagcctggcatggtggctcacacctgtcatctaagcactttgggaggccaagggggaggatcgcttgaggccaggagttcaagaccagccagagtaacagtgagacctctgtctctacaaaaatgtttttaaaattggccaagcagtggtggcttacacctgtagacccaactacttaggaggctgaggtgggatcacttgagcctaagagttcaagtgagccctgatcatgccagtgcctccagcctgagcaacagggtgagaccctgcctctaaaaactgaacaacaaaaaaaatcagtagggtgtcagctacgggagttactgtttcggtgcaatcagattaggatgagaggatctgaactgatgagcattgcagtaggtgaaagacggtaagtggccatttctattagcattaaatagtcactgatgtggtttcatcaggattcacaatacatgtgtggctcccaaattgagtttcaaagtcttgggttcatggtgtcccctgcccagcaaaataaagtgcaaatcttacggagcaacacattttaagttcaggcctcaagtacttccagagacaaaagtcctggggacactggctcagaatgggggaaaggggaccctgggccaagagtcaaccaggatgacatgcagaatcagacctgcaagggctgcagatactgtagttatgaggcacacccaacgcttaaagataaatatgtggttggaagtataagagcctattaaaactgctagaatataagaaatcaaataggacaaaaacagaatcattggcagggtgcagtggctcacgcctgtaatcccagcactttgggacgccgagggaggcgggtggatcacttgaggtcagcagttcaagaccagcctggccaacatggtgaaaccccgtctctactaaaaatacaaaaaaatgagccgggcgttaatagcgcgtgtctgtagtcccagctactcaggaggctgaggcaggagaatcgcttggacccaggaggcgaaggttgcagtgagccgagatcgcgccatcacactccagcctgggcgacaagagcgaaacaccgtctcaaaaaaaaaaaaatcggtgcaattaataacccagtggatgggttaaacagattgcacgtagctgaaaagtaaccgaaaatctggactggcgcggtggctcacgcctgtcatcccagcactctgggaggtcgaggcgggcggatcacttgagatcagaaatttgagaccagcctggccaacatggcgaaaccccgtctctactaaaaatacaaaattagctggtctgtaatcccagctactccggaggctgagggagaagaatcacttgaacccagaaggcggagcttgcagtgagccaggatcgcgccaccgcactccagcctgggcgacagagcaagactccatctcaaaaaaaaaaaaaaaaaagaaaatctgaagcagtcagtgcagtagggagaagtgggcgaaaggaaggaggccacgctgctgggtttcaggatgagatgggcgttgagggtgcattcacagaatcccgggaggagccagctgagcggggaaggcatcaggagaggggaggcactgagcggggcgcggtgctgtagggaacggaggctcatcagggcggccgggattgaggcgcaggcgctgagccttcacctaagtccgccgaagtgtgcagagcctggagacgggatcgaggtcaccggaagcccacggttgcggggacatgatcaagctacagcgcgctgggggaagcgaccactgccgccccgcggatcccaccggcctggccgggagctccctctgcccggctcacccgcgcttccggcccgaagcccggcttcctctgacgtcacggcccctgcgccccctggcggcgcggctgcggcgggacgcgcgggcaccgccccctccggctggagggcgggacttccggtgagtgagtgacgggcgcagcctcggcagcggcggcggcggagccctgaggcgacagcagctgcgggaggcgacgggctgcggcctgcggaacctgaggcagctggggagggccgggcgcgccggccggatagcgagccgcgctggcggcggcggtggccgcgatgatggagatccagatggacgagggcggcggcgtggtggtgtaccaggacgactactgctccggctcggtgatgtcgga

SEQ ID NO: 15011 - DNA, 2300 bp, Homo sapien
tcacgcagctcggcgtagtgctcacgcagcagctcctcggaggcctgcggaagggtcaggccgcctgcgcccgcacccggcacctaggcgtccccaggtccccgctccccttccccccacaccgcgcccccgctcgctcaccgcgcccccacctgcaccagcttcagcgccaccaacttgaagcccttcctctcgaagcgccgcacaatctcgcccaccagccgccgctgcacgccgtccggcttcacggccaggaaggtgcgttcgtgtgcgccggtgcaggctgcggggcaggcggggacgggccgtcaggccggcccagcaccggccacccgcccccggcccgcgccgcgcggctcacccgcggggaagaggttagcgaagatggtcagcaccaggcagatcatgatggcggtgcgggagcgggatccgcggggcggggcggtggcgcccggggcggggcctgcgcttaaagaggcctggtcggggcgctgcggcctccgcggggaggctgcttcacttgcaccccggaacccggcagccgtggggggccggagggcagctgcggaggccaagtctcctccagcagctcggacactaactgtatcccccacaacccgcccaggtggttccacccacgcggcgccctgctccgcaccgcccgaaccccgccccccccgcgcccccccggccagggccacgaccacagcgtcagcccttctctccccggtcctaaagacagagcgcaaagacaccacgaccctgggtacttcttttctctttattccctttcatagcttctgccgggatccaggcagagagagcactaatgggggaaagggagcgagcgcttcccgctttccccagcgtgggccctcggagttgggtgtgggggcagcagggccagaggaaaggcacaggtggcgatttgccccagccctcccccctaagatgcagaccctcagaacacgtcgcggaaggtgagctccctgctccgagaggcagactcgggtgtaacgcaaagacggtttctttcatcaataaggtccccactgcctcacagcccctaaggccacccgctggttctggcattctagacgggggtgcccttggcccttcctttgtcttcctgttttgcagggtaatcccagggttccatgcgtatcctctgcacattcagcatgggctcctcggtgcttgtgtctccatttttctgtcgttctgcgataatcatggcccggaggagaggcgggtacggcacggaggccaggctgtcttccggcgccggcgtgaacgcggtgaaggcctcctcctcgtgcttgggcaccagccgccagtcatggtacatgacgtgttcgatctcccgcgcctcgctctcagtcttccctgatgaagaaaaagaggcgtctgcacacacttgctgtgccgtcggcggtcggcatcgaactgccgggcacccgctctcccgagccttacctttgaaggtcaggatgccccaggccttcccgtggtccaagttctgcaaagccagaaggaagcggggtcagctcgcaaagctctcggcccccgaggtcaggaggtgggagcctcagccacgcaaacctgcagggaggaggggaggcggggagaccaggcggctgcaggggcggggtgcggacggggtgcacgcacctgcgccgtgtagtcgggccgcacccgcgtgaggcgccagtagcacggctcgtcgtgctgccacagccaggacttgcgcgtgaccaggcggcccaggccgaagagcgggaggcggccgagcagctgcaagaggcggctctcgcggcgcacgtcggcccaggcccggaccggcagccggcgtccagagaacggccgcgtcaaggtctcgtagtccaccgcgtagagctgggagtcgcgcggcctgttcagttgctcccgcagggcgcgcacgcggcgggccagctccgcgatcagccgcggacgcaccttcttccgcgccatggcgggtccgcgtcctcagcggtccggccggaagtcaccggaagaggccggtgtcccaggctaaagtgttcggtcgcggccggaagcgaggaagaggtcggtccggccatggcgcgggttggacccgggagggcgggggtctcttgccagggccggggccggggacggggcgggagcggtcagcggcgacctccaacctgggagatctcagactccgacgctgaggactccgccggctcggaggccgccgcgagagcccgggacccagcgggtgagcgcagggcggctgccgaggcgttgcggctgct

SEQ ID NO: 15012 - DNA, 2300 bp, Homo sapien
tccaccgcaggctgcgggccgggcgctggggctcgatgcggcactcgcagcccagggcctccagggcctccatcaggacgtcggcaccggcgtcttccaggatggctgggaccgggggagaggagcgcggtcactgcttccttccaccctcgcgagcgccctacctgggcgggtggccggaccggggagtctccattcggcacaaacccccgactgggaggcgggcccggccccaggcccctcggcacgcgcgccccgcccagtcggacagagggcgccgcctggcggagaaaggcctttcctaccccgagtatcgcccgtgccctccgccgcacctgtgtccacgcacaccgcgaggcgcttcaggacctgctccggccgcagcagccgcaacgcctcggcagccgccctgcgctcacccgctgggtcccgggctctcgcggcggcctccgagccggcggagtcctcagcgtcggagtctgagatctcccaggttggaggtcgccgctgaccgctcccgccccgtccccggccccggccctggcaagagacccccgccctcccgggtccaacccgcgccatggccggaccgacctcttcctcgcttccggccgcgaccgaacactttagcctgggacaccggcctcttccggtgacttccggccggaccgctgaggacgcggacccgccatggcgcggaagaaggtgcgtccgcggctgatcgcggagctggcccgccgcgtgcgcgccctgcgggagcaactgaacaggccgcgcgactcccagctctacgcggtggactacgagaccttgacgcggccgttctctggacgccggctgccggtccgggcctgggccgacgtgcgccgcgagagccgcctcttgcagctgctcggccgcctcccgctcttcggcctgggccgcctggtcacgcgcaagtcctggctgtggcagcacgacgagccgtgctactggcgcctcacgcgggtgcggcccgactacacggcgcaggtgcgtgcaccccgtccgcaccccgcccctgcagccgcctggtctccccgcctcccctcctccctgcaggtttgcgtggctgaggctcccacctcctgacctcgggggccgagagctttgcgagctgaccccgcttccttctggctttgcagaacttggaccacgggaaggcctggggcatcctgaccttcaaaggtaaggctcgggagagcgggtgcccggcagttcgatgccgaccgccgacggcacagcaagtgtgtgcagacgcctctttttcttcatcagggaagactgagagcgaggcgcgggagatcgaacacgtcatgtaccatgactggcggctggtgcccaagcacgaggaggaggccttcaccgcgttcacgccggcgccggaagacagcctggcctccgtgccgtacccgcctctcctccgggccatgattatcgcagaacgacagaaaaatggagacacaagcaccgaggagcccatgctgaatgtgcagaggatacgcatggaaccctgggattaccctgcaaaacaggaagacaaaggaagggccaagggcacccccgtctagaatgccagaaccagcgggtggccttaggggctgtgaggcagtggggaccttattgatgaaagaaaccgtctttgcgttacacccgagtctgcctctcggagcagggagctcaccttccgcgacgtgttctgagggtctgcatcttaggggggagggctggggcaaatcgccacctgtgcctttcctctggccctgctgcccccacacccaactccgagggcccacgctggggaaagcgggaagcgctcgctccctttcccccattagtgctctctctgcctggatcccggcagaagctatgaaagggaataaagagaaaagaagtacccagggtcgtggtgtctttgcgctctgtctttaggaccggggagagaagggctgacgctgtggtcgtggccctggccgggggggcgcggggggggcggggttcgggcggtgcggagcagggcgccgcgtgggtggaaccacctgggcgggttgtgggggatacagttagtgtccgagctgctggaggagacttggcctccgcagctgccctccggccccccacggctgccgggttccggggtgcaagtgaagcagcctccccgcggaggccgcagcgccccgaccaggcctctttaagcgcaggccccgccccgggcgccaccgccccgccccgcggatcccgctcccgcaccgccatcatgatctgcctggtgctgaccatct

SEQ ID NO: 15013 - DNA, 2300 bp, Homo sapien
gccagagcccacctggagaagtgggatcagctgtgccacagcaaccccagaagtgtgcccacctcccctgaacccccgtcccagccagccctgctgtgggcatgagagtgagcggtaccacaggtaggcatccagcccgatgacagccaggtggggccgggcggtggtctcgggggagatccagggcacccagtgggttgggccagagatctgaagatgagaacgtgtggcacagttgttcacaggaggctgcggcctatggccatgggccaccaggccacagctggtttgcagaacagcaagcctgaaaaagagccagtggtgccgagaggagcctctgttccgttaccccttctgagaaaaccagctctgtgcctcccacgaggccaaagaggctaaggagaccctggagtggctgctcgggcacatgtcagttccattgagcccctcatcctggtccacctctgtactccagcctagctttgacctagcacaaagcagcagcttgagagacactgatcctgggacacagggacctggcagggggtctagcctaaccccacgctacctggcaccacagcacctgagcactgctccccgcaggcaggggccaggctgtctgctgtcagaggacgaagcctgcagcctactgcccggaccccggcctcctgacacttctcaggatcctctaggagcagctgtagcctccgcaggtgcccaggagctttctccatctcaccctagaaacctctacggctttggatcagagaggagtcctggcctgccccatgccccctccagccccgtctacaggggcagggaccggcggagcaggcgcctcccggctgggaacccacccctcctgattagagagggactactgccaccacccgagcacctgggtcagtgtggcgacgccctgcagaaactcctcgggctccagcagcagcagcaattcctgttcacctgcagcccacacttcaggaggcagctgtggggacatggggacgcgctgctgcctgtctcaaccccgggtgccccaggggccctgcctgggcagtccagcagcaaagcggttcgtggccccagccaagcccaggccctgacaggcctgctctacagaagcccagtgttccctttcctgccaaggccaagctcaggccaggtctctgtggctggcaggaatccagaccacagcctgaatcgagacggaaccttctccagccagctcggctctataccagcagaacggcttgggcacctccacttcccgttctccatccttgctttacccatccgcgagacgcgcacggcccagggcagctgcctcagggacagctccagggctgaaatcatggaagcaaaacagccaactcgcggctggccctcgggaacccgcgaccactcacgctgcgggggcaggggtcgggactcgctcgggtccaccgcaggctgcgggccgggcgctggggctcgatgcggcactcgcagcccagggcctccagggcctccatcaggacgtcggcaccggcgtcttccaggatggctgggaccgggggagaggagcgcggtcactgcttccttccaccctcgcgagcgccctacctgggcgggtggccggaccggggagtctccattcggcacaaacccccgactgggaggcgggcccggccccaggcccctcggcacgcgcgccccgcccagtcggacagagggcgccgcctggcggagaaaggcctttcctaccccgagtatcgcccgtgccctccgccgcacctgtgtccacgcacaccgcgaggcgcttcaggacctgctccggccgcagcagccgcaacgcctcggcagccgccctgcgctcacccgctgggtcccgggctctcgcggcggcctccgagccggcggagtcctcagcgtcggagtctgagatctcccaggttggaggtcgccgctgaccgctcccgccccgtccccggccccggccctggcaagagacccccgccctcccgggtccaacccgcgccatggccggaccgacctcttcctcgcttccggccgcgaccgaacactttagcctgggacaccggcctcttccggtgacttccggccggaccgctgaggacgcggacccgccatggcgcggaagaaggtgcgtccgcggctgatcgcggagctggcccgccgcgtgcgcgccctgcgggagcaactgaacaggccgcgcgactcccagctctacgcggtggactacgagaccttgacgcggccgttctctggacgccggctgccggtccgggcctgggccg

SEQ ID NO: 15014 - DNA, 2300 bp, Homo sapien
aggtcggtccggccatggcgcgggttggacccgggagggcgggggtctcttgccagggccggggccggggacggggcgggagcggtcagcggcgacctccaacctgggagatctcagactccgacgctgaggactccgccggctcggaggccgccgcgagagcccgggacccagcgggtgagcgcagggcggctgccgaggcgttgcggctgctgcggccggagcaggtcctgaagcgcctcgcggtgtgcgtggacacaggtgcggcggagggcacgggcgatactcggggtaggaaaggcctttctccgccaggcggcgccctctgtccgactgggcggggcgcgcgtgccgaggggcctggggccgggcccgcctcccagtcgggggtttgtgccgaatggagactccccggtccggccacccgcccaggtagggcgctcgcgagggtggaaggaagcagtgaccgcgctcctctcccccggtcccagccatcctggaagacgccggtgccgacgtcctgatggaggccctggaggccctgggctgcgagtgccgcatcgagccccagcgcccggcccgcagcctgcggtggacccgagcgagtcccgacccctgcccccgcagcgtgagtggtcgcgggttcccgagggccagccgcgagttggctgttttgcttccatgatttcagccctggagctgtccctgaggcagctgccctgggccgtgcgcgtctcgcggatgggtaaagcaaggatggagaacgggaagtggaggtgcccaagccgttctgctggtatagagccgagctggctggagaaggttccgtctcgattcaggctgtggtctggattcctgccagccacagagacctggcctgagcttggccttggcaggaaagggaacactgggcttctgtagagcaggcctgtcagggcctgggcttggctggggccacgaaccgctttgctgctggactgcccaggcagggcccctggggcacccggggttgagacaggcagcagcgcgtccccatgtccccacagctgcctcctgaagtgtgggctgcaggtgaacaggaattgctgctgctgctggagcccgaggagtttctgcagggcgtcgccacactgacccaggtgctcgggtggtggcagtagtccctctctaatcaggaggggtgggttcccagccgggaggcgcctgctccgccggtccctgcccctgtagacggggctggagggggcatggggcaggccaggactcctctctgatccaaagccgtagaggtttctagggtgagatggagaaagctcctgggcacctgcggaggctacagctgctcctagaggatcctgagaagtgtcaggaggccggggtccgggcagtaggctgcaggcttcgtcctctgacagcagacagcctggcccctgcctgcggggagcagtgctcaggtgctgtggtgccaggtagcgtggggttaggctagaccccctgccaggtccctgtgtcccaggatcagtgtctctcaagctgctgctttgtgctaggtcaaagctaggctggagtacagaggtggaccaggatgaggggctcaatggaactgacatgtgcccgagcagccactccagggtctccttagcctctttggcctcgtgggaggcacagagctggttttctcagaaggggtaacggaacagaggctcctctcggcaccactggctctttttcaggcttgctgttctgcaaaccagctgtggcctggtggcccatggccataggccgcagcctcctgtgaacaactgtgccacacgttctcatcttcagatctctggcccaacccactgggtgccctggatctcccccgagaccaccgcccggccccacctggctgtcatcgggctggatgcctacctgtggtaccgctcactctcatgcccacagcagggctggctgggacgggggttcaggggaggtgggcacacttctggggttgctgtggcacagctgatcccacttctccaggtgggctctggcagaggccaagctcgggcagggcaggccccatggggagcggggaggaatggtcacctctgctcaggtctcgccagcacgtttcccgggggacacagcagccagagagcccgaaggtggccggtgccgaggtggccgtcagctggccggaggtggaagaggtgagggcctgtctgagctgggtgagtcaggtggcctgggtcccagtgattgggctgctggctgggtttggttcccagcgtggtacatggggcagctatcagctg

SEQ ID NO: 15015 - DNA, 2300 bp, Homo sapien
aagcaatcctcccagctcagcctcctgagtcgttgggactacaggcacgtgccaccacgcctgacacattttttaaatttttgtagagacagtgtttcaccatgttgcccaggcaggtctcaaactcctgggctcaagtggtcctccagcttcagcctcccaaagtgctaggattataggtgtgagccacagtgcccagccccgtagtggagaatttctgttgaatgaaccaaaagcaactgccaacctctccatgcaccatgtgtttcagaggagaaagcacagtgaagaatgcagtgtgttctgaggtcctgtcacccctgaggctgtgtgtgtcctttgccaaattaaagagtcttactgaatgcggtgcatccaggagacaggcccaggtttggactggtcctctagcctcagaagcatctttttctccgactgattccgtgttcaggtaatgtctgcctgcctgcctagggcatctccacaccttaggccagccacgtccgcctcgcccgctggaacctacctgcccatcagagtcgtagccccagttagtggagcctgctagagccacggcccgggcatctgcgtctcggcgggctgcactcaggacgaagtgccaggccctgctgttccgggggcgtctggccatggtggaaagaatctagaagaaaacacaggctctgggcaaaggaagactcacagcactcccagccctgagcttccaggctgggccacggacccactcaaagtggggactgcaggggccgcaccggtgcccagccagggctccagaacgcttcaggagcccgtacctcactccaggatctgagcagctcaataaaacccaggtagatcctgtgaaacgccacccagacacccatgactccggaatgcgaatcccagcccctctctccggttccacctcacgaacctggctgccccgcccgcctgtcccgcaggcatctaaaacctccactcgctcctcctctgtcgtccggtttgacaaatggcatctccggcctcccagttcctcatgccagaagcaccgtgaccgctccccgacaccttcccctcacgcccggcccgaccgccgcacccgcctgcatcctcctcccgccaccgtctcctgggccgcgcagctcgccttcccctccgctcgctaccgccagggctcctcgtgaaacacaaatcttaaaacctgctcagcgctggccgctgttatggtataaaatgcaaaaggctgcgagggccaggtctgcgcttcccaggccacctgcctggcacctccctcgccagctccggggttcccgcctagccttccagggccgacccctgcgccgggctcgcggctggcaacgcccgctgggccccgggtggggttccagggaggccggggcggatcgcggcgcccggaccgccgaaccctgcccagccccaggcgagcgcgtgtgcagcgggagccgccctccccggcggcagcccggcctggctgttccctcccgcgggcgcgcgggttccggagtcggcggcaccggggaagcctctctcgggcgcggccctccggagaggaacaaaggcggcgccctggccgcgctgctaccgccgcgcccgcaaggtcagcgcgcccgcccagagcccgagacgtcggcccgtgccccgccactcacctgcagcccccgctgcgcgctccgccggcccggccctgacccactttccgccccggagcgagacgtaaacaatccccgccccctgcgcccattggctccggcggcgaggggcgggcacacctgtctcggagcttcgggagagggggcgggagtcgggtgacaaagctattgccgagaggtttcaggaactgtcagtcctaatccaacgttcctattggtcagttcccaagcggttggagacaaagctcgcgcgcacattggacccgggtgggaggtggtaccgcaggccgcgttgaccggaaagtaggtccgtgtcatcgtctgcgccggaacctgcgggaccggatcgagagctcctccggcaagctgattggctgggacagcaggattaggcctgtcaagaagagccacgggcgggcacgcactgcccattggttggaaggcccttcgctctagctgggaggctgacggcccgcgggcgtaagcggactgcagccgcgagctcctggaggcggcgggatggaggcggcggccggtgagtggcgggccagggtgcggagccgctccagggcctcgcttggggccccgccgcgtcccttcccggggcggcctcgctgcgtcgcgcgcctc

SEQ ID NO: 15016 - DNA, 2300 bp, Homo sapien
taatcccagcactttgggaggccgaggtgggtggatcacctgaggtcaggagttcgagaccagcctggccaacatggcgaaaccctgtctctactaaaaatacaaaaaaaattagccaggcgtggtggcgtgtgcctgttatcccagctatttgggaggctgaggcaggagaactgcttgaacttgggaggtggagattgcagtgagccgtcatcgagattgtgccactgcactccagcctgggcaacggagcgagtctccgtctccccccaacaaaaaaacgaaagcttggactaggtgcagtgactcacgccagtaatcccagcactctgagaggccaaagtggaaggatcatttcggtccaggaggagttccgcaccactctcaataacgtattcagaccccatgtctacacattaaaaatgtagccaagcggggtggtgcatcctgtggtcccaggtgctcaggaggctgaggtgggagggtcgcttgagcccaggaggtcaaggctgcagtgagttatgatcgtgccactgcacttcagccttggcgacagttaagaccctgtctcaaaaaaaaaaaaaagcttctatcaatctcagtaatatccttactttgtagtaaatccgtcctgataataaggacaggcttttccaggcttctcctctggaataagactccagcactgggccaggcgccgtggctcacgcctgtaatcccagcactttgggaggctgagacgggcggatcacgaggtcaggagatcgagaccatcctggctaacacggtgaaaccccgtctctactaaaaatacaaaaaattagccgggcgtggtggcgggcgcctgtagtcacagctactcgggaggctgcggcaggagaatggcgtgaacccgggaggcggagctggcagtgagccgagaccgcgccactgcactccagcctgggcgacagaacgagactccgtctcaaaaacaaaagactccagcactcggtttctaatctgtcagagttgtgctgcaagaccttgctgtccgaggaatgttttccttttggtatcggactcgaggtctcttagaagataaatgcggctcccactactcaggagggcccacggcgctgatctggcgaacggatcgtccccactggtgtgaattctgtcccgcgcaacttacacttttctgaacactgagagcgccacttccacaaagaacttaaaagcatgtgagattctggcgtccgtcttactttcatgactgcgcgcgtgtgatttatttagagacagggtctcgctcttgcccgggctgcggtgcagttgcaaccgcgacctccaggatagcggggcccacaggcgccaccgcgcccgcctacaacgcggtgctcaacaaagttaactttaaaagctcccccaactccacgactcaggccctccgagatcacggagcttccacatcgaagcaggagcacgcgggaaacgaccctgtttagaaaatgcccgcgccgcggcctctggcccggcccagccacgccggccggtgatggtcgcaccggaggcgcgcgacgcagcgaggccgccccgggaagggacgcggcggggccccaagcgaggccctggagcggctccgcaccctggcccgccactcaccggccgccgcctccatcccgccgcctccaggagctcgcggctgcagtccgcttacgcccgcgggccgtcagcctcccagctagagcgaagggccttccaaccaatgggcagtgcgtgcccgcccgtggctcttcttgacaggcctaatcctgctgtcccagccaatcagcttgccggaggagctctcgatccggtcccgcaggttccggcgcagacgatgacacggacctactttccggtcaacgcggcctgcggtaccacctcccacccgggtccaatgtgcgcgcgagctttgtctccaaccgcttgggaactgaccaataggaacgttggattaggactgacagttcctgaaacctctcggcaatagctttgtcacccgactcccgccccctctcccgaagctccgagacaggtgtgcccgcccctcgccgccggagccaatgggcgcagggggcggggattgtttacgtctcgctccggggcggaaagtgggtcagggccgggccggcggagcgcgcagcgggggctgcaggtgagtggcggggcacgggccgacgtctcgggctctgggcgggcgcgctgaccttgcgggcgcggcggtagcagcgcggccagggcgccgcctttgttcctctccggagggccgcgcccga

SEQ ID NO: 15017 - DNA, 2300 bp, Homo sapien
aaaaaaaaaaaaaaaaaaaaaactcaccagaatcctaacgagaggacagaaaggccacacacctgagtgtgcgtgctgaatgcttttgttttttcttgtatcttgcaaatcagaaatcagccagctaactagaaaatcggcaagagaccgaaaccagcagtggctgaggccagatgaccctgtggctgtgtgctggacaagatgctcggtctcccaggtgatggccaccgtccactcgccactggcctgagtgtagacaggtatgcacccacaggatgcagagccacagggctcggtggcattgctggaaacagtgagaaggacagggacagatgtattccaggacgtgacctagacatggcctcacctccctcgggtcctgtcctacagaaagccaggccctgtgcggcctgaagacaggcagaatgcggctcatggaggagcctgggaggccaccggccttgagctgggagaggccacggggagtggggccattgggggtggcggcagtgatgggggcctctggaactcaatgggctgaatgtgtgtgtaggcctctgcgttaccacaggaatcaaagaggcctggagcccccttacgcggctgccgcaaccctggtgaggctctgcccgcccgcgacacccggcccctcccaaaggaagagaacagggacagattctcccttcccacctggaatgtgtggggctcccaggtggggtgcgcggcctgacggaggccggggcccccacggggacctctcctgagaggaggccgcccgggtctgctggcctcaggccccaggcccctgctgagtctgcgttttctgctgagtaaacggatcgtgggtctttctgggtgtggactttctccccgtggatctataatttctcagaagaggagccgagacgccacctggaaaatgatcaattctcgataaagggaagacgatgacagtgggccggcggcttcccacagctctgcacggggcctgccaggtgaggccggagctgaggatggggtagggccctggaaaactgtggtctccccgagccctggctgtgcccccgcctgcaccccttccggctgcttccctgcacactttcccactgccgagggactggtgggcaggccccactgacagccaggggaggggcctgcagggacctggaggggaggggctgcacctgctcaggccctgggggagagagcgactggttgggaagtggtttgagcaggtggaggggaaccaggggcctctggaggcaggtggagacggagcccaggggtggccttggacatggctgggcacacattcctgtggcctctctgcacacaagcggtgactgtggggcggccaggccctcaccagagccttgggggacagcaaggggcaggtgaggcttgtctgaggcacaagacctggctcccatggccaggccacccccacacactccccgaggatggcgcagggcaaaagcaaacaggcgcctgcagccctgccaggcattcctagaagaggctgggggcggggcagtggccagacaccagcgcccctggggtcacgggagaggcagggtgagcttgggccctggacagcaccgtgggcctgaagcccaaacggcagctcccacccaggctgtagggaacccccgggagggcgggtggatggctgggtggggcacggggaaggggcggcagccccttagccccacacggctggctactcaggccaggggtgggctcaagaccccaggagctgcccgaggagccccctgcccgcaacaggacctggtaaaaccctgggctccccaaaccggcctcaagccccagcccctcccaggctgctgcaaggggtccccaccccaacctggctgcccagccctccccagtcagccctgcagggggcccgggcactggccgtcagcccccagggccgcattacggctacctcgggccccgactgaagctccctcaccccctgcactgtctgcaccccagggctccgggctgatgccggccgcccggcacgagggggttaacagagccagggccagctgggttgggccagccaggtgacaggcgcgggctgccccgcagtggggaaatccagagggcaggggtggccggcacagcagacgtaccctccctcgctgcctgcctgcagcctgccctgcatgcaggatggccctgaggaaaggtgaggcccccgagtgccccgccacccactctaggggtggccagtctgtgaccctgagcccgctggggagaggccggggtagcccccaaggaagctctggggg

SEQ ID NO: 15018 - DNA, 2300 bp, Homo sapien
aagttccatttacttattttttgtttgtttcttttttttttttttgagacggagtttcactcttgttgcccaggctggagtgcagcggcgcgatctcagctcaccgcaacatccacctcctgggtttaagcgattctcctgcctcagcctcccgagtagctgggattacaggcatgcaccaccacacccggttaattttgtatttttagtagagatggggtttctccatgttgatcaggctggactcgaactcctgacctcaggtgatctgcccaccttgggctccaaaagtgctgggattacagatgtgagccactgcgcccggcctactcaatttttcttttatgtttcttgtgccctttctaagatatctttgcatacccttagctcacaaagactttctcctgtgtttcttcctagaagttttaaagtcttagcttttatatttacaaacaatttacagtgttccctttcaagatggtgtttgtgtgtggtgcgaggtgagggtagaggttcaccctctcgcagtgtgatcccgaggtgttcagggctgtctgtcgaaggactgtcctttcctccctggattgccttggcacctttctgaaaagaatgggccctctatgcccgagtctgcttctggtctctgctctgtttcgttggtctctatgacttgccacggtgtccgaggacagcaccttgatgactgtaactctgtgctgagtcttggcactggtatgtgtgaatcctccagtgttctttttcaaaatggttttagttgttttaagccttttacatttccgttttcagaatcatctcgtgaacttctatcagaaaagctagcctggctgctgattgggactgttgtgataactgatgtggcgagaattgcgatcttaacattgagtgtttctgtgagctttccatctatgaatgtctttagcttttctcagcagtgttttgaaatttgcgtgttcaaggtcttgcacgtgttactaaatggatccctaagcacttctggtcatgattatttgttgatactagttataaatacagtggatgcgtattaacttcctgggtgtcttagtctgtgtggtgttgctataaaggaatacttgaggccgggtgacttataaaaggaggtttatgtggctcatggttatgcaggctatataagcagcatggcctgggcgtctgcacctggtgaggcctcaggctgcttctgctcatggcagaaggcgaaaggagctggtgggtgtgaagcatgtggccagaggaaggagagagtgggggaggcaaaagtttcttttaaacaaccagatcctgtgggaactaacagcaaaaactcgcacttggagcagggcaccaagccgttcacaaaggattccccccatgatccaaacacctccattaattggggatcagatttgagcatgcgtttggagggatggacatcccagccgcagccccgtgtgaacacccaggagaagggagtggccgggctggacgggaggtgtgtttgacttttaaagaaactgccaaactccccttccccggtgcttgtggtgtttgctttcctgctgggaaggcgtgggcacaccagctggtccgtgtctttcggcacaccacacggtggagccagcccacgcggtggagccagccgtttgaaaggaggtgctggagcccagtccctggtgagaggccgcctcctgcagggcgcctcccattctgcggcctctggttttcttagcagtatcttttgagccaacatttttaattttaatgaagtccaatagattcttttatgcttcattcttttttgtctcccatctaagaaatctttgtttatcccaaggtcaaaaaattttctcctgtattttatttttggaatttgtatagttttaaaacttagtatgaactcccaccccccaaatgtctgctggatctgtaatgatattcctgctttcattcctgattttgacaatttgtgtgttttttttttgtttttttttttttttgagacagcgtttcgctcttgccgcccaggctggagtgcaatggcgcgatctcggctcaccgcaacccctgcctcccgggttcaagcgattctcatgcctcagcctcccaagtagctgggactacaggcatgtgccaccatgcctgggtaatttttatatttttagtagagatggggttttaccatgttggccaggctgatctcaaactcctgacttcgtgatctgcccgcctcagcctcccaaagtgctgggattacaggcgtgagccactgtgcctggcctgtc

SEQ ID NO: 15019 - DNA, 2300 bp, Homo sapien
cagcctgaccaatatggtgaaaccctgtctctactaaaaaatacaaaaattagctgggcgtggtggcgagcgcctgtagtcccagctactcaggaggctgaggcaggagactcgcttgagcccgggaggcagaggttgcagtgagccgagattggccactgcactgcccaggcgaagaaaatgtcatttacaactggtgctcagcctcccctggagaccatcacagcctcctgaagaagctgacaacccagggaggtgcctttatttctgaggaaagacgcagctggtgccaacaccagcagaaaccgtattccctttccatatcactcagcccagcactgcctggcaaatgttcccggcttgctgttttgtaactgtaatactttgtacaaacaggtcaaggacctgcagcctggggcctggaccaagtccagaaacatgttcggtttggccccaaaaacaaaaaaaaattgagatatggtctcactctgtcccctaggctacagtgcagtggtgcgatcaagggtcactgcagcctcgacctcctggactcaagcgatcctcccacctcagcctccaaagtgactgagactacagttgtgtgccaccacgcccggctgattttgtttagtttttgtagcgatgaggtctcaacatgttgccaggctggtctggaactcctggactcaagcgatcctcccgcctcggcctcccaaagtgctgggatgacaggcgtgcgtcactgcacttcttttttaaatcaggaagtttcacagcatcttgcttcccttgaactgggcggcaccaaatacgggggctggggcctcccttagaatggggtacgcacgccctgccgatgcacacagtcccgctggaactctctgcctggacccttatgaatgtccctaaaactgtaattctgaggacctcaaaatccatgtcctttccttagcaatggcgacattctaccccctgcagagccttgacagctttcggcgagatctggaaaccgccagggacgcctccctgtctgcgcctccgcccgcccagtgccctgcgctgcgcacccgcccggggcgctggcctggcccggccgcgcgaccacctcgggcgaatgacacgccgggtccccagacgggggctccggcgccgggcgggcagctccaccaccgcaggcggcgccgcgagaccgcggtccttgcagcggggcagcaggtgcggggtgggccaggcgtcccggggccctgcccgctgcgcctcagagccgcgccccaggctctcctcggcgccggcccgggcaggacgcgatgccctggaggcgtcaggggcgcggccggcccagcccgagcgtggaggccgcggcggacgcaggcctggccctgcttacctagcgctttccgcacccgcggccccgcgcccgctccgcgccagcctcagcgcctgcgccgcctccgctcgagcccggcagcgcggccttaggcacctgcgcaacagacaccgcgtcagcggtcgccaaacgacggcccggcgccgcccgctgcccgccccgccaggcccgcgtcccccggcccgcaccgccccgccgcacccaccgaggcctcggcgggcgcaggcggctcccagcgcggcgaggctgcggcggccgagcagccctcggcccaccaccatgacccgggccgggctggactgccgagctgcccaggactgcaaaacaccggcgtcggcgcgtcgcagccaatcagcgcccgcctcgcgctgccctcagccaatcagcgtccacctcgcaccgtccgccaaccaatcaacgcgctcgcgctcaacttgttttgtccgcgagccccgactgccacgggccgggagacgggcctgggagcggcggcggcggcccgagagctgcgccgggagagctgtgccgcgagcctccgcctcttttttggcaccgcacagtggatccctggaggccgagcgccacgccgcccgggtacccggcagatcgcgaggtggaacgggccgtcgctgcgggggacagcgttccgaggcagttggtcctctccgggatgccgtaggcatcagctgaccggcccagcccacgtgactacaggggcacttgatgggaatcatggcagcatccaggccattgtcccgcttctgggagtggggaaagaacatcgtctgcgtggggaggaactacgcggaccacgtcagggagatgcgcagcgcggtgttgagcgagcccgtgctgttcctgaagccgtccacggcctacgcgcccgagggctcgcccatcctcatgcccgcgt

SEQ ID NO: 15020 - DNA, 2300 bp, Homo sapien
actgtgttcaatacatggggaccgttactactcaatcagatgtcctaggctttcttcaggggccagcagatgatgtgaacgcgaacaggaacccctgccgaagcccaaaggactcctccaggcattgacagctatgctgtgcatcttgcctggatgttttttcagaggagggtgcaggcaagagcaaaagcagcagtcccaggctattcaacttccacaaagcctccttatctccggttgggaagtacagttgctgattaactgtgttaacacagcacagtgctcagaaggccaaaggtcaaagactaaggtctgaagccccacaaggaggaaatatccctcctcgtcattactggggggaaaaaaattacccttgtaagccacttagaagggagcacctttatttggaaaacagtaatttcaaaatcatctcccgaactcagaatcgatgggtctgggtagataccctaagtaaacaggtgaaatcttcattacttgttcacttattaagtaaaattttaaattaaccgattatgtacaggagtgtttttcacatttcctgataagaatcacttggaatgccctgtaaacacagcttcactggagattaatcctatcaaattgattcagcaagtccgagatgggccagtaatttgtggagatttttatttttacaaatgcttcctgatgatgaccaaatctaagaaaatttggtaaacaacggaaagttatctggaacataactttcagttttctctgcagtttttaagtgctgaactactgatcatcctagagataacccactgaaaagtcttctctaatccagttttacaaaaggaaagtctttttaacatttggtttgataaaatgttttccgaagaaatactttacttgcctgttttcatttctggcccacccgttctacttcacgttttcttgaagggttcatcttctatgagttgaggcatagcaatctaatcatttttaaaataaatggtttctttttttttttttttttttgagacggagtctcgctgttgcccaggagtacagtggcgcaatctcagctcactgtaagctccgcctcccgggttcaattgattctcctgcctcagcctccagagtagctgggactacaggcgcccgccaccacgcccggctaattttttgtatttttagtagagacggggtttcaccctgttagccaagatggtctggatctcctgacgtcgtgagccgcccgcctcggcctcccaaagtgctgcgattacaggcgtgagccaccgcgtccggccaataaatggtttctaattaaaggattgtgacatttaatagccgttgcttgctcttgtcttgctcccttctctctcgaaacttgttaagaaataactcaatattctggcttttccactttaaatgtcatactgaccagcccgtgtatgccagcctcgatctcatcgttttctttaaccggtccaactccctttggcgtcccagtcaagataatatctccttcttccaaggttatgatcttagaaacatagctgatgatgtaggggatggaaaaaatcatggaggatgtctcaccctcctgtctgagttcgccgttgaccttgagccagagcttcagcttgtgagggtcagggatcttctccttgggcacgaacgcgctgaccgggcaggacgccgtgaagctcttcgccagagtccagggcagccccttcttcttgcactcgtcctgcacgtcccgggcggtcatatccaggcacagggcatagccgcccacgtagtccatggccgcagcctcggggactgcgcggcagcgcttgcccatcaccacgcccagctccagctcgtggtgcaggttgcgagtgtacgcgggcatgaggatgggcgagccctcgggcgcgtaggccgtggacggcttcaggaacagcacgggctcgctcaacaccgcgctgcgcatctccctgacgtggtccgcgtagttcctccccacgcagacgatgttctttccccactcccagaagcgggacaatggcctggatgctgccatgattcccatcaagtgcccctgtagtcacgtgggctgggccggtcagctgatgcctacggcatcccggagaggaccaactgcctcggaacgctgtcccccgcagcgacggcccgttccacctcgcgatctgccgggtacccgggcggcgtggcgctcggcctccagggatccactgtgcggtgccaaaaaagaggcggaggctcgcggcacagctctcccggcgcagctctcgggccgccgccgc

SEQ ID NO: 15021 - DNA, 2300 bp, Homo sapien
ttgaacttttgggcttaagcagtcattctgcttcatcctcctaagtagctgggactgaaataactatttagatctgaattatgacttaggttgaaacaacagtaagagagaaaaggagaacctaaggtaatacctggatggctcaagtttacatgtttttccctccaaatacacagatcaccagggaagggagcaagggggcaacctgttaccacttcagcttgaaattcatagaagcatgttatagaatatacatctgaaagaacattttgtactatgtatttgagtatttttattatcataatcaatagttatttgattaaacaaataatcatttgtttataattgaaatgaaacttttcatgtaacacttatcaaaaggcagagaagcgattgaaactcttcatttgaaaaataaaagcattggttttcccttagatattggatcagaaaggtacactttcagcttcaccattcgggattcaccagcacattttgtaaatgcagcttcctggggcaatgaagattacatcaagtctctttctgacagctttagggttggtgactgtggtaagttggcattgattcttaaactttttccatcatagtgttattcctgtggtatgtttatggtaactatactgaaggagttgaaatgagacacagttcgtaattctcaagaactttatcagaaaaagtcaagtgttaagagtataatgcagtggggcacggtggctcatgcctgtaatcccaacactttgggaggctgaggtgggtggattgcgtgagttcaggagttcgagaccagcctgagcaacatggcaagaccccatttctacaaaaaattagctgggtgtggtggcgtgggcctgtagtaccagctactaaggaggctgaagcaggagggtggcttgagccctggaggtggaggttgcagcgagccaacatcgtacctctgcactccagcctgagtcacagagtaagaccctgtctcaaaaaaaaaaaaaaaaaaaaaaaaagactgcaatgcgaggcattcagaatgttatttgaagcatacaaatgtgatagttatatttttactaaataaccttactgtctttggtttattacatatttcaatttgcaccaacccattttattgttataattggttatctttctatagacatataatacagccactgaatatattttgataaaagttgacatttgaccactgaatagattttgataaaaactgatatttaaattgttaatgggattttaaggaactttacttttagttgaaataccaaatcttttacatctactcaccccagtatctctttgacagaacagcctcatatagtaggaagaacaggagactttgaaaacacagaggtctagattcaaatcccagttccaacattgacttacatcatggctttgagaaaatttcttaatcttgttgggtctcaactatgaaataatacctcattaggttcttgtaaatattaaatgagatggtgtacctagtataacgtgtggaacttagtcactcaacagataacttttatgagccctagcctcataaaaggaacaagaaagcatgtatactagttcttcacgatagaaaaagagaaaagagtaatgcaggtaatgaaaacactcctctttaatactgtggtctcaagcagctgactccccataccggttatttagaacctaatcatatattgccttgtattgttaactttcaggacaatgtatggtatctctctagttgaataatagggtcattgaacatatggactatgaaggcagaaagcttcacaaacttcatagggcccagtatagctatagacatcccttgaataaatgctggaatattagttacatatggagataaagatttcaattttgacatctcagtatcaaaatatgttatatgttgatgatggagaagatgaatgaggtgaggaatttttaaagcctagagtcgatgatgatcataaattaaacaggatgttatttaggatgttagtgtttatcttgttactgttttgtaatatcatcatactttgccctctgttttagtgataattgaaaatcctctgatccaaagaaaggaaatagaaagagaagaaaaattcagccctgcaactcctaggtaagcatctgtctagcacagagattgtgcgagaatgatcattactaataatgttgtatcagattagcagagatcttactaaaagtgttctgtttctatttcaataaaaatgaggagtttaattttctcttacaaaattcatctttga

SEQ ID NO: 15022 - DNA, 2300 bp, Homo sapien
accgtggggactcctgagaccgtggggatggctgagaccgtgggggctcctgagaccgtggggactgctgagaccgtggggactcctgagaccgtggggatggctgagaccgtgggggctcctgagaccgtggggactgctgagaccgtggggacggctgagaccgtggggactcctgagaccctggggacggctgagaccatggggacggctgagaccgtggggactcctgagaccctggggacagctgagaccatggggatgctgagaccgtggggactcctgagaccgtgaggactcctgagaccgtggggactgctgagactgtggggtggatgctgcagggtgggaccccagcccccaccccgagccagcccgttgggaacaataccgtttcaagctagaccagaagaagaatttcctgtgacccagcataagccagcatgctctcctcgcattgtgcccgctgcctgcccacggggctcctgcagaggcttgcccagatgagcaggtgcagcccgcatgtctggagccggggctgggggactggtcagtggtcttcaccccgtcagccccgtgtggccccctctggccagggctgctgctgggtaggagctccggaatgtctgtgggtcgtggaggccttcggccccttgaggcagcccggctgctgggacttgtccagatgccatcagggctggaacggctcattaacgcagcagagcccaggacaggggccgcaagcccttggctgggaagaggctgggcctctgccgggagcctgtgccgtgcctgcctggcgccagccctgtggccaggaaggctggggcagaggtggagagaggacccgggtctcataccacctttgccttcggatggggcaagttgctcgccctctctgagcccggctcgcctcccctgccttccctgcaggctgctgctgggcgttggggatgtgaagttcccgcagtgtctagcggcccccgcaggtcccacccgagaggcccctgaatctcacgcccctcagaggcagcccctgggggaggtcctgggctccttctcttccccagcacaggggtccctgagtcctttgtactccagtggggtccactttgccagcttccgaaatgcatcactgatgtctctgggcagtgccaggtggaccaaggctgggcagatggggtgacttagtagacagagtatgtctcaggcctgaattcagttcaccactgggcccctgggagggaaacctattttctctgagcctgtcccctccattctaaaacagtaaccagaggtgacttgacctctcagcggccaggctgtgacccgatgtgtgactgtcagctgggagtgcaggacgcacgccattcccggccgcagactccccccacacgttctgggatccctctctgcacactagggtgctgtcccggcctctttctcccttggcaggccgagtgcccggatcgacgcttttcctgggtccccttggcctggcgatgaggctcccgctcctgcaggccaaggcttggcctatgcacctgccgcgcacgtcccggagtggggtggggggggaaggggatcggtcttcaaacagagggtcccgaggcccgcgcgccgccctgtccctgccctgcgtcccgaacggccaccgccgccgcatcctccccgcgcagaggtgaagatgccggagtcaagcgagccagggcctgggatctcggagcaggagcgtcctggtggtcccggcagctcgagtcgcgcccgggtggtggcggctgccggcgggtccagcccaggcagtggcctcggaggcggagtgggcgggggagggggaggggggagggcgtccagaccccgcccccggtcccgccccgcgcccgctcccaggctgcgggaccgccgggcgcagagcacaagccgggcacccacggactgagcggcgcgcgggccgagatgcgcgcccgcctgctgcccccgctcccgggcctggagcggcgcgaccccatggcaggtagcggcggcctgggcggcggggccgggggcggccagggcgcaggggccgggcaaggggccgctctgcgggcgtcccgcgcgccgatgctgctcgtggccctggtgctcggcgcctactgcctctgcgccctccccggccgctgcccgccggccgcccgcgcccccgcgccggcccccgcgccctccgagccgtccagctccgtccaccgcccgggagcacccggcctgcctttggccagcggtcccggccgccggcgcttcccgcaagcgctcatcgttggcgt

SEQ ID NO: 15023 - DNA, 2300 bp, Homo sapien
gcaggagagactcttttttttttatttattttattttttgagatggagtctcgctctgtcacccaggctggagtgctgtgccgtgatcttggctcactgccacctccacctcctgggttcaagcaattctccagattcagcctacccagtcgttggtactacaggcacgtgccaccacgccaggctaattttctgtatttttagtagggatggggtttcatcgtattagccaggatggtctctatctcctgacctcatgatccgaccgcctcggcctcccaaagtgctgggattacagacatgagccaccgtgcccggcctgcaggagagactcttaagggtctatccctgggcactgattctttagaagagaaggtgggggaggaagcagccttaggggggcagtagggccggccctgagtgatctagagcctggctgggggagggcgtgtttctggccagagtgactaaggctcctcctgcaccaccctctcaaccagggcccccaaaagaagcatctggagaaggaaacgccggagacctcgggagacttgtaggctgtgtggggtggatgaaccctgaagcgcaccgcactgtctgccccaatgtctaacaaaggccggaggcgactcttcctgcgaggtctcagagcgctgtgtaaccgcccaaggggttcaccttgcctgctgcctagacaaagccgattcattaagacaggggaattgcaatagagaaagagtaattcacacagagctggctgtgcgggagaccggagttttatgttttattattactcaaatcgatctctttgagcatttgcggagcagaggttttttttttttttttttttgagagagtcttgatcttgtcgcccaggctgctggagtgccggggagcagagtttttaaggataacttggcgggtggggagagccagtgagccaggagagccgattggtcagggaggaaatcacagggagtcagctgtcttcttgcgctgagtcagctcctgggtggtggccacaagatcagatgagccagtttatcaatctggttggtgccagcagatccatcaagttgcagggtcggcaaaatatctcaagcactgatcttaggggcagcttagggagggtcagaatcttgtagcctccagatgcacgactcctaaaccataattcccaatattgtggctaatgttagtcctaaaaatgcaatctagtccccaggcaaggaggtggtctgctttgggaaagggctgttactgtctttgttttaaactataaactggctgggcgcggtggctcacgcctgtaatcccagcactttgggaggccaagatgggcggatcacctgaggtcgggagttcaagaccagcctggccaacatcgagaaacctcgtctctattaaaaatacaaaattagctgggcgtggtggcgcatgattgtaatcccatctactcgggaggctgaggcaggagaattgcttgaaccagcgagttggaggttgcagtgagctgagatcgcgctactgcactccagcctggaaacagagtaagactccgtctcaaaagaaagaaagaaagaaagaaaaaaacaaaaaactataaactgagtttctcccaaagttatttcaacctaccagcagggatgaataaggacagcttggaggttagaagcaagatagagtcggctgagttagatctctttcactgtttcagtcatcattttgcaaaggcggtttcacctgggcgcggaaaggctgcatgacctccggcagctccgggcttagtaccagggactggactggggggacacgaccctacggattcgcgccgtcgcccacctggccaggccccatgtgcgcccctagccaccagggcgcgaggggcggcaggggcggggccttggggaagcggcctaggggtggtccctgggagtttccatgggcggggcctgctggggagatgcgattggactggcaccggggggcggggccttggggaagtggcccaggagtggtcccaaggagtcaacgtgggcggggccagctgggaagatcgtattggaccagccctgaggaggggcggggcctcccggaggcggaagccgggattcgccctccggggagcgattggtcctcgggaggggcggggaggtggacgcgggtaccggcggtcgtcgggtcggcagcctttggtcagttggcagcggcaagcgcgctgcggttccggtggcgccatgtcgttctgcagcttcttcgggggcgaggttttccagaatcactttgaacctggttggtcc

SEQ ID NO: 15024 - DNA, 2300 bp, Homo sapien
actttgggaggccgaggcgggtggatcacctgaggtcaggagtttaagaccagcctggccaacatggcaaaaccccatctctactaaaaatacaaaaatcagctgggcatggtggcacacacctgtaatcccagttactagtggggctgaggcaggaggatagcttgaacccaggaagcagaggttacagtgagccgagattgtgccactgaactccagcctgggcaacagaatgagactccatctcaaaacaaaaacaaaaaaaacaaaactttacaaccatagaatctttgaattgaaaaagattttgaggggcgcagtggctcacatctgtaatcctagcactctaggaggccaaggcaggcagattgcttgagctcaggagttcgagaccagcctgggcaacataatgagatccccatctctataaacaatacaaaaattagtgaggcatggtggtaagtgcctgtggtctcagctactcagggggatgaaggcaggaggattgcttgaacccaggagactgaggctgcagtgagctattactgtgccactacattttagcctgggcaccagagagaaaccctgtctcaaaaaaaaaaaaaaaaaaagaaaaaaaaataagatttcaaccccctcttcattcaaaacttaaattcaaaatttaaatttggccaggtgctgtggcttatacctgtaatctcagcactttgagaggctgaggcaggagaatcacttgaggccaggagtttcagaccagcctaggcaacatggtgagacgcccgcctctacaacaagacacatttaaaaattaggtcctgctgaggcagaaggaccacttaagcccaaaaggttgaggctgcaagtgaggtatgatcacaccgctgcattccagcctgagccatggaatgagacattgtctctttaaataaggccaggcgcggtggctcatgcctgtaatcccagcactttgggaggctgaggtaggcagatcacaaggtcaggagatcgagaacatcctggctaacacagtgaaacctcgtctctaccaaaaatacaaaaaggtagccgggtgtggtggcaggcgcctgtagtcccagctacttgggaggctgaggcaggagaatggtgtgaacccgggagggggagcttgcagtgagccgagatcacgcctctgcactccagcctgggcaacagagcgactccatctcaaaaaaataaaaaagataaattcataaaagtatttcaatgattgtgaatgacaggagtcagatcttgattttttttttttttttgagacggagtcttaccctattgcccaggctggagtgcagcggcgcgatctcgcctcactgcaacctgcaacctctgcctcccaggttcaagtgattctcctgcctcagcctcccaagtagctggaattaacaggcccacaccaccacgcccggctaatttttatatttttagtagagatggggtttcaccatgttggccaggctggctttttttttgtttttaagacagtgtctcgctcagtcacgcaggctggagtgcagtcaaggttcactgcggcctgacatcctgggctcaagtgatcctcctgcctcagcctcccaaagtgctgggattacaggcatgagccactgcactcagccagggatctcaatctggaagcacagctctggtgatcctcaaggtgcagtcagccctccccctcgtctgccctgtccccagccctgctccccgctgtttatccagctgtctcccagccctcaggacaggaaccccctctgcctccaagtcggcaaactgctccagacccctcctcttggccgctgcctgggagaaggcccccaccggctaccttggcccccaccttgcctggccagtcctgtcctgggagggtcatgacccagccccagggccatcgaggaaaggagtgccagccctggctccgggtgccccactcaggctgtctatctgatgcccccaacactgccccgcccctgcctgctcctggcaccggagaccctgctgactgtgccaggggctaatctgggaactggcagctgtgagtcctggccctgccactcgacctctggcggctagcggcgaggccccttcctgaccttcagggatcggccaccatggttggtgggaccagggtgagggtgggctggggttggagctggaactctgggggggtgggacagctgggcttctggatgctccctcagagggacagtctcccagcctgtgaggggatgggaggctggagggggaaacaaggggacgagggc

SEQ ID NO: 15025 - DNA, 2300 bp, Homo sapien
taaaggcggggtgtccggagtttgctcgttctgatgttccgatgtgttcggagtttcttccttctggtaggttcgcgctctcgctagctcaggaatgaagctacagaccttcgcggtgttacagctcttaaggcgccgcgcgtctggagttgttcatcctgccagtgggctcgtaatctcactggcttcaggagtgaagctgcaaatcttcgcggttgagtgttacagctcataaaggcactgtgaccccaaagagtgagcagcagcaagacttactggaaagagagaaagaacaaagcttccacactgtggaaggggacctgagtgagttaccactgctggctcccgcagcctgcttttattctcttatctggccccacccacatcctgctgattggtagagtccagtggtctgttttgacagggcgctgattggtgcgtttacaatccctgagctagacacaaagcttctccacatcctcaccagattagctagatacagagtgtccacacaaaggttctccaagtccccaccagagtagctagatacaaagtgtcgattggtgcattcacaaaccctgagctagacacagagtgctgattggtgtgtttacaaaccttgtgctagatacagagtgccgattggtgtatttacaatccctgagctagacataaaggttctccacgtctccaccagactcaggagcccagctggcttcacccggtggatcccgcacgggggctgcaggtggagctgcctgccagtcccgcgccgtacgcccgcactcctcagcccttgggtggttgatgggattgggcgccctggagcagggggcggcgctcgtcggggaggttcgggccgcacaggagcccacggagtgggggaggctcaggcatggcgggctgtaggtcccgagccctgccccgcggggaggcagctaaggcctggcgagagaaatcgagcgcagcgccggtgggccggcctgctgggggacccagcacaccctccgcagccgctggcccgggtgctaagcccctcattgcccagggccggcagggccggccaggctctccgagtgcggggcccgccgagcccacacccacctggaattcgcgctggcccgcaaagcaccgcgcgcagccccggttcccgcctgcgcctctccctccacacctccccgcaagctgagggagcccgctctggccttggccagcccagaaaggggctcctcaagtgccgccaaagtgggagcccaggcagaggaggcgccgagagcgagcgagggctctgaggactgccagcacgctgtcacctctcactgtttgtctgtagggttgatggttctgtgtcgctggcctcaacctcaggacaggacatgaccagtgtcccccctggatagcagccaggggccgtgccaggtgtggagactgaagatgtggccagcaggaccctgctcagtggagctgcctagaagcaccagagtgccccagggccaggatggaaccatcaaagccggccagagggccctgtgcccagggtaggtgccttctccctatgagccgcctaagggcaagccctgcctcctggtctgctccctgccctcccccagacaggctcccaagttaactggcaccagccagtccatgaggggcccttgtagagagcggggcccagagaagtctgtagggactaggcaatccaggaaagcttcctggaggagtagggtgtttggaatcgcgtgctatttgttcactttgtcgtgtgcgctctaacggcctgtgttctccatcacagtttatcttattccctgctgcactcagcacagtgcctggcgcgcagtgggaaccgaatgaccccctcctattccttatgtcagttgccttttgtctgtttctttcatcgtaagcaggaatctgtccggttcgcggctgcttcccaggcgcccagaccagcgaccagcaccgcgtaggcgctcggcacagaccgagaacggaggccccacgcgggggcgccctgcggcgaggcgggtcccggccgcgcccggcggagccggggaactacaagtcccatggtgcatcgcggcgccagcgcgcagacgcagccgccctcggcgtcctctgtagcgggcgacctaggccgcgggacccggacggaggtagaggccagggcagcgcgtccgggagcggagtccgcgcccgccgccgccatgccggacagctgggacaaggatgtgtaccctgagcccccgcgccgcacgccggtgcagcccaatcccatcgtctacatgatgaaagcgttc

SEQ ID NO: 15026 - DNA, 2300 bp, Homo sapien
gatcccttactctcccctgcaccccgggatgccccgcttcttcccaggactcttccctccctgccgcacccagcgcccactgccccaggaccccgcactgctctccgccccccgccgccccgggcacccctccactgcaccgctggcctcaggcctctctcaaatgtctctctgccggatgaccaagtgtcggggtgatggccgagatgcccaaattcagcatctctggaacgaaccgggaaaatgcccagttcagtttttgttgtttttttttttcctgagacagtctcactctgttgcccaggctggagtgcagtggcgcgatctcggctcactgcaacctctgccccaccccgggttcaagcgattctcctgcctcagcctccccagtactaggattacaggcgcaccaccaccacgcccagctaatttttatatttttagtagacacggggtttcaccatgttggccaggctggtctcgaactcctgacctcaggtgatcctcccaccttggcccccaggtgctgggattacaggcctgagccaccgtgtccagcctggttcagttctttttgaacacttggggtgcatagcatgctctggtggttcttccgtaagagggtgaagtctccaaatcaaacccccaaagatctggaaaccgtgcaacagcggacccagctccctctcttttgtagcagttgtagagcatgtctgtcctatgtgtctggatgttcgagctctccttttagctcgttcatttcccagtgaggaagctgaggccgtaaggtggtaagttctgcttgctggaggctccctgttggagcctctttgcgcacccagcagggtccctgtgcagctgggggaggtgcactggcagagctgcgtcccagtccttgccatctgtgagaagcagctgcctgtaggcttgtgtgggggacagagtaaggtaatgcatgtggaactctgaggatgatgcctggtactcgggagctctccatcagctgtagcctaggccttcacaggcctgcctggctggccacatcccttagagagacgaattgctgttttctaaacgctggaacactcaggaagttctcctctctcccctccaaagggcttatgagaaataagaaagctaaaagcctgtccaaaccgatgaggcatttgagtctgtggctttgtctttgcagaatttatagagcggcagcacgcaaagaacaggtattactactaccaccggcagtaccgccgcgtgccagacatcactgagtgcaaggaggaggacatcatgtgcatgtatgaagccgaaatgcagtggaagagggactagtacgtgagccatgctgggagtgtggagatctgcaccgtgtgctgctgggacactagtccctgggatgccacagggtggcatgcccagattttaggggtgacatgggaggagccagaccccagggctcttgctttcaattgttctcacagggtacaggaaaaggattccttgtgattagcctctcttgctccttttctccaccagcaaagtcgaccaagaaattatcaacattatgcaggatcggctcaaagcctgtcagcagagggaaggacagaactaccagcagaactgtatcaaggaagtggagcagttcacccaggtggccaaggcctaccaggaccgctgtgcgtgccccacccacccccaaccccccaccatcctcctgaggcctgggggccagaaccattgcaaatcttccctcccctcccttgtgctcacttgactttgccccctttgcatgtagcagaggcctcggttcccagcttgtttccattgcttccccagatcaggacctgggggcctacagttctgccaggaagtgcctggccaaacagaggcagaggatgctgcaagagagaaaagctgcaaaagaggccgccgctgccacctcctgaggcagctgtgggtgcccctgctgtgtggctctgtatgactgttgctgaaatataaagccctgcaacctgcctgtgtgtctggtgtgatctattggccccacgccccagattcaaaccaccactaaccatgcaggacacgggaaaaaaacagtaacacgcttaattcactttatttttcttgtataaaaaccctatgttgtagccacagctggagcctgagtccgctgcacggagactctggtgtgggtcttgacgaggtggtcagtgaactcctgatagggagacttggtgaatacagtctccttccagaggtcgggggtcaggtagctgtaggtcttagaaatggcatcaaag

SEQ ID NO: 15027 - DNA, 2300 bp, Homo sapien
tcctgggcgggagcccttgtctgggtctcgcggggggctgccagatgcgtaggccacactgactagttccttcttgtcgcttttcccagcaaatggcggatgacgccggtgcagcgggggggcccgggggccctggtggccctgggatggggaaccgcggtggcttccgcggaggtttcggcagtggcatccggggccggggtcgcggccgtggacggggccggggccgaggccgcggagctcgcggaggcaaggccgaggataaggaggtaggtatcagccacgctcggggtcgggcccctgggcggcgccggagagcggtcctggtcactggcgccttttctccctttagtggatgcccgtcaccaagttgggccgcttggtcaaggacatgaagatcaagtccctggaggagatctatctcttctccctgcctattaaggtacgcgtcggtcgttggggcgttgagcaagtgcgaccccggagtcatttgggctggggttggaggattagcatctgccattgactcgcattaaagggcccagcgtctcgcgtgagaggttgaggttgtgttgcgggctggctgaggagaggattccacttagaggttggatggatacctgagcgaagccagagccacaaaaggcatttcagcgcatcttcccacattcgcagcgaattcatttcgaaagaactgaaagagaagcagcgcttggttcatgccatccgagaggatgatgaagttcaggttgtgggaggacactgtaagggttagcaaactgtcatagtccgcgtgtacgggacagctgtcatctgcatccagcgggtgcagtggggaaaggctaatggcatatttgtcatgtgagcgttcgccctagcaaggtacggtggtcatggctaggccaaagctggacaaagcaaaaggaaatctgagtggaaagccacatctcaccaaacaagagaaaaagggcaaataggaagaaacgattgagatgcagaaatagggtaaccttacatacaagcttccaaaaacgaaacgaaggggacagatcggggggaagccaggtgagggggttcatgacttcttcggttttttttgggcggggtgggcggttacacagtttcgccctatcgcctaggctggcgtgatctcggctcactgcaacctccacctcccaggttcaagcgattctcctgcctcagcctcctgaatagctggggttacaggcgcactccaccatgcccggctaattttttgtgtctttaatagaggtggggtttcaccatgtggccaggctggtatcggactcctgaccttgtgatccgcccacctcagtctcccaaagtgctgggattacaggcttgagccaccgcccccggccgtgactttggttcttgaatatcataatggtattaagtttttttttaatgctctccctacaattttcttgtttgtttcaggaatcagagatcattgatttcttcctgggggcctctctcaaggatgaggttttgaagattatgccagtgcagaagcagacccgtgccggccagcgcaccaggttcaaggtacccggctgtcctggagggggctgcgctgggcttgccgggactctctcggctctgcatagttgcacttggcttcacccgtgtgactttcgtaacggggagagagagaaaagatctcctcaggacctcggatgggccttactgtggcctctctttccttgaggggtgcaacaggccctgggcggtgggcagtgattgggtgtagggccaccagctgcctcacacacatcttttcgcaggcatttgttgctatcggggactacaatggccacgtcggtctgggtgttaagtgctccaaggaggtggccaccgccatccgtggggccatcatcctggccaagctctccatcgtccccgtgcgcagaggctactgggggaacaagatcggcaagccccacactgtcccttgcaaggtaggctggtggcaggtgatgggcctgccgtggggcaggctccctcgggcccccgtctcctgactccttccctcaccaggtgacaggccgctgcggctctgtgctggtacgcctcatccctgcacccaggggcactggcatcgtctccgcacctgtgcctaagaagctgctcatgatggctggtatcgatgactgctacacctcagcccggggctgcactgccaccctgggcaacttcggtaggtggtccacacatggggcatagccatggtctctcagctccgcttaaccacacgggtccagtgtgtgcttggcgtg

SEQ ID NO: 15028 - DNA, 2300 bp, Homo sapien
atagcaacaaatgcctgcgaaaagatgtgtgtgaggcagctggtggccctacacccaatcactgcccaccgcccagggcctgttgcacccctcaaggaaagagaggccacagtaaggcccatccgaggtcctgaggagatcttttctctctctccccgttacgaaagtcacacgggtgaagccaagtgcaactatgcagagccgagagagtcccggcaagcccagcgcagccccctccaggacagccgggtaccttgaacctggtgcgctggccggcacgggtctgcttctgcactggcataatcttcaaaacctcatccttgagagaggcccccaggaagaaatcaatgatctctgattcctgaaacaaacaagaaaattgtagggagagcattaaaaaaaaacttaataccattatgatattcaagaaccaaagtcacggccgggggcggtggctcaagcctgtaatcccagcactttgggagactgaggtgggcggatcacaaggtcaggagtccgataccagcctggccacatggtgaaaccccacctctattaaagacacaaaaaattagccgggcatggtggagtgcgcctgtaaccccagctattcaggaggctgaggcaggagaatcgcttgaacctgggaggtggaggttgcagtgagccgagatcacgccagcctaggcgatagggcgaaactgtgtaaccgcccaccccgcccaaaaaaaaccgaagaagtcatgaaccccctcacctggcttccccccgatctgtccccttcgtttcgtttttggaagcttgtatgtaaggttaccctatttctgcatctcaatcgtttcttcctatttgccctttttctcttgtttggtgagatgtggctttccactcagatttccttttgctttgtccagctttggcctagccatgaccaccgtaccttgctagggcgaacgctcacatgacaaatatgccattagcctttccccactgcacccgctggatgcagatgacagctgtcccgtacacgcggactatgacagtttgctaacccttacagtgtcctcccacaacctgaacttcatcatcctctcggatggcatgaaccaagcgctgcttctctttcagttctttcgaaatgaattcgctgcgaatgtgggaagatgcgctgaaatgccttttgtggctctggcttcgctcaggtatccatccaacctctaagtggaatcctctcctcagccagcccgcaacacaacctcaacctctcacgcgagacgctgggccctttaatgcgagtcaatggcagatgctaatcctccaaccccagcccaaatgactccggggtcgcacttgctcaacgccccaacgaccgacgcgtaccttaataggcagggagaagagatagatctcctccagggacttgatcttcatgtccttgaccaagcggcccaacttggtgacgggcatccactaaagggagaaaaggcgccagtgaccaggaccgctctccggcgccgcccaggggcccgaccccgagcgtggctgatacctacctccttatcctcggccttgcctccgcgagctccgcggcctcggccccggccccgtccacggccgcgaccccggccccggatgccactgccgaaacctccgcggaagccaccgcggttccccatcccagggccaccagggcccccgggcccccccgctgcaccggcgtcatccgccatttgctgggaaaagcgacaagaaggaactagtcagtgtggcctacgcatctggcagccccccgcgagacccagacaagggctcccgcccaggagcgcggactcgggagcctagacccgacccgatgtccgcggattcccgccgcccacgcagaggcccgctgcagcgaccaacaggactcacgtgttttgtcggaaaagaagaacgagacctactgggaagcagcttttatagcacgccaagcgccgcgagatctccgcagccccgccccaagcgggagcgggccgagctcctataagacaacctgtgattggctccgcggtgccccgccctcaccgggctctgagtgctcttgcccgtccggccccagccgcggcccgggaatctacgtcacccgaaaagcgactataaacgccggcgcctccgtccccagccgcggctcgggaatccacccgaagagtggctataaacgtccgcgcctccattgcgctctcctcttcacttaggtaggtcctgccgcgttgaccactggcgtctcgctggtggtcttcgagaccggcgttggttgaaaa

SEQ ID NO: 15029 - DNA, 2300 bp, Homo sapien
gcacacatctcagggctggaagcaagagggccccaggctcaccatgatctgcgtctagacagcagctccacaggcccccagagctcaggagcctgcatttcacagtgggtgtgggctgacatcacaatagcattgtccagctcaagccagtcacaaccctggttcaggacccagagaccccgtacagcccagcccttgcccccttctctgaaggatcacaggtagccaggcgcggtggctcacacctgtaatcccagcagtttgggaggccaaggcaggaggatcacttgagcccaggagaccagcctgggcaactcagtgagaccccacctcttaaaaaaaaaaaaagccatacggctagctgcagtggctcatgcctgtaagcctaacactttgggaggccgaggcaggcagatcacttaaggtcaggagttcgaaccagcctggccaacatggtgaaaccccatcgctactaaaaatacaagaaaattagccaagtgtggtggcagttgcttgtagtcccagctacttgggaggctgaggcagaattgcttgaacccgggaggcggaagttgtagtaagctgagatggtgtcactgcactccagcctgggtgacagcgagactccgtctcaaaaaaataaataaaataaaataaaaataaaagagagcagctcttgacctgagataggtctatgaagcgcctggggcttgagagtggctgacagcgtttccccagaagcactgggtcagaaccaagcttcatggagctgtctcccccaggccagggcttcagtgggatcacagggattgccaccctcttctctccaatactgcggcccaggtggctggagatcctaaggcttaggggttttaggcattgactcactgggggtcttcacttaggatctgatactcaggtgctagctccacggcagtgacaactaaactcccgggtaacctgccgccccagagcagggggcccagcctcccaaaccaggtgtctgatccactccagcctagcaccacgggggcgctgagttcatctaggcctagttggtcaaatcctttagaatctcacctggtctcacaaggaagccactggaagcctctgagcttcccatccttgctagtgctctgctggctccacctggagccctttggaccaaggcattttacctgccagtgtagttcacttgagatgcgcatggccacaagactgttcgtagtctggctcctccacttaagaggcgtcggaccttacacatcacctgccaacctcccatatcctacccttgtgtccaaagccaggaaagaagaggaggcatctcgctagggttctccccgccacagcgtgaacatatgcacttgccgccaggctgataggcgagtcggggccccaagaacacccgcatgcagtgagttagacaaaacagctttatttgaaagacgtgggacagccaagttcccccaaccccgcggtcctggcgacgtcggtgtcaggcgtgggaggaccagtgtcctgcggagaaagaacaaggttaggggtctgcagtcggggtcaggagtcaggggccagacctcgcgagcgaccgcacccgggggggaggcggcagcgcctgtcggggcctgggtttcaccgccgcacatggggcagcgcgcggtgagctgaggcccccgggggctctgggcgccgaatctcacccgcggccacggccaaagccgggggcgattttcaaccaacgccggtctcgaagaccaccagcgagacgccagtggtcaacgcggcaggacctacctaagtgaagaggagagcgcaatggaggcgcggacgtttatagccactcttcgggtggattcccgagccgcggctggggacggaggcgccggcgtttatagtcgcttttcgggtgacgtagattcccgggccgcggctggggccggacgggcaagagcactcagagcccggtgagggcggggcaccgcggagccaatcacaggttgtcttataggagctcggcccgctcccgcttggggcggggctgcggagatctcgcggcgcttggcgtgctataaaagctgcttcccagtaggtctcgttcttcttttccgacaaaacacgtgagtcctgttggtcgctgcagcgggcctctgcgtgggcggcgggaatccgcggacatcgggtcgggtctaggctcccgagtccgcgctcctgggcgggagcccttgtctgggtctcgcggggggctgccagatgcgtaggccacactgactagttccttcttgtcgcttttcccagca

SEQ ID NO: 15030 - DNA, 2300 bp, Homo sapien
cgagaccggcgttggttgaaaatcgcccccggctttggccgtggccgcgggtgagattcggcgcccagagcccccgggggcctcagctcaccgcgcgctgccccatgtgcggcggtgaaacccaggccccgacaggcgctgccgcctcccccccgggtgcggtcgctcgcgaggtctggcccctgactcctgaccccgactgcagacccctaaccttgttctttctccgcaggacactggtcctcccacgcctgacaccgacgtcgccaggaccgcggggttgggggaacttggctgtcccacgtctttcaaataaagctgttttgtctaactcactgcatgcgggtgttcttggggccccgactcgcctatcagcctggcggcaagtgcatatgttcacgctgtggcggggagaaccctagcgagatgcctcctcttctttcctggctttggacacaagggtaggatatgggaggttggcaggtgatgtgtaaggtccgacgcctcttaagtggaggagccagactacgaacagtcttgtggccatgcgcatctcaagtgaactacactggcaggtaaaatgccttggtccaaagggctccaggtggagccagcagagcactagcaaggatgggaagctcagaggcttccagtggcttccttgtgagaccaggtgagattctaaaggatttgaccaactaggcctagatgaactcagcgcccccgtggtgctaggctggagtggatcagacacctggtttgggaggctgggccccctgctctggggcggcaggttacccgggagtttagttgtcactgccgtggagctagcacctgagtatcagatcctaagtgaagacccccagtgagtcaatgcctaaaacccctaagccttaggatctccagccacctgggccgcagtattggagagaagagggtggcaatccctgtgatcccactgaagccctggcctgggggagacagctccatgaagcttggttctgacccagtgcttctggggaaacgctgtcagccactctcaagccccaggcgcttcatagacctatctcaggtcaagagctgctctcttttatttttattttattttatttatttttttgagacggagtctcgctgtcacccaggctggagtgcagtgacaccatctcagcttactacaacttccgcctcccgggttcaagcaattctgcctcagcctcccaagtagctgggactacaagcaactgccaccacacttggctaattttcttgtatttttagtagcgatggggtttcaccatgttggccaggctggttcgaactcctgaccttaagtgatctgcctgcctcggcctcccaaagtgttaggcttacaggcatgagccactgcagctagccgtatggctttttttttttttaagaggtggggtctcactgagttgcccaggctggtctcctgggctcaagtgatcctcctgccttggcctcccaaactgctgggattacaggtgtgagccaccgcgcctggctacctgtgatccttcagagaagggggcaagggctgggctgtacggggtctctgggtcctgaaccagggttgtgactggcttgagctggacaatgctattgtgatgtcagcccacacccactgtgaaatgcaggctcctgagctctgggggcctgtggagctgctgtctagacgcagatcatggtgagcctggggccctcttgcttccagccctgagatgtgtgcccaactccagaaacctgcccagttgtccagggatcgaccccactccactcggaaagggtgggcaatgggttgcagacccccatatggtacaaggaaaccttctggaaggctctggctaggtctaattccaggctaaggcccccgtctccagccagagattagtagtcctggggtggggggccctaacccccacagctgccccctcaaagtgggcgctgagccaacccctttacttgaagttctgtggcccacctccctgccaaaagcttgctgggctctcttgctcggtatgtggaccagggactggatcactgtcccagccaggtgctgacacctggcctttgcagggtggcgggtatgatctcaacctcttcgccagccctcctgacagcaacttcgtgtgctccgtctgccatggggttctcaagaggccagcaaggttgccatgcagccacatcttctgcaaaaagtgcatcctccggtggctagccaggtgccagcgggtacccaaggggctgggagggcaggagtgagactgggggccatt

SEQ ID NO: 15031 - DNA, 2300 bp, Homo sapien
aataaataaggggaatacaagaatggctactccatagacagaatacctttttcttcttttttgagactgggtcttgctctggcacccaggctggagtgcagtcacgtgattacggctcactgcagcctcaacctccctgggctcaagcaatcctcccacctcagcctcctgagtagctgggactacaggcacgcaccacgactgccggctaatttttgtgtttattttagagatggggtttcactgtgttatccagactggtctcaaacttctgggctcaagtgatcctcctgcctccaaagtgttgggatcacaggtgtgagccaccatgatggcctactttctttccctcaaatatctctcctctcagagattttccctgatcatacttctcagttctccttctcagttactttcgttttttcatttttttcttttctattttttgagatagggtctctgttgcccaggctggagtgcagaggcccaatcacagctcactagaaactcagcttcccaggctcaagcagccctctcacctcagcctccagagtagctgggactacaggcacaccaccacccctactaaattttctgtgtgtgtgtgtgtgtatgtggagacagggtctcgccatgatgcccagactggcccagttacttttttttttttctctgagacagtcttgctctatcgcccaggctggagtgcagtgacgttgcgatcttggctcactgcaacctccgcctccgggttcaagcgattctcctacctcagcctcccgagtagctgggattacaggcacccgccaccacaccaggctaatttttgtatttttagcagagactgggtttcaccatgctggccaggctggtctcgaactcctgacctcgtgatccaccggcctcggccacccaaagtgctaggattacaggcgtgagccatcgcgcccggcctggctgttactttctaccagcttcagagccagtagcacaaatggctcaaaaccttgaactcagagtaaaagctaactcctcgccacggcgcacaggcaactgcatgccctctgccctctgcacccactccctgcagccacccggcttgttgctactcaatgcttggcacccccagtcctaggcctgtgccctggctgttctcaacaccattcgttccacagggctccctgcttcgcgaacttgtgtctgctcaggcgtcaccttctcaatacagcctcctccttcctcccttccgctccctcccttctgtttttttttctttctttctttctttttttctgagacggagtctcacgctgtcacccaggctggagtccagtggcgcaatctcagctcactgcagcctccgcctccggggttcaagcgattctcctgcctcagcctcccaagtagctgggattacaggcatgtgccaccacgcccagctaattttttttttctgtttttagtagagacggggtttctccacgttggtcaggctggtctcgaacttccgacctcaggtgatccacccgcctcggcctcccaaagtgctgggactactggcgtgagccaacgcgcccggccctcctcctttttccatcgcgctcagcaactatcactcgtcgcccgttctgtttcttctctggtgtccgccaagtgccgattacagtgctttgcacacagaaggtgctcaatacatgaatgcctttgagattacccggtttattcatttacctacgttatttatcaagagccacactgcgagcccaggggcagggtcaggttgacggctctacgcacggaccgcacccgacagctggtacccccacatcccagaacgccgaaaagcaggagtaaacgctggctacaaatgcctttttatactggtatcaaagagccaggccaccagcgatgccacatccgccggtctacccccaccgacccgcgaagcaccctcacagctcacggccctccctccaggccggaaacgtctccgcccgcttccgcttcccgatgcagccgccactgcccgaagcaaagatggcgccaagtgcgcggcgccggcggggacgtcacagtggtcgcgcgcggtgacgccatcgcagcgcgccgggagtgtggcgttctgtgaagagttcggtgctaacctccctcacgcggcggtggctgccgggaccctagcaggtttcagctggagcggcggcggcggcaacatggcagagaccgcggccggagtgggccgcttcaagaccaagtgagcccggagctctggggccgtgcggggagggagctgggtttgcagc

SEQ ID NO: 15032 - DNA, 2300 bp, Homo sapien
ccgatgaggggaggagagggctgagcctaggtcggggctggtcccgggaggcggcgggggcgaagaaccacctctgagcagtcggcctggggacctttcatccgcgatccgtcttctccagggagcagggagaatgcaggagaggggcgggtccgcagaagcccaggaggccctgagtgctgtgccccgtcactccccaagcctttgccgaacagcagtgctggtgcccccgccctggcagcgcagcctcatgggattatcgtttccactggcggctgtggggctttggttgtgccaagcactggtaaaggaaagtcccaggctggcagcaccgtcgtgggagggtcaactgggtgcgggggctgaggggccgctttcgttttggcagtcaggcttccagaagcgcagtgagccaggccttgacatctgggaagagaagcccaggccgcgtacagggaatagggggaagataggaaacccgtcccagaggctgggacaggagcagtggggtgcactgtgggccatgagaaggaaagaaagcagaggcaagggtggcagaggctcttctgggcaaggtctgggaggtgtgtgggcagaagggaggggctaacgcagggcagtgacatcttcagttatgttctgaaaggtacctggcagcagggttaagaggtaggtaggggaggccgggcgcggtggctcacgcctgtaatcccagcgcttttggaggccgaagcgggcggatcacgaggtcaggagattgagaccacggtgaaaccccgtctctactaaaaatacaaaaaattagctgggcgcagtggcgggcacctgtagtcccagctactcggagaggctgaggcaggagaatggcgtgaacccgggaggtggagcttgcagtgagctgagatcgtgccactgcactccagcctgggctggagaccccttctcagatcgagaccccttctcaaaaaataaataagtaaaaagaggtaggtagggggtccagtgaagaggccagagtggctggccagagactgtgatgggctggaccaggtggaggcagtggagaaggaaggagaaggggcacgagtgaggtcacagaaatgacagctgctcgtgggacccgggctctgggcaagcctggggatggagagaggagtcagggaggggaagaggtatgccagacctcagggatgaagacactgggaggatgtgctctgggctggctacccaggcctggccacccaccgccggcaggggtgttcccaaggagccccctggctctcactggggaatccctggaagccctgggctgttgggctgactccacctgacacaggcccaccccctactgcctcagggatcaccagccagctgcgggtctctacttctcagtgacgacggtagctacagccccctgcagtactgctggttccaccccatgccctgtccctgctgttgcccagaaactcaagggcaggggccattggggtcacttggagaggagcacctagcacagggcggggccctggggactgagggggtgggtggtgctcattcgcctcccgctctccttccagctatgctgtggagcgcaaaattgagcctttctacaagggcggaaaagcacaggtaccagcctggggaagggcagtggggcgggcagccagaggccgcggggggtgctgaatgttgcctggctgagacctctctgtccccagctggaccagactggccagcacctcttctgcgtctgtggcaccagagtcaacattctggaagtggcctcgggggccgtgctgcggagtctggagcaggtgagggcagcctgggtgggtgaggggcaagtggagagggcagcccactcacaccgtgctcggcacaccactctttctcctaggaggaccaggaggacatcactgcctttgacctcagccctgacaacgaggtatgtggggcggggcctggaggggacccgctccagcgcctccctcccagactgagtccaggaagatgtgagcagggtattgctgcccctctgctgacctgtaccctcccccaggtgctggtgacagccagtcgggcattgctgctggctcagtgggcctggcaagagggcagcgttacccgcctgtggaaggcgatacacacggcccccgtggccaccatggccttcgaccccacctccactctgctagccacaggtagggccctgccgtgcaggtgggtcgtgggcacagatgcaggggctttgggcattccaccccctcaccttgcttccccgcaggtggctgtgatggggc

SEQ ID NO: 15033 - DNA, 2300 bp, Homo sapien
tgaaaccccgtctctactaaaaatacaaaaaattagctgggcgcagtggcgggcacctgtagtcccagctactcggagaggctgaggcaggagaatggcgtgaacccgggaggtggagcttgcagtgagctgagatcgtgccactgcactccagcctgggctggagaccccttctcagatcgagaccccttctcaaaaaataaataagtaaaaagaggtaggtagggggtccagtgaagaggccagagtggctggccagagactgtgatgggctggaccaggtggaggcagtggagaaggaaggagaaggggcacgagtgaggtcacagaaatgacagctgctcgtgggacccgggctctgggcaagcctggggatggagagaggagtcagggaggggaagaggtatgccagacctcagggatgaagacactgggaggatgtgctctgggctggctacccaggcctggccacccaccgccggcaggggtgttcccaaggagccccctggctctcactggggaatccctggaagccctgggctgttgggctgactccacctgacacaggcccaccccctactgcctcagggatcaccagccagctgcgggtctctacttctcagtgacgacggtagctacagccccctgcagtactgctggttccaccccatgccctgtccctgctgttgcccagaaactcaagggcaggggccattggggtcacttggagaggagcacctagcacagggcggggccctggggactgagggggtgggtggtgctcattcgcctcccgctctccttccagctatgctgtggagcgcaaaattgagcctttctacaagggcggaaaagcacaggtaccagcctggggaagggcagtggggcgggcagccagaggccgcggggggtgctgaatgttgcctggctgagacctctctgtccccagctggaccagactggccagcacctcttctgcgtctgtggcaccagagtcaacattctggaagtggcctcgggggccgtgctgcggagtctggagcaggtgagggcagcctgggtgggtgaggggcaagtggagagggcagcccactcacaccgtgctcggcacaccactctttctcctaggaggaccaggaggacatcactgcctttgacctcagccctgacaacgaggtatgtggggcggggcctggaggggacccgctccagcgcctccctcccagactgagtccaggaagatgtgagcagggtattgctgcccctctgctgacctgtaccctcccccaggtgctggtgacagccagtcgggcattgctgctggctcagtgggcctggcaagagggcagcgttacccgcctgtggaaggcgatacacacggcccccgtggccaccatggccttcgaccccacctccactctgctagccacaggtagggccctgccgtgcaggtgggtcgtgggcacagatgcaggggctttgggcattccaccccctcaccttgcttccccgcaggtggctgtgatggggccgtgcgcgtctgggacatcgtgcggcactacgggacacaccacttccgaggctcgcccggtgtcgtgcagtgagttggaaggtggagggggagggcagaggcaccacccaggctgcacagctcacccatcctgtcccgtccgcccacagcctagtggccttccacccggaccctacacgcctgctgctcttctcctcggccacggatgccgccatccgcgtgtggtcactgcaggaccggtcatgcctggctgtgctgactgcccactacagcgccgtcacctcactggccttcagcgccgacggccacaccatgctcaggtcagcagtgggccctggtaggagggggaggcttggaaagtgggggctgaggctaagacttgacctgaggttgccgttgctccttcagctccggccgtgacaagatatgtatcatctgggaccttcagagctgccaggccacgaggaccgtgcctgtgtttgaggtggggatgcctggaggccagggctggttgagttgggtggggagggggcatgatagcagcctgtgacccaattcgtctccagagcgtggaggctgctgtgctgttgccagaggagccagtgtcccagctgggtgtgaagtccccagggctgtactttctgacagctggcgaccaaggtgtgttgggccgggacatgggcaggcggtaggggctggggaaggcctgtggacctgagagtctcagcagccctgtccccacccacacaggcactctgcgcgtgtggga

SEQ ID NO: 15034 - DNA, 2300 bp, Homo sapien
gggctggctggggctcagctgtgtctcctcctctcctgttgggtcacaggctgaaggagtccttcctggtgacaggcagccaggactgcactgtgaagctgtggcctcttcccaaagccttgctgtccaagaacacagccccagacaacggccctatcctcctgcaggcccagaccactcagcgctgccatgataaggtgactccatagccactggggtgggggtgtggccaagcccttgctgggggaagatgggggattgctgagccaccaccttctcccattgccaggacatcaacagcgtggctattgcccccaacgacaagctgctggccacaggctcacaggaccgcacggccaagctctgggccctgccacagtgccagctgctgggtgtcttctcaggccaccggcgtggcctctggtgcgtccagttctctcccatggaccaggtgctggccacggcctcagctgatggcaccatcaagctctgggcactccaggacttcagctgtctcaaggtaagtggcgctccagaccctccccacttcccgccctggtgacatctcatgccctaccccccaccttgcagacatttgaggggcacgatgcttctgtgctgaaggtggcctttgtgagccgtggcacgcagctgctgtccaggtgagtgggctggggtggggcagcgatggagtggggggtggcggggggacctgcctgacgctgagcctctccccaccccaaacccagcggttcggatggcctcgtgaagctctggaccatcaagaacaacgagtgtgtgcggacgctggatgcccacgaggacaaggtctgggggctgcactgcagccggctggacgaccacgccctcactggggccagtgactcccgagtcatcctctggaaggttgtgggccccaagggcagggaagagtcggggtggagtggaggccccatctgaccctagtctaaccccaggatgtgaccgaggcggagcaggcagaggagcaggccaggcaagaggagcaggtggtcaggtaaggccagggcagtggcgcccctccccgcatcagccctgctctgtgctgtagggaaaacgaggctgagtgccaggctccctgcctgctgactccgatggctctgcctgcagccccagccagcggccctcagtggcctctcctcccctccccacaggcagcaagagctggacaacctgctgcatgagaagcggtacctgcgggcgctgggcctggccatctccctggatcggccccacaccgtgctgactgtcatccagggtcagtgcccaccccggggggcgaggggctgggtcttcggaccactgggctctgctttccccagctcagccttcccttctcccacagccatccggagggaccctgaggcctgcgagaagctggaagccaccatgctccgactgcggcgcgaccagaaaggttggcggccagtcagggtgggtggcccggtgggcaagggccagtcatggcagattggctgggcaagacgatgagggtcctgttgcccacagaggccctgctgcgcttctgcgtcacgtggaacaccaactcgcggcactgccacgaggcccaggccgtgctgggtgtgctcttgaggcgagaggcccccgaggagctgctggcctacgaaggcgtgcgggcagcgcttgaggccctgctgccctacactggtatgtgggcacagcctggggttgggggatcctggtgggcgtgtggaccacccccctgacctccctctgtccaaccccagagcggcactttcagcggctcagcaggaccctccaggccgccgctttcttggacttcctgtggcacaacatgaagctccctgtgccggccgccgcccccaccccctgggaaacccataaaggcgcactgccctagccggtccggcctctctccagtccatcctgaacccctggaaaacccataaaggccgctctcctggccggctctgtctctctggactgcagtccagccccccaccctggccaacaccctacctagccagccagaagggcactggagctgatggtctcggccctgccacgcccatcccgcaccctggcctggcagagatccagcccgcggctccgcacgcttagacggtgggggtcatgcagaacaagctttactcagaggaacagcaaatggccccctcccatccctgctggccagggagatccgccctccccgctcctccccagccctgggatggcgcggtccatcccctcatcgggatcctcgcgctcactgctccgtc

SEQ ID NO: 15035 - DNA, 2300 bp, Homo sapien
cgcggatcctagagcctgggatgaggggtcgggctcccggttggagcggcctctgggattcctgtgcctccttgcgttcatttatccattccgctattatttgcgcagtgaccgctctgttccaagcgctgttccaagtgctgggcagagcagggaacacaattctgttccctgaccttctctgttcataatccagtggtcaagacaggaaaaaaaaacaaggactcacactcataaatgttcacgtacaaactggtgggtccatgcaagggtgtagtaaatctggaaggcctccttgaggaggtgaccctttctgaaggatgaggaatcagctgaggagcgccttcgagaccaagcccaaggtggcagggtcttggcattttgcaggaacaaaaacgccagtgggacgctagggagggttgtaaggtgggaggggagatccagggacggacaggggcccaccaaagacttggtcggcagcttcggggattgggaatttattataacggtaggagggaagatgctagacagttttgggcaaggttacccaatctgatcccatttcagtttgctgcagattccgctggctatcatatggggagtggatttcttttttttttttgagacagggtcttgttccgttacccagggtggagtgcagtggcgcgatcttgttcactgcagccgcgactgcttaggctcaagtgatctcccacctcagcctcccaagtagactacaggcacacgccaccacgcccagctaatttttgtatttttggggggcacagatggaggtctcaacatgttgcccagactggtctcgaactcctgagctcaagcaatccccctgcctcggcctcccaaagtacttggattacaggtgaggcactgtgtctgtccttggagtggattttgtaggggcaagtgaggagcatacagatggagggtggggtgtactattcaggcaagaaaagagggtaggggaggaaaaagtggaaaccatgcagggctgatggggtgtggggcaggagctgtcagctggggtaggcaggtggcctcagaatccctctaggcctctgcttgtgaataaatcctccccagcttctcctgtcttccaggggagcaaggtctcccctgggttcacacgctggaccccaccaggtcagctgggccctcagctgagacagggagaaggtgacagctggctgggggaaccctgcaaatcagccctatgtgagcaggtgttcattgcccatgccaagaccagggacagcttgagggcatgagagagagtgctggtgggacagacacacaaaggccctttgttgcagccagggcagcttcctggagggatgccttagaggctgactgctccctgaaggggctggagtaggtgcatcccaacacagaactggtggccccagcacgaggaaaaaccactgtgtgccagggttgaatgtggcttccgaagcccgaactataaggaagcagccagagaggtggggcacctgggcgagcctctgcccaggccatgtttgcagtaagtcatggcaaatcgtgaattgagaggtggttctcaaaacagccctagtgaccacttccctgaccaccacccccacccaccaaatgccagtgactgcacagatgggccctctttctcctaccccaagtctcctcactgcaggggaacccctggggtgagcctgtgaggtctgcccctcccccagcatgtatagaacagctcacaataattacgcatttaacacacatttcctcctctatgagttggggacattaagagacctttcctccagcattaggattaagtcagacaaagcacttaaagctgtaagcactgagtccttggttctgcacagaaatccccaggccagttcaaagttgttgggcgcaccctggcagggcaattacctcacagggtaggggaatccagagaggtgggcaggacaggtggcgctttgattagccctgccttctcctccctcctcctgtggccagaggcaggcaggagggccccaggcagcagtcccgcctacccttcgccccttcttcagtcttgcacgcctccagggctggaaagctcattcttcttcttcctcccagcagctctgcctggaagtcccccaatccctgtgctcctgcccccagatcgtgggcttgggggacagcaagaaagctgcaaaggactcagctggggcggctccacaaggaccccacaggcttgaggtgttgccaggattctatcccagggggttttctgggtcccccagagccctctcaag

SEQ ID NO: 15036 - DNA, 2300 bp, Homo sapien
ctgcttccttatagttcgggcttcggaagccacattcaaccctggcacacagtggtttttcctcgtgctggggccaccagttctgtgttgggatgcacctactccagccccttcagggagcagtcagcctctaaggcatccctccaggaagctgccctggctgcaacaaagggcctttgtgtgtctgtcccaccagcactctctctcatgccctcaagctgtccctggtcttggcatgggcaatgaacacctgctcacatagggctgatttgcagggttcccccagccagctgtcaccttctccctgtctcagctgagggcccagctgacctggtggggtccagcgtgtgaacccaggggagaccttgctcccctggaagacaggagaagctggggaggatttattcacaagcagaggcctagagggattctgaggccacctgcctaccccagctgacagctcctgccccacaccccatcagccctgcatggtttccactttttcctcccctaccctcttttcttgcctgaatagtacaccccaccctccatctgtatgctcctcacttgcccctacaaaatccactccaaggacagacacagtgcctcacctgtaatccaagtactttgggaggccgaggcagggggattgcttgagctcaggagttcgagaccagtctgggcaacatgttgagacctccatctgtgccccccaaaaatacaaaaattagctgggcgtggtggcgtgtgcctgtagtctacttgggaggctgaggtgggagatcacttgagcctaagcagtcgcggctgcagtgaacaagatcgcgccactgcactccaccctgggtaacggaacaagaccctgtctcaaaaaaaaaaaagaaatccactccccatatgatagccagcggaatctgcagcaaactgaaatgggatcagattgggtaaccttgcccaaaactgtctagcatcttccctcctaccgttataataaattcccaatccccgaagctgccgaccaagtctttggtgggcccctgtccgtccctggatctcccctcccaccttacaaccctccctagcgtcccactggcgtttttgttcctgcaaaatgccaagaccctgccaccttgggcttggtctcgaaggcgctcctcagctgattcctcatccttcagaaagggtcacctcctcaaggaggccttccagatttactacacccttgcatggacccaccagtttgtacgtgaacatttatgagtgtgagtccttgtttttttttcctgtcttgaccactggattatgaacagagaaggtcagggaacagaattgtgttccctgctctgcccagcacttggaacagcgcttggaacagagcggtcactgcgcaaataatagcggaatggataaatgaacgcaaggaggcacaggaatcccagaggccgctccaaccgggagcccgacccctcatcccaggctctaggatccgcgacagccggcgaggggcgccagggagcccaaggcacgcgccaaccctctgcggccgcgccgcgccctgcgttgccagacgcccgttgccatggcgccagggaggggacaagagcccaggaccctagcgcgcgccgcaatctgtgcggtcacgcccggcccgcgttgagagagcgcttggcagccagcgggtggacgcgcccctcagcggagggcacaaagcctggccgcaggcacgcaggacactcagaacggagcgatggggacgtcgcgggccgcaacacggactttgcctgggtgtcagctcgggtccacagcgcggccgaggcgcaccttgcgccacacactgctcttttactggagaaagcgggacggccgccacggacggcgcaacccctgcgtgcgccgcggatcgacgcctgagggcgccagcagggtccgaccctcctgctccgtccccgcccctgtcctcgggcccggccagcgccgcggcctctggctccgcctccacacgggcccgcaagcaggcaccgcccccgactctgcccccagccccggctcgggcccggcccccgcgagcacggcgcgcgcctccggctcctgtggccgcgcgctggcctggaggctgacctggaggctcatctggaggccgagctgacccggcaggccttgcgcgggcaacatggcggcgcccggcgagcggggccgcttccacggcgggaacctcttcttcctgccggggggcgcgcgctccgagatgatggacgacctggcgaccgacgcgcggggccggggcgcggggcggagagacg

SEQ ID NO: 15037 - DNA, 2300 bp, Homo sapien
gcaatttctcctgcctcagcctcccgagcagctgggatcacaggcgcccaccaccaccccctgctaatttttgtatttttagtagagacagggtttcactgtgttggccaggctggtcttgaactcctgacctcatgaaccacccacctcagcttcccaaggtgctgagattacaagcgtgagccactgcgccaggccagagtctgtttttgaaggcatccaggccagtggaactctagtgcaaggaaaagttctggcttgagctggtgttccagagctgttgacacgcagaccaaaggagttagcacagagggagagacctccccaggatcgcgccctgggctcctaaggctcacaggtcacagaggaaggacccatgagggaggaggacctccaggaggggcatagtggctcacgcctgtaatcccagcactttgggaaaccaaggtgggcagatcacttgaagtcaggagttcgagaccagcctggtcaacatggcgaaaccccgtctctactaaaaatacaaaaaaaaaaaaaaaaaaaattagctgggtgcggtggcacacctggaatcccagctactccagtggctgaggtaggagaatcacttgagcccctgaggcaaagcttgcagtgagccaagattgcgccactgcactccagcctgggtaacagagtgcgactgtaactcaaaaaataaataaataactaaagaaataaatgagtcgacagcagcatcagacttgcccttgggattggcacggagaggtcagtggcaaccttgagtttaggtggcggtgggagctgattctgccgggtcagagggagagagaggagggtgttgcaggcagagtttgctgctaaaggaagcagtaacgtaaggcagctggaggggaggtggggtcaacagtgtttggcttttaggagaaagtgcagcatgtctgggtgctgatgttagtgatgaagtagagaatgaatgacacagaggggaggtctgtggccaacaggtgagaggggttgtgatcggacgcacagtgtgatggacttggaacacagtgagtagcgcctctggcaacacctgctctgcccacctgtgcccagcaaggctgaagaatgagctccaggggggctgggccacgcagcaccatctgtgcacccggctcgtgtagcagggacctgggttgcttattatctgaagtacagggtggtaacagtctccgccactacacaggtcaagcgcttggcgctgtaaatgtcagtgcagacatctcagtgctctagacagaaacctaggagtcatctgaacttccagcctgctaggaacatgaggagagggaccttgttgcacccaaggctggggtctgtggaggggactcagcgggacacagggcagccaggcaccacccccacccgactcctagtctctgatgccgctccctgccctccattccagactaggcgccgcaagtacgctggggagacccaggagtagggagggcattgggagcaccaccacctggccacgggcaaggagcggagacaccgaaaccaacactcccagcggcgctggccacggtggctctgtcccctccctcaacaggtgctcctggggccaacgcctttcttcccaccagatcctccccgccagaggctagaagctgtgatagcagctagagcacagtggggggccatgagaaagaccccagttatccatctggtcttcttgggaccagggccagggagccggtcccctctcccgtgggttgggggaagatgctgcagcccgtggacctcctacccctttactccctcacccaagtgcccttcccagaggagcggactcctcctgtctgtcctcccggctctagcaaagtctgcgcccagcacccgagccccaccctgcccccggggacctggctggtgggttcctgaggatggtctccatctcgggaccggggcaggcaggtgagggtgggggatgggaggtgggcgcggcggagggagaggagggacccggccccgcgcgcatggacccagtggggggcgcgggcgcggccccgccccgtcccgcgcgtccccgccgcggccggcgcgcgctcccgggaggcggcagcggctgcagcgttggtagcatcagcatcagcatcagcggcagcggcagcggcctcgggcggggccggccggacggacaggcggacagaaggcgccaggggcgcgcgtcccgcccgggccggccatggagggcgcctccttcggcgcgggccgcgcaggggccgccctggaccccgtgagctttgcgc

SEQ ID NO: 15038 - DNA, 2300 bp, Homo sapien
attcctgggactcctgtaagatttgccgtgaagcctccagtaccaggtccctattccatggccttccatggccacacccttccccacttctcactgctaccttttgcagttacatcccccagcttgggtttacttttgaacccatctattggggtttttatctcaattactttttcattcctaggatttttgagacagagtctcactctgtcacccagactggagtgcagtggtgagatctcagctcactgcaacctccacctgccaggctcaagtaattcttgtgtctcagcctcccaagtagctgggattacaggcatgcaccactacacctggctcattttttgtatttttagtagagatggggtttcaccatgttggccaggctggtctcgaactcttgacctcaggttatccacctgcctcagcctcccaaagtgctaggattacaggcatgagcgactgcacccaacctcattcctaggatttctaactgttttttttttcataacttcctggttgaatgaagcacagctaagaaccatctctggagccaaaatgctggctttgcccctttctagctcagtcatcctgggtaagtctctcaacctgtctgtgcctcaggttctccttctgtaaaagggccatcgtggttcctgtggcgtgggagggtgacaattactgtggtgaggggtgtggagcttgcagcagtgcttgtcacagcaactgccactcaagtgttgccccatattcctctagctcttgctccttctttaagaagtcattttttagccaggggcggtggctcatgcctgtaatcccaacactttgggaggccgaggtgggtggatcacctgaggttgggagttccagaccagcctgaccaacatggagaaaccccatctctactaaaagtacaaaaaattagccaggcatggtggcgtatgcctgtagtcccagctactcgggaggctgagacagaatcgcttgaacccgggaggcggacgttgtggtgagccgagatcacgctttcgcactccagcccgggcaagaagagcgaatctccctctcaaaacaaaagtcatttttagccgaacacagtggctcattcctgtaacctggcactttgagaggccgaggcaggaggattgttggagcccaggaggtcaaggcgagccttggcaacatagcaagaccccttctctacaaaaaatatcagctgggcatggtggcgcacacttgtagttccaactactcaggaggctgaggtgggtcacctgagcctcaggaggtcaagactgcactgagctgagatcacaccactgcactccagcctgggtgacagggccagacccggaaagagaagttctttccaataaccttaaggaaacagcccatttctcagactgctctactcttctgtggagctggtcttgcttaggaacctaccatcccctgccaagtgggcatcagctgtgaggcgcctctggtgtggggggaatgcaggtggcccctacccagcctctcatctcctagccagccccagcatggccatcacccaggggacacagttgagtcccagtgtccaagtcctcagctacaggggggcagtgccaatgccgccacatggctgacccagcccctctgcagccactgaccttggctcttcatcaccatgggagcccctttctgcttgctttagagaaatttccccactttctctgatctgaggacatattcttggccttatttgaatgtggctgtgtttagagcatttttcctacttctatgtgctggaagcagaaagtgattaccgtatgtgtctggtctccctccaaaaacaccagatccagataattacgctcaaattatttcgctgcagtatttcagatgtcccctccaccctgtttctaaatttggcttcagggtatactcagaagacagagaagctcagaacaccagctatgcgtggtattgcaaaataaatttatttgaagataaactgtcttataaaaggtcagaggcaatttgagatcccagattcagcttgtctcataaaaagattcaacttcaagtagcacaatttcttgtctgcttttaatcctgaacattcttgaagcatgaaacagccaactgtttacacaacacatctgtgacatctgactctggcaccagtggcgccgcagctttcagctctgaggccccacgggctgcagccctcagctttgggagggcccagatcaggccactgtgacctctggctttgccagcaacaacaggtcccagcatcccagcccttc

SEQ ID NO: 15039 - DNA, 2300 bp, Homo sapien
cccgggttcaagtgattctcctgcctcagcctcccgagtagctgggatgacaggtgcctgcccccacgcctggcttgtttttctatttttagtagagatggggtttcaccatgttggccaggctggtctcaaactcctgacctcaggtgatccgcccacctcagcctcccagagtgctgggattataggtgtaagccacgatgtccagcttagtggccagctcttgatgggcacggtgcctgggacgctccaggccttcacctgggaggttgaagagcaccctgcactgccagtccccagagggcctgtccccacaccctgacctgacctgggggccttgtgttcttcataggccccaaggaaacctcgacaaatggtcctgtaagccaagaagccttctcggtgacaggcccagccgccccagggtgtgtgggggtgccagggtgagagtatgggcgcccaggggtgaatggtgcatggtgggcgggtgcgggcagccacaggtgggtgccgggagggcaggtatggagccacggggcctgatagctgttgaccagctgtgcttccctgcacccagcgccctcccaccacccagcccgaagctcaaggacgaagacttccccagcctctctgcctccacttcctcctcctgctccactgcagcaaccccgggccctgtggggttggcgctgccgtacgccatccctgccagaggcaggagtgccttccaggaggaggacttccccgccctggtgtcctcggtgcccaagcctggcaccgcccccaccagccttgtctctgcctggaacagcagcagtagcagcaagaaggtagcacagcccccactctcggcgcaggctaccggcagcggccagcccaccaggaaggctgggaaggggagcaggggcggcaggaagggcggcccgcccttcacacaggaggaggaggaggacggcggcccggccctgcaggagcttctgagcacacgccccacgggctccgtctcctccacactggggctggcctccatccaaccctctaaagttgggaagaagaagaaagtgggctcggagaagccaggcaccacattgccacagcccccgcccgctacctgtcccccaggggctttgcaggccccggaagctcctgccagcagagccgaggggccagttgccgtcgtcgttaatggacacatggagggcccggcccctgctcggagtgcccccaaggaaccccctgggctcccaaggcccctggggtccttcccctgccccacgccacaggaggacttcccagcgctcggcggcccctgcccaccccggatgccgccgcccccaggtacgcgtgctggctcaggcctgctccctgggtgtcgggaggggccggggtcaggctggagccgcaggcacagtctgcatctgggtggtggggacccctgtgtgatgccatcggccacccacatgacctccagcctcccgttaaccaccctgtgttccttgcctctgtgagaccggccctcatggcgcctcccaggtctgagggtgcgtgagcttgtgtgggctgggcctgccacaccagcagcagtggtgtgggtgctggccctgcacctgccctgcagggaaggggtggctgtagacagaagctggccctggaggccaggcagcccgcagtcagcgagggtcctctctgggtcttgtcctgccacccctcaggcttcagcgctgtggtgctcctgaagggcacgcctcccccacccccgccgggcctggtgcccccaatcagcaagccgccccctggcttctctggccttctgcctagcccccacccggcctgtgtccccagccccgccaccaccaccaccacaaaagcgtaagtgtgggtgagctgcctggtgtccaccgggggtggaggaacggtaccctccccttgggccactgtgaaggctgaagcctccacctcctctttaccttctgacccccagacccaggctgctgcctgccccacgggcgtacctagtccccgagaacttccgggagaggaaccttcagctcatccagtccatcagggacttcctgcagagcgacgaggcccgcttcagcgagttcaagagccactcaggggagttcagacaggtcaggcgggcccggggagtccagatgggtcaggcgggcccggggcggggtgccagcccgtcttcatccagggcccgggccagaggggatgactgagtccggctctccggtggcagggcctgatctccgcagcccagtattacaagagttgccgggacctgctggggg

SEQ ID NO: 15040 - DNA, 2300 bp, Homo sapien
ctgaatgtcctggggccgtgggcggctctcggtgtcttcctaggcagctgctgcagcacgagtgcccgcggtgccccgagctgccacctttcagcctcttcggggacctggagcagcacatgcggaggcagcatgagctcttctgctgccgtctgtgcctccagcacctccaggtgtgcccccccagcgaccccggagagagcctaggcggtgggtggtgcaagggatgtggccacacggctgggaggggcttgtccacctgctgcttctggccccggatggccccctgagggtcaggctgcacgtggcagggaggcctctggctgctggcggggccctctcccgccccttgctgctccgccactggcctgtgggaagaggcaggaggcttggggtcccccagcctgtgcccagcctcctgtgccttgtagatcttcacatatgagcgcaagtggtactcgcgcaaggacctggcccggcatcgcatgcagggtgaccccgatgacacgtcgcaccgtgggcacccgctctgcaagttctgtgacgagcgctacctggacaatgatgagctgcttaagcacctgcgccgcgaccactacttctgccacttctgcgactcggacggggcccaggactactacaggtgggccgggcagcagacagacagatgaccctccctccccgagggcgtggggctaaccgggctgcagccctcctaccgacaccccatctcctgccagcgactatgcctacctgcgtgagcacttccgggagaagcactttctgtgtgaggaaggccgctgcagcacggagcagttcacccacgccttccgcaccgagatcgacctcaaggcccacaggacggcctgccacagtcgcagccgcgccgaggcacgccagaaccgccacatcgacctgcagttcagctacgcgccacggcactcgcgccggaacgagggtgagcaggcacctggcctggatgcccccaggtggggccgcatgaccatgccctgctctggagcctgagatgagaccgagctgtgggtgcaggagctgacctcccaccctccggccaggctggagcgcccgagcaccccttgtgtgccaggagctcttgctccctcagggtctcgggtctgctgccctgggtgcccggggcccttccctggaccaggaggcttttactgagcatctgctgtatgcagatcccacctggggctcggggaccctcctcctctcccttcccactgctcctgtggcttggcacccaggtcgtagaggcccgtggctggcgtggaccctgcgaggctcctgtgccactcccgggctcatgtgcactgtgggtaggaaagcctctgccatccaggcctgagcattggccgggtgtggccttgacggcaggcctgttcctcctattgtcgtcccggggtcccgggaagtgacgggctgtctgctggccgcaggggtcgttggtggcgaagactacgaggaggtggacaggtacagccgccagggccgagtggcccgggctggcactcgcggagcccagcagagccgccgaggaagctggaggtacaaaaggtgggggaccttgcgtgccgctgacattctcctgtggtgaccgtggccagtggccaagctgggagtggggatggggtcagggattgtggccagagttcctggggtcctgagtggcagtagggtctgttgagggtccttggtgggcacaagtttctctctcttttctccagttctagccacagccacagatcccagggttggggtgggtgaaaggggcctgtgtcaattgggcggtcaccgcagctgtacgaggaagcaccgccccggcagccctgcagggcagaggcatcagaccccagatgatcgccccacacactgggcccaggcactgcccgcctgaggcattggtctcgggccatgctcagcctgaaggctggcctccttgtcccagggaagaagaggaccgagaagtagcagctgctgtccgggcctccgtggccgcacagcagcaggaggaggctcgcaggagtgaggatcaggaggaaggcggtaggcccaagaaggaggaggcagcggcgcggggacctgaggatccccgtggcccccggcgctcaccccggactcagggcgaaggcccaggtgagtaagccctacctggtggcagctctgcccgggctaggaggtcagtggctagctctttttttttgtttgtttgtttgtttgtttgttttttgtgagacagacagagtctcactctgttgcccaggctggtgcagtgg

SEQ ID NO: 15041 - DNA, 2300 bp, Homo sapien
gaagggggcttgaccaacccaaggggtgggtggcaccaatctctgctggcatgggggcagcgagggtcctccccagcagagcttcgtggagagcaggggtgctgagctgagcagggatgccggggccgtctgtggagggcacagggcagacgggcaagtcctctggcagccagctttgcaggtgccagagacccctgggaaggggcccacgcagaggctctgcagcgcctgctgaggatgcacggagctgaggtggtcggcttgagcctcgtgccgtgaaggcgccatggaaacgtgggggcgggggcgccggacagggtagccgggccttgtcacctgatgcatccccggctggcggccattggtattcccttagcagctgcttggaacacgtttcttctctgtcctggaaagctccgcagagcgacagctgctctgttccccgcagggtggagccaccgggtgagggccccggccggtggggcgtggctgcttagggactggccttgccgccccctggtggagaggcctggcgttgtgtctctgtcctctgcccctgaccctaggcaagcgggttggggtgaggaggggaggcctaggccagggtgccaggggccgctgcctgctggggcctcctaggaggaccctttatgcctcactccttcttagagggtctgtgagggctcccttgcctctgagcctccgttgcatcccaggtgggggtcccatcccagtcctgctcaccacccctctggtttttggctctaggtggtctttgggaagaagcttcctgcctttgccaccatccccatccaccagctgcagcatgagaagaaatatgatatctactttgcagatggaaaggtgtacgcattgtacaggtgagcagggcctctccctgggtcctggcctccctgtggttgtggcccttcacgtcccactctcctcacaaccggaggcacttcgggggccacctggtgcaccaatgctggggccaggcacctgggtttccatcctgtgactggggaggcttaccaggccctcctgggggtagagctggtggttgtgctggggaaaggcatgcccaggtggtgcagcacctgcctcgggggcaccttgaggggcacacgaggtgtgtgagccaggcccgtggcctgaaaatcctataaagggtacagctgtcccagggctggtctctcagaggaggggcagctcatgggctcagggctagagccaggcttctgacccaggccatgtgcacagccatggccttgcatctgtcctgggtcacgggcctggggcctggtgagtggccctgctcccggcggtgacactgaatgtcctggggccgtgggcggctctcggtgtcttcctaggcagctgctgcagcacgagtgcccgcggtgccccgagctgccacctttcagcctcttcggggacctggagcagcacatgcggaggcagcatgagctcttctgctgccgtctgtgcctccagcacctccaggtgtgcccccccagcgaccccggagagagcctaggcggtgggtggtgcaagggatgtggccacacggctgggaggggcttgtccacctgctgcttctggccccggatggccccctgagggtcaggctgcacgtggcagggaggcctctggctgctggcggggccctctcccgccccttgctgctccgccactggcctgtgggaagaggcaggaggcttggggtcccccagcctgtgcccagcctcctgtgccttgtagatcttcacatatgagcgcaagtggtactcgcgcaaggacctggcccggcatcgcatgcagggtgaccccgatgacacgtcgcaccgtgggcacccgctctgcaagttctgtgacgagcgctacctggacaatgatgagctgcttaagcacctgcgccgcgaccactacttctgccacttctgcgactcggacggggcccaggactactacaggtgggccgggcagcagacagacagatgaccctccctccccgagggcgtggggctaaccgggctgcagccctcctaccgacaccccatctcctgccagcgactatgcctacctgcgtgagcacttccgggagaagcactttctgtgtgaggaaggccgctgcagcacggagcagttcacccacgccttccgcaccgagatcgacctcaaggcccacaggacggcctgccacagtcgcagccgcgccgaggcacgccagaaccgccacatcgacctgcagttcagctacgcgccacggcactcgcgccggaacgagggtgagcagg

SEQ ID NO: 15042 - DNA, 2300 bp, Homo sapien
accattctcctacctcagcctccggagtaggtgggactacaggcgcccgccaccacaccaggctaatttctttttgtatttttagtagacatggggtttcaccgcgttagtcatgatggtcttgatctcctgacctcgtgatccacctgcctcagcctcacaaagtgccaatttcaagctgggattacaggtgtgagccaccgcgcccagccaagatgttgaacttcttacatccttacaataacttttcccagttttctttttttttttttgagatggagtctcactctgtggcccaggttggagtgcaggggcgcaatctctgctcattgaaacctctgcctcctgggatcaagcgtttctcgtgcctcagcctcccgagaagctgtgactacaggcgcatgtcaccacgccccgttaatttttgtgtgttttggccaggcacagtggctcatgcctgtaatcccagcactttgggaggccaaggcaggtggatcaagaggtcaggagatcgagaccatcctggcgaacatggtgaaatcctgtctctactaaaaataaaaaaaaaaaattagcagggcgtggtggcgggtgcctgtagtcccagctactcaggaggctgaggcaggagaatggcgtgaacccgggaggcggagcttgcagtgagccgagatcacgccactgcactctagtcgtgtgtgtttttttttttttttttgagatggagtctcgctctgttgccaaggctggagtgcagtggcgtgattgtcgtgatctcggctcactgcaacctctgcctcacggtttcaagagattctactgcctcaggctgccgagtagctgggactacaggcacatgtcaccacgcccggctaatttttgtatttttagtagagatggggtttcaccattttggtcaggcttgtctccaattcctgacctcaggtgatcccaacctcccaaagtgctgggattacaggcgtgagccaccacgcccggcctaaaaattttttttgtggagatggagcctgactgtgtaggccaggctggtctcaaattcccaggctccagcaatccgggccacccagcctcccaaactgctgggattacaggcttgagccactgtgcctgacagcttttttcaagtggcaaaattggggtttcaagcccatttgtgtctgtttctaaagtccaagttcactgggcatggatcacttgagcccaggaggttgaggcctcagtgtgctgtgatcgtaccactgtgttacagcaagagcaagacccggtctcaaataaagtaagtaaagttcaggctcattgatacaatttactgcctcttttccagtagggtttagatctggacctgccttctggatggcagagggagggaggtcctgagtgtgcctggccctcaagggtagggaggaggccctgttactgcagcatccatccaaacacgtcctgtgctgggcccagcgtaaagaggacaggttccgttcgtgccttccagaggccccttctgggcaggcctggcgagactgccctgggctgcgagatggacgtcaccacgtgctgcctttcacgttgtctttcatgtagggatttaaacagggcattagggaagtggaggcgggaccacgcttgtgtgtgttccaaataccagagaccggtttcctaataaggtggccagatttagcaaatacaaatacggcaggtccacttaaatgtcaatttcagataaggagcagcattttagtatgagcctagcccatcaatatttgggctatacttacactaagacatgaccccttgttcatctgagatgcaaaccagttgtgccgtgtttcatctgacaacgccagttcgtggagcccggcgagtgttgacgtgacacgcgtggcccagaggagcccggggctggccgcgtggccgcgcggaccttcgagcggtcggctcatggtagagcggcctctatcagggccaccgctctagccggcgccgcgctgaggcggaagtcgcgacgcgcacttgcgccgggcgggcccgttgctgggtggggcggtgacgtttgcccggaaggggcgggcccgccgggagccaggccgctcggcgccacgaccggccgagaggggggccggatcccggaccatggcggcggccggggggcgccgaggggcggcgcgcggacatggaggcggaggcggcggcagctcctgagcgggaaggcgggagctgcgtgctgtgctgcggagacctggaggccacggcgctggggccgctgcgaccacccggtgtgctac

SEQ ID NO: 15043 - DNA, 2300 bp, Homo sapien
tcccgagcagctgggactacaggtgtgtgccaccatgcccggctaagtttttttttttttttttttgagatggagtctcactctgtcacccaggctggagtgcaatggcacagtcttggctcactgcaacctccgcctccgaggaccaagcaattctcccgcctcagcctcctgagtagctgggactacaggcgcatgccaccacacccggctaatttttgtatttttagtagagatgggatttcactatgttggtcaggttggtctgaaattcttgacctcgtgacatgcctgcctcgacctcccaaagtgctgagattacaggcatgagccactgtgcctggcaagttttgtatttttaatagagatggggttttgccatgttggccaggctggtcttgaactcctggcctcaagtaatccacctgcctcagcctcctgaagtgctgggattacaggcatgagccactgtgcccagcctgcccccagcctttctgtgcccttctggacaggagtaccctgttcccccaagctgaggctcttgggctcaggtgctaggatgtatctcacctccaccatttacccaacatgatctggggcaggtcagttctccctgggcctcagtttactcgttggtgagtggagtcaataatagttccactcatgacattgtctggaggtcaagatgagatagttcatgatgacccaaaacgagatccctggtgtctgggacccaggggctgccccatgactgacatggttgctgagggagggctggattcacccttgctgggaggtcaggaaagactgtgtcaggctctgccctctgggagggggttgttaagcccagatggccacagagggaaattctgagggactgtctggccctgcgcctttttttttttttaagatgcagtttcggccgggcacagtggctcacgcctataatcccagcactttgggaggccgaggcgggcggatcacaagtcacaaggtcaggagatcaagaccatcctggctaacgtggtgaaaccccgtctctactaaaaatacaaaaaattagccgggcgtagtggcgggcacctgtagtctcagctactcgggaggctgaggcaggaaaatggcgtgaacctaggaggcggagcttgcagtgagccgagatcgcgccactgcactccagcctgggcaacagagccagaatccgtctcaaaaaaaaaaaaaaagatgcagtttcgctcttgttgcccaggctggagtgcaatgatgcaatcttggctcgctgcaacctccgcctcccgggttcaagcgattctcctgccttagcttctcaagtagctgggattacaggtgcctgccaccatacccagctaattttttgtgtttttcgtagagatggggtttcaccacgttggccaggctggtcttgaattcatgaccttaggtgatccgcccgcctcggcctcccaaagtgctgggattacaggtgtgagccaccgcgcccggccaaggatctgggccatttaagtggagtcttgaaggatgagtaggtgttaggcacagacgcacagaggcaggcaaagccacaggctgttggtttaggcaaaaattgagactggctggataaagtggtcttgggggaccatcaccagagaggaggcgctggaggtctgcaaggccttgtcctgcccctccaggggtagaggttccaggaggggctgactttttctcctggaagcctcacagaactgcagaccccacggatggcttggtgttgccaacatgaggcttctaaggcttctgcggggagatgggttggtggggagaagctgggggtggcagtggacaggacagggtgtggggacagctttgggagctatgctaggcaaggacaagggacaactcttggggggactcacccagaggggtcttgaatggtgctgaaggcccccgacagccctcctgcaatagccactgtagctctgcctgcacctgggccttcgctctgctgtcgtcccaccggcaggagtctggctaaaggggcatccctcagccctactccctcatcagtgttcccagtacccactccctggcacttccactcctagagggaggaggctgagcaggcagagaatgggacgtgtcccctcagaggagcctcgagcccagttccagccagcggcccactcagtgaggtgctcaagtacccacgtcccccgccagctgccagggttccctctcctccctccgtccctccccccatctggggagcccagcggtactgagggggcggaacgaggcgg

SEQ ID NO: 15044 - DNA, 2300 bp, Homo sapien
gattacagatgcccaccaccacgcctggctaattttttttgtattttcagtagagacggggtttcgccacattggccaggctggtctcgaactcctgacctcaggtgatccacccacctcggcctcccagagtgttgggattacaggcgtgagccactgctccggcccctcagcccatcttcagtcactgggagtaggaatcagctgagtcctgggccagggaaggatggtgtatgcccaaggctgatcaggcgtctgccccacccagggcgggtaaggtctgcaagcccccttacccaggggacctggggctgctggagtctcccatccagccacctccctcgactctagtgtggccaggaagctacagcctgccaggttttgggtggacctggttggtgtgggatgaccccctaagcccaaacaggtgtggtatgtggggtgcgtggtggtgggtcacactgcccacagccatcttcacagactccaagggtggcagcaccaggctgtgtccagggaggccagccacaggccagacaggcagcctctggacatgcagacagagagatggaagcggccggccgggcgggagcctgaagcagccttacccaggaattgcaggggttggggtggcgagcagtcgcggcgcctcagcctaagtggcttttaggggcagctgccgggatatgggcacccagggggccatggcccaggaggctgcccagaggcgagccctgtgcttgggtgggggcaggggagcccagcccagggccccggagagacgagagggagaggaggactgcgccaagcctgcttctacggctcacatggggaattgcctgggctggctgtgcctgacccctgggaaccaggtatgtgcaagggggcctggctgggctggggaggagggcagactggggctgtgcctggactcagctaccttcctatattggagacagaggaagagctgggtggtgaagatagcatggactccgaatctcacatccctgggcccaaatggagctgaggaggcttcgtgggtcttttccctctccaggcctgtttgcaggtctgtgaagtggccggtcccctagggttgttccaggtaaaatgcacttaggcctaaatgatttcactgtggtggtgactgtcctgttggggaaggagggacactcgtgcttcaggtagaggctgagggacgtggacggctgtgggcaggggaggggaggcctgctgcctgcctgtggacactgtggagcagcgcctgtgcacacccagagcttagagcccaaataattcagtggagtgtagcccatgtcaggaggtgggtagcagggaccctcgagactcatatccttttgtcaccctgcaaagtcacagtccaggcctggggtgggctgggacacaagtgagggggccggcccggccaagggaaagaatggcagcagggcgtgggaaccgacgcggtgcagataggccgaacacggtgggtaggccagggagtctcccagccactggcccccaggatgcagggaggggctgctgcgtgtcacttttaaagccctttttgcctcctgggccctcctgagactctgccctgggccagggagtctcccagccactggctgggagggatccaggtgagacacagccgagaggagacaggcaagggggtccggaagggcttcccggggagggtggggagggctgtggcccttgttcttaccctttggcccctttgtcggggtcccttggcctggagaccctttgtccaacccgtcgcccacctcaagacctgcctcgatgctgcgcatacagtaggtatccaataaatgttcctgggatagaaggcaaaggcgctggcaccaaggcggctgcccagagtaggggcgagacagagaggtcccggtggttaaggggtcccctagccctgccgcctccccctgccccgcctcgggctggccgggcgcggaggtaggggcctggccgggacggctgggactggaggcgggggcggccgggcggcgggggcggggaaggggcgggcgcggaggcggtgccgcagcccgagccggagcccgagccggatcccgaggcgacgggagccgaacaggagccgccgctgaagccaccgccgggtgcccagcgccgccgccgcccccgagctcccccgcgcccctgcccgcgggcggccggtgggcagcgggcgccatggccgcgccggagccgctgcggccgcgcctgtgccgcttggtgcgcggagagcagggctacggcttccacctgcacggcgagaaggg

SEQ ID NO: 15045 - DNA, 2300 bp, Homo sapien
ggagcccagcctgggcgcaggcctgcccgtgggacctgtgggacccgttttgttcctggggcttgagggcgggccacagtggtgctcagggccaaggtgcccagcccagggctggtgggggggctggccttgcaggggggctggctggtcctaagcccctgtctccaggctgagggttggggcctccctctttcccagccaccttccctcccccaggaggaagctccccctctgcctcaggcgtttgtccattgatttggacacaaacgcatggttcaccttcctgtggaaaaatccggccctcggactttatctggagggtgcagtggcccaggcaccttgccttgggtgggaccttccccctctgctatttcaggctctgggggctgcaggaagccctaggaggggcttcctctgggtgtatttttagaggaacaaagggtggcctgagtggcaggtccctttgtgcatgagtctggctggggacaggggctccaggaggtcagggggcacccaaggaacagggtctccccttctctcttctggcatcaagacctgaggtttctttttctttttctttcttggctcactacaacctccgctgtctgggttcaagcgattctcttgcctcaccctccccagtagctgggattacaggcgcgcaccaccacacctgactaatttttgtgtttttagtagagacggggtttcaccatgttgctcaagctggtctcgaactcctgatctcaggtgatctgccctcctcgacctcccaaagttctgggattacaggtgtgagccactgtacccggcccctgaggtctgaggtttcatttctttctttctttttttttttttttgagacggagtttcactctgtcgcccaggctggagtgctgtggtgcgatctcggctcactgcaagctccgcctcctgggttcaagcaattcttatgtctcagcctgctgagtagctgggattacaggcgtgtaccaccacacctggctaatttttgtgtttttggtagagacagggtttcaccgtgttggccaggctggtctcaaactcttgggctcaagtgatccgcctgcctcagcctcccaaagtgctgggattacaggtgtgagcccctgcgcctggctcaggacctgaggtttcttcacctgagctcccagcatgggcaggaagaggtgggcctcacctgacctccacagagcaggctcagatcctgcccttctcagcctgggttcagggcatgcctcagatggtcagggagcccaggagggcaaagcttaccttgcggggatggctccagtgggggcactggtggcagagaggcagagctctggaagggatgtgtgtagtttgtctttggtgaaggatggagagggcccaactttgggtgccccctgggagctaagggtggctctcagtgtcctctgtcctggctggggataggggaggtgggcaggggaggacactgatgtggttggcccctccttttgggggccgtgaaggcctagttagtgatgactcagccctgggccacaccaggctgggggtggccgcagctgcagtgcagctgatcctagtagtgacgacaggggacagcccccaaacagagacggggtggccagcggtgccaggccctggaggtggtggcagaccctgagccctctgccccctgcccctagcccatgtctccacccccatctggagggccttgggggctaagagcaggtgtgaggggtgacagttctgcgggaggcggctgtgtggttggggcgcggtgcctgcgggggcttccgggcttccctggctcttgctcctctggagcctcaacaggaccgtcctgtgttctggggccgggactcctccctgtcccctcagccctgggtcctggggcagggcagggccttccagcagcttccttccttcctttcttgggacggaagcctagctgggtggggggcgccaggctggagccttcgcaggggagcgggctcagtcatcaccctgctccccagagtgactcagcccccacgtccccacccatccccggggagccagggccgcagagggaggtagataagtggggtggcagcctgggtcggccagagagttcaggccaccccggccggacgcctgccacttgctgtcactgtgccgctgtcatggcacgctccgggagtgccacgccacctgcccgggctccgggagcccctccacggagcccaccccagaggctggtacaggtcaggtggggtgggaggaagggagggctaggaggaaccggcagc

SEQ ID NO: 15046 - DNA, 2300 bp, Homo sapien
cgaggccctaaaccactggtgtcctgacctgctgagtggctacagtgatgcaggcgatgctctggggcaccgggtgtccatcctcccaaggtgctgtctgcaggggagggtgccagccaaaagccaccgggtagaaagaaaacaaggaccttgctaagatggggggtcatctgggcagatggggcccctgcctacctttgggggggcactggagtcatagcagtgctcagtccccagatggtccacaggtgcatcctttttgttcctcatggcacggatgttgaccagctgttgctgccagtcctggggctcccagactggcaccttgaggggctcagccccctcacctttctcactgtccgagccctcataggccacacgcagtctctgtgctttccgcggacgcttcacggggctgtggcttttcctcgcttctgcaaaaagcaccacgcagtccctctggtggggccacaggtgaaggtagggtaggggtgccatcccgcctgctagctcacccctcactcgttcatgccacaactgtccatcatctaatacacttggggtgctctgccctctgcagtctggggtatgtgggccctccttatgccagcgaccctgacaaggtccatgttagctcatgaggactctagcaacagcctgtaccaaggtgcccccaatacatcttctatactgcaccagagacagtctgctaacacccacatcaggttgtgtcactcccttttaaaaaatcctggccggccgggcgcggtggatcaagcctgtaatcccagcactttgggaggccgaggtgggtggatcacttgaggtcaggagttcaagaccagcctggccaatatggcaaaaccccatctctactaaaaatacaaaagttagccgggtgtggtggcaggggcctatagtctcagctacttgggaggctgaggcaggagaactgcttgaacctggggggcggaggttgcagtgagctgagatcacaacactccactacagcctgggtgacagagcaagacccgatctcaaaacaaacaacaaaacctcctaattgacttccgtttactgtcataataaactccaaactctatcctggcatcaaagctcctgccaccctggctggcatcaccacctgcctgctcccagctgcaccagttcctcctgacatagtctggactacccctggggtccctgggtgcctatgggaatccagctctggccaattctgcagaagtcccagcgggactagcgcagaggccctgtccgtgtccctcactgctcactgcagtgcttggcccccagcaggtcctcaacggctgcaggataaatataataagtgccatgccctttcctgttttccctcagaggcaccctcccccgagctgggggagcaggcttctggctgcgtgtgtccttggcacccagcctctccgaggacagcaagttcactgcaggagggcggggatgggacccacagagcctggagtggagagtcccggacagagtggtgggaaaggaagcgttttcttgcttggggcgaaagggggcagcggagcggagcgcccgaaacccagcccctgcggaccgcaatctttgggaaaaaggcgcaaggtgggaacgcagggccgcacgtgggaaccgttcgcggctgccgggtttgcagcccctgcccgcgcagctgggagccgcaggaggcggcccgggactccagcctgcagcccctatcccgcctcctcccacgctccagccacggcgcggcgctacctgctgcagcctctcttctccggagaggcccgggctcctccctacacccccgcggcccagccccgggtcccaggctccggctccgggtcagcatcctcgcgctcaaggcggtcatgccggactcctgcggactacacatcccggcggcccatgcggccccgtcacgtgatgcaaggatcgccggcctttccgccagagggcggcacagaactacaactcccagcaagctcccaaggcggccctccgcgcaatgccgctaccggaagtgcgggtcgcgcttccggcggcgtcccggggccaggggggtgcgcctttctccgcgtcggggcggcccggagcgcggtggcgcggcgcggggtaagtggcggtccccacggggcaagtggcggtccccacggggcagcggcctagagaggcggaccccgcagtgtccgggtcccgggccctcacccgcgcccactgcaacccgactccggagctccgagcatcccttagttttaagtcatggcgggtgcgaacgggtc

SEQ ID NO: 15047 - DNA, 2300 bp, Homo sapien
ctctgccctctgcagtctggggtatgtgggccctccttatgccagcgaccctgacaaggtccatgttagctcatgaggactctagcaacagcctgtaccaaggtgcccccaatacatcttctatactgcaccagagacagtctgctaacacccacatcaggttgtgtcactcccttttaaaaaatcctggccggccgggcgcggtggatcaagcctgtaatcccagcactttgggaggccgaggtgggtggatcacttgaggtcaggagttcaagaccagcctggccaatatggcaaaaccccatctctactaaaaatacaaaagttagccgggtgtggtggcaggggcctatagtctcagctacttgggaggctgaggcaggagaactgcttgaacctggggggcggaggttgcagtgagctgagatcacaacactccactacagcctgggtgacagagcaagacccgatctcaaaacaaacaacaaaacctcctaattgacttccgtttactgtcataataaactccaaactctatcctggcatcaaagctcctgccaccctggctggcatcaccacctgcctgctcccagctgcaccagttcctcctgacatagtctggactacccctggggtccctgggtgcctatgggaatccagctctggccaattctgcagaagtcccagcgggactagcgcagaggccctgtccgtgtccctcactgctcactgcagtgcttggcccccagcaggtcctcaacggctgcaggataaatataataagtgccatgccctttcctgttttccctcagaggcaccctcccccgagctgggggagcaggcttctggctgcgtgtgtccttggcacccagcctctccgaggacagcaagttcactgcaggagggcggggatgggacccacagagcctggagtggagagtcccggacagagtggtgggaaaggaagcgttttcttgcttggggcgaaagggggcagcggagcggagcgcccgaaacccagcccctgcggaccgcaatctttgggaaaaaggcgcaaggtgggaacgcagggccgcacgtgggaaccgttcgcggctgccgggtttgcagcccctgcccgcgcagctgggagccgcaggaggcggcccgggactccagcctgcagcccctatcccgcctcctcccacgctccagccacggcgcggcgctacctgctgcagcctctcttctccggagaggcccgggctcctccctacacccccgcggcccagccccgggtcccaggctccggctccgggtcagcatcctcgcgctcaaggcggtcatgccggactcctgcggactacacatcccggcggcccatgcggccccgtcacgtgatgcaaggatcgccggcctttccgccagagggcggcacagaactacaactcccagcaagctcccaaggcggccctccgcgcaatgccgctaccggaagtgcgggtcgcgcttccggcggcgtcccggggccaggggggtgcgcctttctccgcgtcggggcggcccggagcgcggtggcgcggcgcggggtaagtggcggtccccacggggcaagtggcggtccccacggggcagcggcctagagaggcggaccccgcagtgtccgggtcccgggccctcacccgcgcccactgcaacccgactccggagctccgagcatcccttagttttaagtcatggcgggtgcgaacgggtctctgctgcaggcggctccgtgacagctcctgcttcacatgggtagaggagagacggcaaacgtcggggctcccaggacttcgcggcggcagtcctaacccgtgcactgagtcgggcggggcgggcggcagcgtctgagtagagagctctctagaccaggcctggtgtctcccgggctttcctaggtgcctgtttgcgagctggtcagctgggctgtagttgagttctcccagggagtgtgggaggaaaggttatgcccaccagagacccagggtcctgacggctggaggtccgcagtggggaaggtgggcagaggtgttgctcagatgtccccattcctgtttcgtttgcacagaggggttttctggtgcgtcctggtccaccatggccaaaccaacaagcaaagattcaggcttgaaggagaagtttaagattctgttgggactgggaacaccgaggccaaatcccaggtctgcagagggtaaacagacggagtttatcatcaccgcggaaatactgagagtgagtgagctacctgtgtctttgctaggctagagggaaatgca

SEQ ID NO: 15048 - DNA, 2300 bp, Homo sapien
aaaaaaaaaaaaagatttactgaggggctttactgctccatcccgaggagttgagaatgtgcaattttttttcacaactgcaaatgttgtattgagataaaacataacatgaaatacaatttcaaactgcacaatttttttttagacggagttttgctcttcttccccaggatggagtgcagtggcgcgatcacggctcactgaaacctccgcctcccgggttcaagcaattctcgtctcagccccccgagtagctggaattacaggcgcccaccactatgaccggctaatttttggtatttttagtagagacggggtttcgccatgttggccaggctggtctcaaactcctgacctcaggtgatccacccgcctcggcctcccaaagtgctgggatgacaggcgtgagccaccgcacccagccaggatggactatattttattcatcagttgatgaacgttttagttgtttctaagtagaaaactttacaagtgcaaaaattcagcatttactcatgggcaaaacacaatgccaggcatgtgtgacaaagacacaaacacacataaaagataacgacctagcccatgtgcgatggctcatgcctgtaatcccagcactttgggaggccaaagcgggcagatcacctgaggtcagcagttcaagaccagcctggccaagatagtgaaactccatctctactaaaaatacaaaaattaaatgggtgtggtggcacgtgtctgtagtcccagctactcaggaggctgaggcaggagaaccacttgaaactgggaggcagaggtagcagcgagcagagattgtgccactgcactccagcctaggcaacagagcaagactcagtctcaaaaaaaaaataaaataaagaacctacttctcccaggaactcacatcttatcatgtaacacctggacatatccttacctgtgaagatgatgatactcaggcctcatctataagatgggctttctttcatcaacatctgaatagtaactcaagtgtgcctgaaccaggtcaccaagatcctgactttcgaagtctcctgaggaaggacatgtcggcctccaagtactggagacagcattcctgtgtagacagttgccagcaacccgtctcccacagaacctggtgcaagaccaaacccagccttctctgcatttccctctagcctagcaaagacacaggtagctcactcactctcagtatttccgcggtgatgataaactccgtctgtttaccctctgcagacctgggatttggcctcggtgttcccagtcccaacagaatcttaaacttctccttcaagcctgaatctttgcttgttggtttggccatggtggaccaggacgcaccagaaaacccctctgtgcaaacgaaacaggaatggggacatctgagcaacacctctgcccaccttccccactgcggacctccagccgtcaggaccctgggtctctggtgggcataacctttcctcccacactccctgggagaactcaactacagcccagctgaccagctcgcaaacaggcacctaggaaagcccgggagacaccaggcctggtctagagagctctctactcagacgctgccgcccgccccgcccgactcagtgcacgggttaggactgccgccgcgaagtcctgggagccccgacgtttgccgtctctcctctacccatgtgaagcaggagctgtcacggagccgcctgcagcagagacccgttcgcacccgccatgacttaaaactaagggatgctcggagctccggagtcgggttgcagtgggcgcgggtgagggcccgggacccggacactgcggggtccgcctctctaggccgctgccccgtggggaccgccacttgccccgtggggaccgccacttaccccgcgccgcgccaccgcgctccgggccgccccgacgcggagaaaggcgcacccccctggccccgggacgccgccggaagcgcgacccgcacttccggtagcggcattgcgcggagggccgccttgggagcttgctgggagttgtagttctgtgccgccctctggcggaaaggccggcgatccttgcatcacgtgacggggccgcatgggccgccgggatgtgtagtccgcaggagtccggcatgaccgccttgagcgcgaggatgctgacccggagccggagcctgggacccggggctgggccgcgggggtgtagggaggagcccgggcctctccggagaagagaggctgcagcaggtagcgccgcgccgtggctggagcgtgggaggaggcgggata

SEQ ID NO: 15049 - DNA, 2300 bp, Homo sapien
tccggaaggattttgtccctttcatcactaaggtgggctcagggccggtgaaggctgtgtctctcggtaggccagggcttgctttgcccttggctgtccatggtcgggcagagtgacaggcaggtggagggcagtgggagggtgtttggggctgtgcctgtggcgctgggggctctgctgggcagcctgcagggctttgatgcgcggcaggcattgaggggtgggagctgggtgccgccgccttgcccctagcctgcagcttgtccctggccagggggcacccggcaggcctggtgagggcctccagcccccattgccacccctcactgtctgggtgtgctcactctgccagggcctgcggtccaatgtcctcttgtcttttgatgacacccccgagaaggacagcttcagggcccggagtactagtctcaacgagagacccaagaggtacggcctgcgggggtgtgcctggagtcggtgtggggtggggaaggacatggggctgtggcctgcctgacggtgcctccaagtcagtgagtggaaatgggtcctgtgtgccctggagtatgtgaggcagggcaggacctgcaagggccgctaacacccctcagcccctcagcaggttggccgtggtggcctgggtccgggctgcgtgtgccacgggcacctacttgtggaattgggggttggggtgcaagctttaggcgcctgagcccctcgaaggagccggccttgtctggggctgccccctcctctgcagcccccagcctgctgctagccggggactctgcttcatcaccgccgccttgccggaccgcaaagagctgagccagcctctgtgttcttgtttgcatttcatttgaacggctttctcctcctgtcccccaccttcctgcccgagctattttggctttccctagatgggaatacggcattttccagcgtgacctcaactcggaagctgttgtctccagcccctgggggccgggggccaagctcggccattacggccagagactactttctggggtcttggtctcttttcctagtgaccttcagggcctggccactgaggcctcagtgccgcctcggtcagagctgggcggtgcctgccttccgcgggtgggtgggattgcctggccagcacagcctggaatctgccgtgggggtgacccacacacgtttaatttgcactgacgttgtttgttttggtgtcatgcgtgaagccttacttgttctcagtcatgtttaccagacgtattatcatgcatttttgttttctgtctcttccccgctaactgccctttggcatggctctttttgctcatctcacccgcgggatctctccatcctgaccctgtggcctgggacctttcctcctcacccctccactggcttgttctccccttcccgggagctgggctctctggggcgttggggctccttcctcacccgatagtctgaggatagccagaccccccaaacaaggcttgaataactctccacccgtgaaagaattcaaggagagctctgcagccgaggccttccggtgccgcagcatcagtgtgtctgaacatgtggtccgcaggtagcgggactgtcgggtggggggcacggaccctggagcttggccccgtgagcacctgggtggcagtgcatggggctgcttgcatgacctcatcgtctgcccgtgtcctccctggccagcccagggggagccggtgacgaggggtggaaaggttgcattctgtccccaggccccgtatgagcacgggctggttgcacgcatccccaggccccctcggggtgccgctccgagagagccaggcgtgccgggcagcagcctccccaggctgtccccaagggccgcagtgtgggttgggggagacaccactcctggttttggccttttcgtattctctagaatggacgtttttcttcgggctttcttctcaacaaggtttattttttgttgtagctgaaagggaacaaggggcatttgtggagggtgctggggtggggcagcctgggagggcctgggtgggggctaggatcctgcagggcatgggcatgggcctgggccccaggccatggtcttagttctccccgcagtgtctgggtgcaggtgtgggctctcgggctctcggctgtcacctgcctgtgggtcatcgctgctggcactggcagaggggatacctgtctcctcctggaagcccgttgcaggccaaggggtcccatggccctcagtccatccacctcctcacctcaggccggcctctgctgggtgggacttggccagg

SEQ ID NO: 15050 - DNA, 2300 bp, Homo sapien
tgttcttgtttgcatttcatttgaacggctttctcctcctgtcccccaccttcctgcccgagctattttggctttccctagatgggaatacggcattttccagcgtgacctcaactcggaagctgttgtctccagcccctgggggccgggggccaagctcggccattacggccagagactactttctggggtcttggtctcttttcctagtgaccttcagggcctggccactgaggcctcagtgccgcctcggtcagagctgggcggtgcctgccttccgcgggtgggtgggattgcctggccagcacagcctggaatctgccgtgggggtgacccacacacgtttaatttgcactgacgttgtttgttttggtgtcatgcgtgaagccttacttgttctcagtcatgtttaccagacgtattatcatgcatttttgttttctgtctcttccccgctaactgccctttggcatggctctttttgctcatctcacccgcgggatctctccatcctgaccctgtggcctgggacctttcctcctcacccctccactggcttgttctccccttcccgggagctgggctctctggggcgttggggctccttcctcacccgatagtctgaggatagccagaccccccaaacaaggcttgaataactctccacccgtgaaagaattcaaggagagctctgcagccgaggccttccggtgccgcagcatcagtgtgtctgaacatgtggtccgcaggtagcgggactgtcgggtggggggcacggaccctggagcttggccccgtgagcacctgggtggcagtgcatggggctgcttgcatgacctcatcgtctgcccgtgtcctccctggccagcccagggggagccggtgacgaggggtggaaaggttgcattctgtccccaggccccgtatgagcacgggctggttgcacgcatccccaggccccctcggggtgccgctccgagagagccaggcgtgccgggcagcagcctccccaggctgtccccaagggccgcagtgtgggttgggggagacaccactcctggttttggccttttcgtattctctagaatggacgtttttcttcgggctttcttctcaacaaggtttattttttgttgtagctgaaagggaacaaggggcatttgtggagggtgctggggtggggcagcctgggagggcctgggtgggggctaggatcctgcagggcatgggcatgggcctgggccccaggccatggtcttagttctccccgcagtgtctgggtgcaggtgtgggctctcgggctctcggctgtcacctgcctgtgggtcatcgctgctggcactggcagaggggatacctgtctcctcctggaagcccgttgcaggccaaggggtcccatggccctcagtccatccacctcctcacctcaggccggcctctgctgggtgggacttggccaggggttggggtggtagaggtgctcggtgaggcttaaagccattttctagcacattctgtatcatgagcaaaatattgcctaggggctatgaaatttgtatcagaatgaactcccataagcctcttccctgtcactgggtgtggagctcaggcagccgctcgcctgcctgagggtgacggtggaaggccacatggggatcccagacctctgtgtgcttgccggaggcagcctgcgggcagaatgcaatctgggcctgtctgtgtggcctccgcctctctgcatgactacaccgtttcgccaggaggccgtaacctagtgctcccgtgggcttcggtgagggggatgtcggtctctagcctcctgagtctgctccgaccagtaggcctggtcttccccacccagcgtctccccgttctctgggacaatgtggtccacgtgattctcaagctgaggctcgctgggccgcccacgccctgttggggtctttccgagcgaggtcctcagccgtgcatgcgttgagctttggcccttggtgataggtggctcggcccgccctacctggcaccctgaccctggtcacggcctctccctccagcaggatacagacgtccctcaccagtgccagcttggggtctgcagatgagaactccgtggcccaggctgacgatagcctgaaaaacctccacctggagctcacggaaacctgtctggacatgatggctcgatacgtcttctccaacttcacggctgtcccgaagaggtccaggcggcactacagggctgggcgggcctgcgggagctccacgggcaagctgggtttcacgctccctgtcttctaggt

SEQ ID NO: 15051 - DNA, 2300 bp, Homo sapien
cctcagcctcccgagtagctgggaccacaggcgcccgccaccacgcctggccaatttttttgtatttctagtagagatggggtttcactgtgttagccaggatggtctcaatctcctgacctcgtgatccgcccgccttggcctcccaaagtgctgggattacaggcgtgagccaccgcgcccagccatttgggggtaacttgtaagtctccagaggtgagctgtgaggggcgatccaggtggctgaggtggggcaggggcctgtggcgaaccaagtgacttccatggcagagagttgccctccccgcctggaggctgcaagtccgagaccaaggtgctcctcggcaggaggtgctcctcagaggcctcaatccttggcatgcagttggttttttccctgtgtcctcacaggctctttcctggatgtctgcgtgttaatctcctcttgggaggaaaccggtcatggcttagggtccgctctggtcccttgctagccgtaattagctttctgaaacccagtctccagagacagtcccgttctgagttcctggggttgggactaaagcataccaacatgggggcacagctcagcctgttcccaggggcagagggagcccccgcagaggcccagagcccagggacagagggaggcctttgcagaggcccagagcccaggggcgcctgggtgtgccgtggctgaggggtgcaaagagtaggggttccagccctcgtggaggccttgggtccggactgtgaggctgtgggctggaggccgctgctctgaggtgcctggcggagcctggcctcgaggcaggggctgagcggggcagcagggtgggtggccgtcagagcagcgctggctccgacatcgtggtcctgaggattgtgggagggagcatgagggcaaaaccagggcccaggccaggaggcccctggggggccagagatgggtaaggggaggtactggcctcaggccaaaggtgctgccgcctccgcagggaacaccagctggctgatgagcctggagaacccgctcagccctttctcctcggacatcaacaacatgcccctgcaggagctgtctaacgccctcatggcggctgagcgcttcaaggagcaccgggacacagccctgtacaagtcactgtcggtgccggcagccagcacggccaaaccccctcctctgcctcgctccaacacaggtgagtggcatggcgggccttggcacgggctctgctcccactggcctggtgctcccggtgacggcaatgtggctcctctctgctgagggcgcccacacggctgggagtggtccctggcctgcctcagcaccattgttctccggtgtttgggaggaggctgacccgtgggaggtgtctgccctgctcaggaagctggggctggcagcttcagaagcagtaggggccctgtggagcctctgcccagcatcctccgtggggagtccagcactgcgggctccaggaggctctgcggcagcctccctccctgcctgggcccaggtttggacacctgagcccgcctgcgcactctgggcccccaccccactcggcaccgtgcttctcgccaggccctctggctcttccctgtggctgcagatggcacttagcggcctaggacgtctattcacgggaggagggaggcactgccctcctcaggtctgcccaagcagcttgtagctagcactgggccccgtgcgcgcccctgccggccgctggccctgccctctctcctctgcaggcacggggcctgtgctctctgctcgacctgtgtgtagcccctcctcctgctgacgtggccgcacacggccttcccttgcagtggcctctttctcctccctgtaccagtccagctgccaaggacagctgcacaggagcgtttcctgggcaggtatcgcctctcagagggaagcggttggctgcagagcgccactctgcctcataggtgctgtgctcgtcgcctcatccgcccacccccatggtccgtctgcctccattgccctggggagcaggtcccgactcgcatgaggacgtctgtgcagaatgtctttggcttggccagcgggatccccttgacttggtccctttgtggctgagccctgttcccacgctgtgcgagcactcccggcccagcttcaggcctgaggggtgggggtggcctgagtctccatggtgacatcagctgagctgcagactctgatgggtggcagctgtttagggggaagcccacccctgggcctgcaccgagcgggccttgccctggcctttggtggctcccctggc

SEQ ID NO: 15052 - DNA, 2300 bp, Homo sapien
tattcactgttaataaaaaccctcaggtctgtattttatcaagaaacatttccctcacgtcttcttccctgaaccaaacaagatctctggcacattttatttgctctgtctcaccacatggattttgtttttttgtttctttgttttttgagatggagtctcactcttgttgcccaggctggagtgccatggcacaatctcagctcactgcaacctccacctcctgggttcaagcgattctcctgtctcagcctcctgagtagctgggattacaggcgcgtggcaccacccccagctaatttttgtatttttagtagagacggggtttcaccatgttggtcaggctggtctcgaactcctgaccttgtgatctgcccaccttggcctcccaaagtgctgggattacaggcatgagccaccacgcccggcccccatggtttttcaaatagtttagaatttcatttccaggtaactaatttgcttctttaaacatatgtcttttctatttaagaaatcctttctaaacaattgcattttattccacaaccgccttcaaacaatcattgagacttggttaatctgttttgctcatttggcagcagtttcttgtggctgtttcttccctccactggagtccttgaatcttaagtctgtcatttgactgcaattaaaagctgggtttggaatacaatcgcagccttaccatccacctgctgtgtgacctggtaaatttctttttttttttttgagacggagtcttgctctgttgcccaggctggagtgcagtggcacaacctctgcctcccaggttcaagcgattctattgcctcaggctccctagtagctgggattataggtgcctgccaccatgcccagctgatttttgtatttttagtagagatgaggtttcaccatgttggctaggctggtctcgaacttctgatcttgtgatctgcccgcctcggcctcccaaagtgctgggattacaggcatgagccaccactcccagccagttctttttttcttttttccatttttttttttttcgagacaggatcttactcttttgcccaggcgggagtgcagtggcacaatcacggctcagcgcagccactgcctactgggctcacacgctcctccggcctcagcctctcgagtacctgggactacaagcgtgagccagtttggctaattttggctaatttttgtagaaacggggtctcgccatgttggccaggctggtctccaactcctggactcaagggatccaccttcctccccctctcaaagttctgggattaccggagtgagccactgtgccctgctggcaaatttcttaaactgtctgtgcctcagtgacctcatttaataaagggaataattgtagcacactttttctagagctgtgaagattcaatggaataaataaggcaataaatgaatggatggggaatgaaggatgtgggtttcctccctcttgtctttcaataagctctcaccatcaacctcccattgcctgttctctctcttccccctctctccctctgtctctctctcagccaggaaacctggggtagggaggcttggagccagcgggtgcgtcgggaggctgcgggtactgactcgggccgcgcacggagattgcgggagaaggatccacaccgcggaagaaggatcagggtggagcctgtggctgctgcaggaggaggaacccgccgcctggcccacaccacaggagaagggcggagccagatggcaccctgcccaccgcttcccgcccacgcactttagcctgcagcggggcggagcgtgaaaaatagctcgtgcgcctcggccgactctgcagtgcgacgggcggagcttccagacgctccgccccacgtcgcatgcgccccgggaacgcgtggggcggagcttccggaggccccgccctgctgccgaccctgtggagcggagggtgaagcctccggatgccagtccctcatcgctggcccggtcgcgctgtggcgaagggggcggagcctgcacccgccccgccccccctcgccccgtccgccccgcgccgcgcggggaggaggaggaggagccgcggcggggcccgcactgcagcgccagcgtccgagcgggcggccgagctcccggagcggcctggccccgagccccgagcgggcgtcgctcagcagcaggtcgcggccgcagccccatccagccccgcgcccgccatgccgtccgcgggccccgcctgagctgcggcctccgcgcgcgggcgggcctggggacggcggggccatgcgcgcgct

SEQ ID NO: 15053 - DNA, 2300 bp, Homo sapien
gagctggctgctggggacagcagttgaccaagacaagctgcttcctgtgcccggagagcttacactccagagggtgaaacagatggcaaacacagcaaccaagagacataatgatcaaagattccgaggcctgctggaagccaagagaggggtctgtgatgcaggcacccagagctccccattttcaagagaaaccagagacttggatttttatgtaaactctcctaattttaaaggttgccagcgcaagcccgtttcctctgctctctcaaggctcccctccccgcctggcctcccactttctccagcgcgcctgcctccttctcttcctgggggccccatccgcactcctccccctgcaggatgccctacttgcacccaactcctcctgctgcccgcgccctgggggtacctgagcagcagctggcaggacggggtccactggactgggagtccactgcccaggaccctggggccagtgcacagcagctgctgaggcccccagctcagaccctgggccagccatcctgaaagaggccttgtagcgcgggtggacacctggagtccccagggctgcagctgcagaagctaaatgcctctacccaggcccagtgcacacacactgggggttggtctggaagagctggggggccagaggagtgagacaaggaagggttctgagagggcttccgggtttgacccccagctctgccaggttcctggggattaagtctacagggatttctgccatgggacggtttatgttctctggagctggagatcacaggaacaaatcctagctctgcccttcctagcctgctgaccttgcacaggctccttgcctttctgggcctcggtttccccatctggacactgagggcagtacccaccttgcaggataactttgaagaggtcgtgtgcctggcacacaacagtgcttgctgtagggcaggcttccacggcctctgccaggccctctcgaggaatcactctgctgggcagtgccccccatctgtgttttctcaggcctctgacccgagaggcagccaattgtttggactctgggcactgccagctgggagggctcaggtctctgaagggcccaaggtcctggtgacagctgtcaggtctccggggacagctgggtcatctctccagctcccaaagaaacaccaagaagcccctgcatgccaaggacaccacccctctggaccactgtgccccagctctgaccactgcagtcccatcttctctgtgagagggggtgacagagctccagtgcagcccaggttggggaggtgggtctgccagggaccagcttaggatttggagaatcggccctggccacctgaaggtccgaacctggaggagaaggacaaggggccagccacacagcctgggcaggggcctctgctttccacctttcagaccctgagggcagagtcccgtgggaggggaccctcagggggccgggggctggctgccacagcgacttcctccttcccgcagatccccaggcgtgcacagcaggcagaagctgtgggggagatcgcagcgcccgctgtgtcctcccggtgaccagctgtcacctgagcccagggcgcctgccccagcagcctggtgtgtttgccaagccagggctggagcttcctggacccgcctaccctggaggggatggagcagtgaagggcaccgggccaagcgctaggcatctggggctaaggagacagaagcccgcggtgcccgtccatgcgggccctctgccccagcacccacatctcaggacaccccttcctcccaggtctggcggtccagtttgggggtcaccgagctggggtggtgtgcagccagcagaggggattcaggatcccggggtgactcctggcccaggcctgtcaccccacagctggctcctggccccaaggcagccacgggcaggggtcgtgatcgggggcgggacggggcccggacctcctgaccgccccccaccccccgccgagcgggggtgtatttgcatgtccccgccccacgcacggcattggcggcggcggcgggaggccgggcctgagtggctgcgcgcccgtggagcggcgggggcggggcgcgagccgggcgcccgggatgatgccgccgccgccgccgccgccgccgccgccgccaggggaagggttcgggtccgggtcgggctcggcgggcgcggggtgcgggacggcccagggcacggcggctgcagcgggagcacactgagcgcccgcccgccatgtccaggaagaagacccccaagagcaaaggggccagca

SEQ ID NO: 15054 - DNA, 2300 bp, Homo sapien
ccacggtgctctgctgccccctcctgggcacgtccaggtgagggagggctggggctggcaccacgcacagtgcctaaccctagaaaagccatgtcttcagccgcacatgctcaggcagctaagggaggacgcctgcccacgcctgggacagaaggcttcactgctaatcacatcgtgcatctgtgtgtcctgggagctgcctgctcccggcccaccctctaggaggctctggctcaaacagcaatagggtcttcctcactgaccttggaggatgcctgtggccttgtgataaaatgtgggaaatcacagaaaacaccagaaacaacaactgccagcccggcctggccacaggtgaggtctgtgatttccgagcacgctccaccttgcactcaacttggccttttgattgcacaagcctttgttttcagtcctagtgaataaagttgtgttttctggagcgtctgtctcatctgttgaaaaaaatccacttctagagcaggatgctggagtttgagagactcagcaaggcccagaaccctcagcaggtgtgtggctaccattcctccatggcccatggctgcctccctaaggaggcacatgggaaccctaggtggtgtcaacttccctccacaaatctcaaaagcctttttggactcaccctggggcaaaaggcatgaaaaacagtatttgactgggcgtggtggctcacacctgtgatcccagcactttgggaggctgaggtgggcagatcacctgaggtcaggagtttgagaccagcctaacacggagaaaccccgtctctactaaaaatacaaaattagccgggcgtggtggtgggcgcctgtaattccagccatttgggaggctcaggcaggaaaatcgcttgaggtggaggttgtgccatcgcactcccgcctgggaaacgagcaaaactccgtctcaaaaaaaaaaaaaaaaaatcacgggcagaaatggagaaggcaatcccaagagatgaaaagtcactggtaacgagcttccgttttcatgtctgtacccttttccaagattgcctgtggatcagccagacctctggggtgccagaataggaaaataaagacacttgagagaaaaccgaatcaactcactacctttctttattgctaagcacttcaatagacacagcgcccaccttaccgctaggccctccggattgaggtttacttaggttcaaaacttgcagccggctcgcgacgaaacctgaaagtcagcgccaaaatacagacattaagtccccactccttcgtttcgggcaacacctgtttccactctcagctccccgtcaggagtgcgcaccctcaagcctcagtcttgctaaataatcagactgcacgtgcagttttcatacgaggtgtcagaagtcaaagcaattcatcacagactgggagaataagggaacccaagcccggcccagtcttacctgcaggtagctgagggcctgagattcgggaagaaacctttaaacgctaagggacaaagtggtgcgtaggccaggcctggacgcccagggacctggccggcctgcagcgttcggacggccctcaaagccacgctcgtggctcagttcgtcccaagatcgtagcacatggcgaacgtattaacaaacctcttccccctcggactcgaccccgaaaagacaggggcgggcgaggctcaagcttttatagaaactgtcccacctctgtcattgggctatcctggcggaagtgcccgccttcccccgccgctggtacgctccgctccctgccgcgttgtttccaccaatcgtaccgtggcatttcttttggagacggtctctcagacccagacccgaagctcctcccttatgcagagtccgtgaagcctaacggtgagtgacggatgaacaaagccaatcagacttcgatctgcaacatagagtgattctgaagctgccattcccgccccgcgacgacgaggccgccggaagtcgtagtttcggaagtgcggcgcgtgaggcagccgtccgggcccggagaggcggggaactacacgtcccggcgggcgcagcggcctggcgcttccggctcgcgcgtctagtccctttcccggccggcggccgagggggcatcatgaagcgggctggcggcgctgccgctcccgggcggccgcgggcgggtgagtgtccccgcggcgcgcccgacccggggctcgcgcctcgggaccgcgcggtggggcgggatcgggcgcgtggagatcgaggcgaggcgaggcgaggcgaggggtcgggccggggcggggag

SEQ ID NO: 15055 - DNA, 2300 bp, Homo sapien
acctctgtcccagggctgactcctctgagcctggctgcaggtgtgtggcactgcccacactcaggagcccctgcctcttccacaagagaagtcccccgagagcctagtctgggtcacacagggccaagcccctcgagtcgcagtggggcctggggaaggccgagggaggctttggccaggccccatctcccgagaccatgggacgcaaagatcaggtggggccaggtagctcgtggcgctgccaactgcaggggctgagatgtcgggttgagcccgagtcctgaaggctgagtggctccagggtgggtggccttccaggtggcattggaagggacaggtgggcctgggcagcctagagaatgggagaggagacagcaggagtggtagacagcccaggagctcaggtgcagggaaccaagggcttgagagccagcccctccctgcacacctgtaggccgggctggggggccccaggccagactgtgggcacggtggtgggtgatgagtggcatcttgaaggcgcatgcagggcgggcatggccaaagggacccagtcaggagggactgatggaggaggtactggagccagctgggctcagtgatgccccctgagctgtgctcctgctgggtgggggcagagaccagctccgccactttggcctgggactgggactgtcctgctcctctcaggcccctggggccttggtttgcagcccggcttccccagggtgagagcagggccgcaggagtgggctccctgctgctgcaccgcccccagagcaagcttgttctgagggctcctgccttgggagctgagcccatggtgtgtcctcatggggtgctgcgcatgggcctcgaggtggacagtgcaggtgggcccggggcaggagtcctgggcacgtggccttcctccccacagggagctcagcttcaagccggggctcggctgcgctatccgctgccagcaggagacagggctgtcccagctgcattctgccaggctcctggcttccaggctgcccaagtcctgaaagtgggacctgctcgggaggaggggcgcctgctgacagagcctggtgcctcacggggggagagtgggcgtcatccagcatggacagccccttccccgggctctgtcctgggtgtgacctgttggctgggtctctttttctctctaatgtttaccttcccctactggtgtccctgggcctggccagcactcccagcacccacggaggggccacgtctcccccaggcccaccagcccctctcttctggggagggtgattcccgcatgccttctccctgcccccccacccaccagcccctgagcccctgtggcgtggctgggagtgtgggtgacctgcacgggttccaggggcgggctcatctctctcctgtgcttttttccgtgcagtgcggtttgtgtggagttgggctccggtgactcaccctgcaggttctttctctggggtgtggctggtgtctccccgctgcagcctggtgctggctgggtcctgaccgcacctgtcgtggcaggaaacacattcgtcgtgccttggctggtccctgtgtgactgcgtcccgccacgtgggccacaccctgggcctacccaccaaggcccagccttggccccagggacattcagcctggaggtgactggctgtgactcaggacccagaggagtagagggagccaggcaggggtccctccacctcggggaagagctggatgggctcttcgggagctcagaaaggctaagccttgagggacggtgacgcagagccgcctgcctgcccgggcctctgcatacctgggatcggggtgaaggacctttgcctcctagaggcctgcctgagccggggctggtggtggaaggctgctgcggcggccccacggtgccccacagcaggtctgcacacttgcagcagcccgtctgactcacaggggcctgggctccatctctcaagcccctcatttgtgctccacccacaggaggtgcttcccaaggaccgtagatgcctctctagagcatgagctcaggcaagagtgcccgctacaaccgcttctccggggggcccagcaatcttcccaccccagacgtcaccacaggggtaagggtgtgcccctctgcaagcccaacatccccaggacccccagcatgccccagggatctggtgttgcctgcagagctcccagcgcagtcccgtcccgagctggggtctcaggggagctcggtgggggggggtgtggtgtgtgtgtgtgtgtgtgtgcgcgcgcgcgcgcgcgcgcgcacgcg

SEQ ID NO: 15056 - DNA, 2300 bp, Homo sapien
ctggtcaggcctctggcatggcctccagggcccatgtacaggatgagctgcaggggctgggaagggggcttctgcgacgtctctgtcccagccccaccgctcctgggtgtgctcgaggaggtgctgaacttccctgagcctcactttcccatccgtaaagtggggttcacagcagcgcctacactagcatcagacaagataacagctgggaagtcttagcacagggagggcccttcaacagtgctcactgtgggctgggtgccccggcggctcacacttgtaatcccagcactttgggaggccaaggagggaggattgcttgaggccaggagttcgagaccagcctgggcaacatgtcaagaccccatctctacaaaaaatacaaaaactagccgggtgtgttggcacacacctgtagacccagctacttgggaagctaaggcaggagaatcacttgagcccatgaggttgaggttgcagtgagcgatgattgtgccactgtactccagcctgggtgacacagcaagaccctgtctcaaaaaaaaaaaaaaatcggctggttgtggtgatgcacacctgtagtcccggctgcttgagaggctgaggtgggaggatcgcatgagcctgggaggtcgaggctgcagtgagccaggatggtgccactgcattccagcctgggtgacagagagagaccccatctctactttttataaaaaaagcagctgagtgcggtggttcaaaatgctgcaatcccagtattttgggaggctgacgcaggagcccaggaatttgagaccagcctgggcaacatagcaagacgtggtctttacaaaaacaaaggcaaaaaaaaaaaaaaaagctgggaatggtcacacatgtctgtaatcccagctactctggaggctgaggcaggaggactgcttgaggccgggagtttgaggctgcagtaagccatgactgcaccactgtactccagcctgggtgacagagtgagaccccgtcttagaaaaagtaggccaggtgcagtggcgcacgcctgtactcccagcactttgggaggagttcgtgtccagcttggccaaaatggtgaaaccccgtctctactaaaaatacaaaattagctgggtgtggtggcaggtgcctgtgatcccagctactccggaggctgaggcaggagaatcgcttgaacccaggaggtggaggctgtagtgagccgagatcgcaccattgcactccagcctgggcgacaagggtgaaactccgtctcaaaaagaaaaaaaaagcgctcagcactcagtgaatgtcagagacatggggcagggctggacggtcctcagcccccaagctgactgctggggtacctggaaatggaggcctggcttgggggtgctggggccggcctcctgctggaaggccccgcctgtccaccttgccttcccgccaggctcctcctccaagccggcatcgacattaaccgccagaccaagtccggcacggccctgcacgaggctgcgctctgcggaaagacagaggtggtgcggctgctgctggatgtgagtgtggggcccaggggcgctgggcccagtggactgtaggggctcctgacagagcctcatctctcacatgtgcagagcgggatcaatgcccacgtgaggaacacctacagccagacagccctggacatcgtgcaccagttcaccacgtcccaggccagcagggagatcaagcagctgttgcgaggtgggcccaggcagggcagaggggcagtggctggggctggggctgggccagatcagcccgcaggacttcgggggccccctcctgtatccccagaggcctcagcggccctgcaggtccgggcgaccaaggattattgcaacaattacgacctgaccagcctcaacgtgaaggcaggggacatcatcacagtaagcatggccccaggggccatctcagcagggagggggcggcacctgggcgtgcgcaccccagaacaccctcccgccgcaactggggggcactgggcaggagactctgcgaaagggggcatctccctgagcgccccccaccttactggccaggtcctcgagcagcatccggatggccggtggaagggctgcatccatgacaaccggacgggcaatgaccgggtgggctacttcccgtcctccctgggcgaggccattgtcaagcgagcaggcaagttccaccccaccctggggggcaggcaggagcccctgggcttgggggctggaagcagcgagtgtgctgagggtgtgggggcccagcagggctgggtt

SEQ ID NO: 15057 - DNA, 2300 bp, Homo sapien
tatttttagttcttcctatgtgctcttcacactgcaaggtagcgtagatacaaagatgcacaaaacacagttgctgcacaggcagagaggcccaagaatatcacaatatctacagcagccatttttttgagcacttactaagtcctgccgtgaaatgctttgtggatagtatcacaatttatcctccagtaacctaaggggaggtagcatgcatatcctcattttacagaggggcacagacacttaggcagtgggctgggtgtggtagctcacgtctgcaatcccagcactttgggaggttgaggtgggaggactgcttgaggccaggagttcgagaccagtctaggtaacatactgagacctcatctctattaaaaatcaaaaaaaattagccgggcgctactcaggaggctgaggcgggaggactgcttgagcctgggatgttgaggctgcagtgagctatgatggcgtcactgcaccccagcctggacgacagagcgagaccctgtctcagaaaaaagaatgacaaagtgaccagctcatggtcacaaaccactaagagggggaataggacacatccagaggtgcgggtgcaaagcccagacttacaacctcaagactctgggaccccaggtgagccccttggcttctctgagcctcagtttcttcatctgtaaaatggggacagtgagtccaacctcatctaggaggtgaccagcacagtgcctgacccagcgggtactcaactggtcattggaaagggcaagaggaaaggccctagcatttggggacccctcccaggagtgctggaagaccaagggctgctacctgaacctaacaggagaccccacggagggaacgggaacggccagctgcccacaggatgccgggaccccggtgcctgtcaccttccctgtccctgctgtctgacctcctctgtccccctggacctgctcaatggtctggggccacacagagtggggtgccaggccatgcctcatagaatgggtgcgaccctccccaaattctccaaacggccttgcccgcttgggtgatgagggaaacggagcctgagtcgggactcagacccccactgatctgcctctagaatgctgcaggcctgacgggagagggcctgaggcgcagggtggcccaagccttcagccaggagctcagagggtcacaagtcggggcctccagcacccaggaagcaggactcgcctgcctgggctgcaggctggagagtgggcagacgtgggccgggggtcggttggtgccggcgggaggttccagcccctgtggatggagatggaggcgacccccagtcggtgcggggagtggggagttgagctccctcagtgggggtggtgggggctaccttggggtcaggcttcggactgaggctgggggaagctgtggcgcccgcattatttgcggagaggagcaggaggatgcttgggggttgggggtgcgggttccctgacaccgaattcattattgggagattcctcttcacaatccctcgacacctcccacgggaaccctgggccaggaacgcctgacagcctggcgggccggctccaggggcactggcgcccgggtctctcggcgcccggtccccgcccgcccgctgcctcggaaccgtcccccgcgggtcccgcagcctctggaagcctctctgggctcagccccgcgccgccgccgcgtcggggctcccagtgcacccccggcggccgcgtccccagcccggctagcagccccaggccgcccgcgtccgcagaggcctggcctgagcgcgctgcgcgcacgtggggagggggcgtcccggggcgggcgcggggagggcggagccacgggcccgggcgcgcggccggcgcgggctgacggaggtcggcggcccgggagcggaccccggcgtccgggaggcggcgccaggtgccgcgcccccgccccgcgcccgccgcgcgcccccgcccccgggccgccccccgcccgtgacgcgctccccgccccctccgcgccgggagcccgagcccaagccggagcccgaggagggcgaaggggcggcgggcggcgaggaggcggcgggggaggcggcgggggaggcggccggtgccgcggggccgccgccgcctctgagccgcgccgagctcacgagcgcagccgcgtcgctgcggccccggccgcgccatggggaaggagcaggagctggtgcaggcggtgaaggcggaggacgtagggaccgcgcagaggctgctgcagaggccgcggcccgggaaggccagtgagtgccgggggcg

SEQ ID NO: 15058 - DNA, 2300 bp, Homo sapien
attcaagaccagcctgaccaacatggagaaaccctgtctctactaaaaatacaaaattagctgggatggtggtgcatgcctgtaatcccagctactcaggagactgaggaacccaggaggtggaggttgcagcgagtcgagatcgcgccattgcactccagcctgggcaacaagagtgaaaatccgtctcaaaaataaataaataaataaataaataaataaataaataaataaaaggccattctgcactgtggtggacagtttggaagggggccagagtggctggggcaaggaaggaggcttttatgggggatgggggtggtgagctagaaccagggcagtggaaaggacaggaaggtatatcacaggtaaaatcggtggctgaagggaagggaagggtgagggaggggaggtgtcggatcttgcccagctgtaatacaaggtgggcactgcccacagaaggggagctactcagggatgggttgtcttggccctggaatatggtggaccctgcggggcattcaagggacagtgtcttaacagggagctgaggccatcagagctggagacagggtggaaggggcccaggacagggacagcattggaagctccagagctagcagtcatcagccccctggtatctcgtggggtgcacagagtgaatgctgaagggcctgagtccttgcgggcaggcagggaaagagactaaatgtcggggacaggagctaggagaaggcagcctttcaggcatggtgccgtcaaccatggctcagatgcgtcaagaagtgggagggggccgggcgcagtggctcacgcctgtaatcccagcactttgggaggctgaggggggcggatcacgaggtcacgagatcaagaccatccaccatcctggccaacatggtgaaaagtctgtctctactaaaaatagaaaaattaactgggtgtggtggcatgcacctgtaatcccagctacccgggaggctgaggcaggagaatagcttgaacccgggaggtggagattgtggagagccgagatcgcaccactgcactccagcctggcaacaaagcgagactccgtctcaataaaaaaaaaaaaaaaaagaaagaagaagtgggaagaggccgggcgcagtggctcacgcctgtaatcccagcactttgggaggctgaggtaggcggatcacttgaggtcaggagtttgagaccagccttgcgaacatggtgaaatcccgtctccactaaaaatacaaaaatcagccaggtgtggtggtgcgtgcctgtaatcccagctactcgggaggctgaggcaggaaaatcgcttgaacctgggaggcagaggttttgcagtgagtcgagattgcaccactgcactccagcctgggcgagaaagcgagactctgtctcgagagaaaaaaaaaaaaaaggtgggaagaaggaaaagtatccactggatttagcaaagtgagattgtcagtgaccttgaggaatttccactggagagctagagagctgggggtaaaaggcagatgactggggttgcggaatgagtgggaggtgaggacgtggaactagaaaaatggtgaggaccgctctttgaagaagataatttgggattgttttatggtgtttttttaaaggctaaccggcaggaaggagaggaggtgaaggtataggaaggaaggctccatgggaactatggcctggtcaagggacaagatgcaccccctctgcggccagaggaaggggtgcagccaggtctgtaagagcagcaggaaaaaaccatgcgacagcctgtctcaagggtgagggcaccggcgtggagctcacagagctggaatgagggcctgtggttttgagggggaccctgggctcagtgggatgtcctgagggtcaggctggggctggggtgccagatctagcaagtaaaactacaggatacccaataaaatttttttagcataagtatttcccatgcaatgtcctggatatacttacactaaaaaaaaaattattcgttacttgtctgaattcaagtcctgtaattttcagccaatcctagcccagcgtggcgcagtagtgggtcagggagggcaccggaacagcgcgacccgacagcccgggaaacggacagccgtgtcagaagggcaggtgccagtgggcaggaggccggagagaaagccgcagcttccttccacctcgcgccgggcccgcggccgcgcacggggaccgctccgagttcctcccggcgggaaccccccgccccagaactttggtctcgtcccacccacccccgcccgcgc

SEQ ID NO: 15059 - DNA, 2300 bp, Homo sapien
gacagtgtcttaacagggagctgaggccatcagagctggagacagggtggaaggggcccaggacagggacagcattggaagctccagagctagcagtcatcagccccctggtatctcgtggggtgcacagagtgaatgctgaagggcctgagtccttgcgggcaggcagggaaagagactaaatgtcggggacaggagctaggagaaggcagcctttcaggcatggtgccgtcaaccatggctcagatgcgtcaagaagtgggagggggccgggcgcagtggctcacgcctgtaatcccagcactttgggaggctgaggggggcggatcacgaggtcacgagatcaagaccatccaccatcctggccaacatggtgaaaagtctgtctctactaaaaatagaaaaattaactgggtgtggtggcatgcacctgtaatcccagctacccgggaggctgaggcaggagaatagcttgaacccgggaggtggagattgtggagagccgagatcgcaccactgcactccagcctggcaacaaagcgagactccgtctcaataaaaaaaaaaaaaaaaagaaagaagaagtgggaagaggccgggcgcagtggctcacgcctgtaatcccagcactttgggaggctgaggtaggcggatcacttgaggtcaggagtttgagaccagccttgcgaacatggtgaaatcccgtctccactaaaaatacaaaaatcagccaggtgtggtggtgcgtgcctgtaatcccagctactcgggaggctgaggcaggaaaatcgcttgaacctgggaggcagaggttttgcagtgagtcgagattgcaccactgcactccagcctgggcgagaaagcgagactctgtctcgagagaaaaaaaaaaaaaaggtgggaagaaggaaaagtatccactggatttagcaaagtgagattgtcagtgaccttgaggaatttccactggagagctagagagctgggggtaaaaggcagatgactggggttgcggaatgagtgggaggtgaggacgtggaactagaaaaatggtgaggaccgctctttgaagaagataatttgggattgttttatggtgtttttttaaaggctaaccggcaggaaggagaggaggtgaaggtataggaaggaaggctccatgggaactatggcctggtcaagggacaagatgcaccccctctgcggccagaggaaggggtgcagccaggtctgtaagagcagcaggaaaaaaccatgcgacagcctgtctcaagggtgagggcaccggcgtggagctcacagagctggaatgagggcctgtggttttgagggggaccctgggctcagtgggatgtcctgagggtcaggctggggctggggtgccagatctagcaagtaaaactacaggatacccaataaaatttttttagcataagtatttcccatgcaatgtcctggatatacttacactaaaaaaaaaattattcgttacttgtctgaattcaagtcctgtaattttcagccaatcctagcccagcgtggcgcagtagtgggtcagggagggcaccggaacagcgcgacccgacagcccgggaaacggacagccgtgtcagaagggcaggtgccagtgggcaggaggccggagagaaagccgcagcttccttccacctcgcgccgggcccgcggccgcgcacggggaccgctccgagttcctcccggcgggaaccccccgccccagaactttggtctcgtcccacccacccccgcccgcgccatggtctcgccctagggagccatcgataactctacgctcggcctcgatcgactcgctccggctcccctcgccgtcctggacacggcggagtgcggagccgcccgtaaggtacggaggccgcgagccaggggccgggaaccggctgctgggtggctgggagagcacggccaggggaagccggccagcaggacggagcaagggcggtcaccggaggaaaggggagctcgggggtccagccagactgcgccctttcccatcagggcctgccgctggcctgctacgcatgcgcagccgcagcgctcggctttccccggcccatccgccgccttgcgcacgcgcagcccgcccctgcggcagagtggcgcccgcgcgtgactcccccctgccggctgcggaggtgggggggggacggcgcccccgccgtgtgcgtggggcggggatggagcacgcgccctggagccccggagccaggtatcacgcgtgtgacgcgtgtccctgaacctacctgcgcttcttgtcccaactc

SEQ ID NO: 15060 - DNA, 2300 bp, Homo sapien
acggcggagtgcggagccgcccgtaaggtacggaggccgcgagccaggggccgggaaccggctgctgggtggctgggagagcacggccaggggaagccggccagcaggacggagcaagggcggtcaccggaggaaaggggagctcgggggtccagccagactgcgccctttcccatcagggcctgccgctggcctgctacgcatgcgcagccgcagcgctcggctttccccggcccatccgccgccttgcgcacgcgcagcccgcccctgcggcagagtggcgcccgcgcgtgactcccccctgccggctgcggaggtgggggggggacggcgcccccgccgtgtgcgtggggcggggatggagcacgcgccctggagccccggagccaggtatcacgcgtgtgacgcgtgtccctgaacctacctgcgcttcttgtcccaactctaaaatgggaatgataagcgccattcggcagcgccttgtgggtctataatctacttagcacagagagtgtcttctaagtacttcacatccttctctgcagatgctctgacctttgacccctgccgttcagctctagggcccgtgcaggccacaccatgaacacctccccaggcacggtgggcagtgacccggtcatcctggccactgcaggctacgaccacaccgtgcgcttctggcaggcccacagcggcatctgcacccggacggtgcagcaccaggactccgtatcctccacccggggcgggcagggcggcgctggggggatgcctcgtgtggggaccacagcctgtgtgaaggccagatggtggaggcctggggggccctggcctcagggctaccttcccgtcatcctccttaacagtcccagcaggtgaatgccttggaggtcacaccggaccgcagcatgattgctgctgcaggtatctgtgatccttgatctctaaactcctgagctctggtgggtcgacctcagcacagccaagcttcagttcagcctgtgtccctaggttaccagcacatccgcatgtatgatctcaactccaataaccctaaccccatcatcagctacgacggcgtcaacaagaacatcgcgtctgtgggcttccacgaagacggccgctggatgtacacgggcggcgaggactgcacagccaggatctgggacctcaggtgcggtggggagggggcgtgctgcccggggctggggtgggctgctctgggagaccgttttaggttgggttctcttcaagcagaggctgagacagggagcttcctgtgggcgacttactgagagaagtgaggacaggaggagagtgaattgcatcagagcgcgagtcctgccttgagcccggagccagcttgttattccccttccaccagccactggcttaggctccctgctggagcagagggccctgcgtcccaagtatttcccaagaggcaggtccttcagcagagggaggggaggaatggccaggccgaggccatctgggtagggcaccaacaagcccagatggacagcatgtgccccggcccggcccgcaggtcccggaacctgcagtgccagcggatcttccaggtgaacgcacccattaactgcgtgtgcctgcaccccaaccaggtgaggggtgctcatggggccaggcaccctgggactttggagggctgggcttgggccctgcctcaccacccctgcaccccaggcagagctcatcgtgggtgaccagagcggggctatccacatctgggacttgaaaacagaccacaacgagcagctgatccctgagcccgaggtctccatcacgtccgcccacatcgatcccgacgccagctacatggcagctgtcaatagcaccgtgagtcctggtggcaggtgctgggtgcgggcagcttggcactcagccctcagcctctgcaggtgggcttattcctggatgtcccttagcggccccctcctgctttccccatcccgggcactaacacccaccttgccagcaaagccagaagccttagtgtcgctcccgatggcttagtcctgtctgcaggtcggtcactccgctttctggagtctctcccaagtcgatccacttccctcttttcactctgttgcctcctggtcccagtcacccttgtttctggtgacggctgacacactctctgaggcttcctttccccctccctgacctcccctggcccctgacacgttctctcttggatgcttctagtggtgcctggtcagtatcagccaggtggcgtcattcccctgaggagacccggggctgctggcctcgcccgt

SEQ ID NO: 15061 - DNA, 2300 bp, Homo sapien
agtgtctgttccgtttcagatacccagggctgctgcccagttctgtaaacgcagcccagctaaagctctgctgtctcaagtgtgcatttatacccaggtgatttggacggagcagctaccatggcgtggacgccttcactgaactccgggctgcagtgcagggagctcagagcagtgctgctaccagtttttaactttgaacaactgtgtcaggcaatggatttgaattttaagtgtattaatagctgtgctctgtgtcgtaggcaaaattccactgaaggagcctctgtgccctgcagccggcagcgcggctgaagcatgtgttggccaaggaatgcctgtcatccaggtgccctgcagccagcagcgcggctcaagcatgtgttggccaaggaatgcctgtcagtcatccagggctctgggaggggacgagagttatgtccccaagaacaggaagtcctttacaaagcatccagtctcttcctgtcctccccttccctaggctggggtaggggttagagactggtggcccaggaggtcacctgccttgccctggattccctcttcagtggccagcaggacttggcagggccaccagctcgccaaggttctgggcggggctccagcctctcctgcctgctccttggctctgctgacctttcacaggcctgacagcagactcagcagggccatcccgggatgctgcaccttctggctggctccctaccagcgcctttccctgtacctggcagcttctctcttggccccacagtcacagcactccacttggtcacaaagacttcagagcaataagaggcgtcctgagccttcagcacctcccaggcctgggatatcgggttcagagggtgctgcagagcagcatgagggtggctccacccatgaggctggtgacactgacgctggcttggctaagttggctcaagccgggtctggcctgacagggtgcagtcacaccaggagcgcatggcagatgcagcctcagtgatgcctctcttgccgggtaggggctgggagtccccgtgcatcctgtctctggcccatgaggggctgcagcactgtgggcgccagagcacagattaaactctcaaacccacactggctcaggtgtccttgctctcaccttgcattggcccgggtgatgccgtctcaccacgggtgggaggactcaaagtagatgggtaactggggttccaactccagagctggaatgccaactgcccactcccagcctggttcagaggaagatgttttgaagaatgagggaaagccaggcacaaagggaagccagggaagcaaagggccctggagtgaagctggtgggctgccgtgtcagagcgcccagggcagggagcagagctcagaagtaatgctggcccgggcgcagtggctcacacccgtaatcccaacgctttggaaggctgaggcaggtggattacttgagatcaggagttcaagaccagcctggccaaaatggtgaaaacccatctctactaaaaatacaaaaattagcgggacttggtggcatgtatctgtaatcccagctactagggaggctgaggcatgagaattgtgtgaacccgggaggcagaggttgcagtgagctgagatcacgccactgcactccagcctgggggacacagcgagactccgtctcaaaaaaaaaaaagttgggctaggcgggcccccgaggctggcctgactgtcccaggggcacaggctccagcaggctgcctgtctgtggtccaggcttcaggaacccccggtcttgggtgtgcgggggctgggaagtggctgggggtgcacagtcccacacctgtcattcactgaacaggcacgtattgacagcttgtggcgtgtcaggccctgtgcccaactctgggagtcaaggataacctgacagactcaggccactttaggaaaacgaaatccaccccaaccacacttagcgagtcaccctggccgggcctgggctgccctccagtcggtcagccggactggatttccacgcggccgagccctacgcctcccagaccctgagctccagtctgcacaggccaggtgtctggagccgggcctggtgacaggcatcccccaggtgggaggaggggctgtcctggctctgacctggatatcagatccagagctgagggggaggcgcagggtcaggaggggaggggttctgttctgagtttcccctggccaaggctgcagacaagggacgcagacaatcggcacattgtgagcaggggctgcaggatggaaccagcaagctgctgtgc

SEQ ID NO: 15062 - DNA, 2300 bp, Homo sapien
cggcctcccaaagggctgggatcataggtgtgagccacagcacccagccaggatgaatttcacaaacattatgttaaaccgtagaagcaagagccagaagcacataccgtataatcccaagtataaagcagtccggaggcttggttgtgactctatggtgataggagtcagaaaagtagtcagcaatgtgctatctgctattgactggataggaacaagagggaacttcctggggtgttggaaatactttatactttggtctgggttatgtttacacaagcatatacatatgtaaaaaaatctgctgggtgcggcagctcacgcctgtaatcctagccctttgggaggccaagacaggaggatcactggaggccaggagttggagaccagcctggccaacatagtgggactccgtctctacaaaaaatttaaattaaaaaaaaaattaggcgtagtggcacacacctctggtcccaaatactttggaggcttaggtaggagcatcacatgagcctaggaggtcaaggatacagtgagctgtgataaggctacagtgagctgtgatctagccactccactccagcctgggggacagagcaagaccctgtcgcaaaatatatatatacatgtaaaaatgtaaaacttccggccgggcgccatggctcacgcctgtaatcccagcactttgggagaccaaggtgggcggatcacgagatcaagagatcaagaccatcctggctaacacggtgaaaccccgtctctactaaaaaatacaaaaaaattagccaggcgtggtggccggcgcctgtagtcccagctactcaggaggctgaggcagaagaatggcgtgaacccgggaggcggagcttgcagtgagccgagatcgcgccactgcactccagcctgggcaacagagcaagagactccgtctcaaaaaataataattaaaaaaataaaaggccgggcgcggtggctcacgcctgtaatccaagcactttgggaggccgaggcgggcggatcacgaggtcaggagatcgagaccatcctggctaacacggagaaaccccgtctctactaaaaatacaaaaaattagccgggcgtggtgccatgcgcctgtagtcccagctactcgggaggctgaggcaggagaatggcgtgaacccgggaggcggagcttgcagtgagccgagatggcgccaccgcactccagcctgggcgacagagcgagactccgtctcaaaaagtaaataaataagtaaataaaataataataaatgtaaaacttccatcgagctgcacggttttcatgccctttactgtaatgttttgcctcaattaaatacctaataattgatgacgatgacggcgagcaatcactgagtaccaggttctagacagtgtccttagaccctaatcccccagcctggtaatggctggttcgtgttacctccaaggaaccgggaacgcgtttttgcaaaggactgaggcgcgtactcacgcctgccggggaaggagccccgggctggctcgcgggactggccggtaagcgacccacgtggtggccccgtgtcccgagcgcgtccacggcacagaggcacgggcacggccgacgaaggtgccccggccccctcccgcggcgctcctgcgagagccccgcccatgcccgcgggagagaccggccaatggacagccggcctggcccgggtcactccgtgaagggcctcgtcacctaggctgaccactcgcttccaatgggtgagcggcccgcggcagcccgggaacagcggccttgcgcctgcgctgctctcccctctggcgcatttccgcagcgagcgcttcactccgaatgccggttggagccctgccagccaatcaccggggcgtcccaaggccggtagccaatgatcgcccctctccccgcgccgggcctcaccgattggcgctgagctcccgcagcccgcgggaggcgggggcggattggcgaaggtgcaggccaatgggcggcgggcgcgaggcgctgggccaatgagcgccccgggggcggggagggcgccgcggcgggcggctgcgaggagcggccggcgggcggcggcggccggcgggcggcgatggcggcggcggaggccggtggcgacgacgcccgctgcgtgcggctgagcgccgagcgggcacaggcgctgctggccgacgtggacacgctgctgttcgactgcgacggcgtgctgtggcgcggggagaccgccgtgcctggcgcgcccgaggccctgcgggcgctgcgagcccgcggcaagcgcctggg

SEQ ID NO: 15063 - DNA, 2300 bp, Homo sapien
tgcctcccaggttcaaacgattctcctgcctcagcctcctgagtagctaggattacacgcgtgcaccaccacacccagataatttttgtatttttagtaaagacgtaattttgccatgttggcctgcttggtcttgaactcctgatgtcaggtgatccacccacctcagcctcccaaagtgctgggattacgggagtgagccactgtgcctggcccacaattttttaaaagtatgtaagagggctgaggcaggcagatcgcttgaactcaggagttctatagcagcctaggcaacatggcaaaaacccatctctacaaaatatacaaaaattagctagtgatgggcacctgtagtcccagctacttgggtggttgaggtagaggctgcagtgagctgagatcacggcactgcactccagcctgggcgacagagcaaggtgctgtttcaaaaaaaaatctggccaggctcggtggctcatgcctgtcatcccagcactttgggaggccaagggggacggatcacctgaggtcaggagttcaaaaccagcatggccaacatggtgaaactccgtctctcctaaaaatataaaaaaattagccgggtgtggtggcagttgcctgtagtcccagctactcaggaggctgaggcaggagaatcgcttgaacctgggaggcggagattgcagtgaaccaagatcgtgccgttgcattctagcctaggtgacagagcgagactccatctcaaaaaacaaaaacaggccgggcgcggtggctcatgcttgtaatcccagcactttgggaggccgaggcgggcagatcgtgaggtcaagagcttgagaccatctaggccaacatggtgaaaccctgtctctactaaaaatacaaaaattagctggccatggtggtgcactcctgtagtcccagctactcgggaggctgaggcaggacaatcatttgaacccaggaggcggaggctgcagtgagatcgcgccattgcactccagcctaggtgatagagtgagactctgtctcaaaaacaaacaccccaaacaaacaaaaaccaaaaacaacccccatctccaaaaccaaaaattcaacgtggctgggagtcgtggctcacgcctgtcatcctagcactttgggaggccgaaatgggaaaatggtttgaggctaggagtttgagaccagcctagtctaaacagcaagaccctgtctctatttaaaatacataatgcaaataaattttaaaaaatttaaaaagtggctgggcacggtggctcacgcctgtaatcccagcactttgggaggccgaggcgggcggatcacgaggtcaggagatcgagaccatcctggctatcacggtgaaaccccgtctctactaaaaatacaaaaaattagcctggcgtggtggcggacacctgtagtcccagctactcaggaggctgaggcaggagaatggcgtgaacccgggaggcagagcttgcagtgagccgagatcgcgccactgcactccagcctgggcgatagaaagagactccgtctcaaaaaagaaagaaaaaaaaattaaaagtatataaaagaataaaacagcttcgcagagctacccatgagccatccccgacccgtgttcttttcccgtgacccgggtaaccatcttgggaggctctaacaccctaggcggtcagtgggcagcaggcaccacacccctggttggagctgtggcggcttcccagcagcagccgcgggcggggcgacctgtccttaggtacggaagcgctggggcgcggctgcctagcagccgccagtccgctcgcccctcgcgttctctggctctcaaatccgagtgcagcctcgaacataggtccttctgccgccccgccccctggctggcaatctgctccaccgtaaccacgccctccccacagtcccgccccatcttcgctctcagcgcgcccggccccgcctctgccctttaaggccacaccgctatccaggcccggctccccgcctgtccgtcaatccgctccggttctgccccgccctcctcttgccgttccctcacgctggcctcggcgcggcccgttgttatgacgacatggtcgtaaatccgccatcttcctgcggcgcgttgcgacatggagggcgcgatggcagtgcgggtgacggccgctcatacggcagaagcccaggccgaagccgggcgggaagcgggcgagggtgcagttgcggcggtggcggcggccttggcccccagcggcttcctcggcctcccggcgcccttcagcgaggaaggtaaccgg

SEQ ID NO: 15064 - DNA, 2300 bp, Homo sapien
tcgcctccctgaagtggctttctgcagtgactttgtccattgatctgtttactgccttccctggggccacaagggagcctgccagggtggggcccatggttgtgttcttggtactgccagggcacagcctgccccgggtgctggagaccttcctgtggttccccagcaggtggccagcgaggcctcagcggtgcccaggacccacccatgtcctcagtgcagtgagaccttcccgacagcagccaccctggaggcccacaagaggggccacaccggtaggtgatgggtgggtgtgtggcccatggcagtggatgggctataggtggccggggtgcttctgggtgtccagggtgggtccatagacagcagggagccaggggatctgtgggcaggtggcaggcggcctggcgggcccgcgggtgatgggcttggcctgatgctgtgtgtggctgcagggccgaggccgttcgcctgcgcgcagtgtggcaaggccttccccaaggcctacctgctcaagaagcaccaggaggtgcacgtgcgtgagcgccgcttccgctgtggcgactgcgggaagctctacaagaccattgcccatgtgcgtggccaccggcgcgtccactcagacgagcggccctacccttgtcccaagtgtggcaagcgctacaagactaaggtgggtctctggccgcaggaccctggcgcctgatccccccatcctgctccctggccgtggcccaggtgcacccccttccctgcctccaccatgctcagtcttgacccagcccctcccttgggccacaggcgggaggggagagctgtagtctgttgtggccaaggccaggctggcactgacaggtgtctccacagaacgcacagcaggtgcacttcaggacacacctggaggagaagccgcacgtgtgccagttctgcagccgtggcttccgagagaagggctcactggtgcggcacgtgcgacaccacacaggcgagaagccgttcaagtgctacaagtgcggccgtggcttcgccgagcacggcacgctgaaccggcacctgcgcaccaaaggtctgggccggtggaggtgggagggggaggggagggggccggggcttgcctagccctgaccgagtccccacccacagggggctgcctgctggaggtggaggagttgctggtgtctgaggacagccccgcggcagccaccaccgtcctcacggaagacccgcacacagtgttggtggagttctcgtccgtggtagctgacacccaggagtatatcatcgaggtgggtgtggggccctggggccgtgctgggacccaggggcagccaaggctgacctctgtccttctgcccatctgcccaggccactgcggacgatgcggagaccagtgaggccacggagatcatcgagggcacccagacagaggtgaggggtagggcaggcgggggcggggaggctccctggcacagccgctcttgctgagccgtggccctgcaggtggacagccacatcatgaaggtggtgcagcagatcgtgcaccaggctagcgccggccaccagatcatcgtgcagaacgtcaccatggacgaggagacggcgctgggcccagaggcggctgccgccgacaccatcaccatcgccacccccgagagcctgacagagcaggtggccatgacgctggcctcggccatcagcgagggcactgtgcttgccgcccgggcagggacaagtggcactgaacaggccactgtgaccatggtgtcatcagaggacatcgagatcctggagcatgcaggcgagctggtcatcgcctcgccggagggccagctggaggtgcagacggtcatcgtctagcatgaggtctgcggggtcctggccgggcagggacagggcagaggactctgagcgccccacccatgcctgcctggcctggtagagaagatggcacaggatggaggcgccccaagacggacagtgtacataagagtttcttgttgctttacaataaaacatgagaacctgcagcttgtgatgttgtggcagtggcagcctccgcggctggtgccaccacctttgcccaggcccccgcagcagcacctgcctcccaggccactcctagactcacgtgcctggccgccccacccaggggcttctgccagccctggcggcgccttggtgctgtgtgggtgtcattggcatgttgaccaacagcctcctgccctgcccagctggagctgtgcccccagctgcgctgcctgaggcctgtgggtgggtgggaggaccagggacggggacag

SEQ ID NO: 15065 - DNA, 2300 bp, Homo sapien
tggcaagcgctacaagactaaggtgggtctctggccgcaggaccctggcgcctgatccccccatcctgctccctggccgtggcccaggtgcacccccttccctgcctccaccatgctcagtcttgacccagcccctcccttgggccacaggcgggaggggagagctgtagtctgttgtggccaaggccaggctggcactgacaggtgtctccacagaacgcacagcaggtgcacttcaggacacacctggaggagaagccgcacgtgtgccagttctgcagccgtggcttccgagagaagggctcactggtgcggcacgtgcgacaccacacaggcgagaagccgttcaagtgctacaagtgcggccgtggcttcgccgagcacggcacgctgaaccggcacctgcgcaccaaaggtctgggccggtggaggtgggagggggaggggagggggccggggcttgcctagccctgaccgagtccccacccacagggggctgcctgctggaggtggaggagttgctggtgtctgaggacagccccgcggcagccaccaccgtcctcacggaagacccgcacacagtgttggtggagttctcgtccgtggtagctgacacccaggagtatatcatcgaggtgggtgtggggccctggggccgtgctgggacccaggggcagccaaggctgacctctgtccttctgcccatctgcccaggccactgcggacgatgcggagaccagtgaggccacggagatcatcgagggcacccagacagaggtgaggggtagggcaggcgggggcggggaggctccctggcacagccgctcttgctgagccgtggccctgcaggtggacagccacatcatgaaggtggtgcagcagatcgtgcaccaggctagcgccggccaccagatcatcgtgcagaacgtcaccatggacgaggagacggcgctgggcccagaggcggctgccgccgacaccatcaccatcgccacccccgagagcctgacagagcaggtggccatgacgctggcctcggccatcagcgagggcactgtgcttgccgcccgggcagggacaagtggcactgaacaggccactgtgaccatggtgtcatcagaggacatcgagatcctggagcatgcaggcgagctggtcatcgcctcgccggagggccagctggaggtgcagacggtcatcgtctagcatgaggtctgcggggtcctggccgggcagggacagggcagaggactctgagcgccccacccatgcctgcctggcctggtagagaagatggcacaggatggaggcgccccaagacggacagtgtacataagagtttcttgttgctttacaataaaacatgagaacctgcagcttgtgatgttgtggcagtggcagcctccgcggctggtgccaccacctttgcccaggcccccgcagcagcacctgcctcccaggccactcctagactcacgtgcctggccgccccacccaggggcttctgccagccctggcggcgccttggtgctgtgtgggtgtcattggcatgttgaccaacagcctcctgccctgcccagctggagctgtgcccccagctgcgctgcctgaggcctgtgggtgggtgggaggaccagggacggggacagggagatctgggagcctcggcctccaccgcagggtgagcaggtggagcagcagcaggagatgctgggtagggagtgtggctggtcctacctgcgctgccttgctttccctgaagggattctgctcagggaggcagagtctaggcgacctaatttctaggggcgaggacaagaacacagccgcaccgggatgtggctgaccgtctacctccctcctagggggctggcaggggcttctgggacggttttgggacaggtctggggcaccagaaccggctcaggcaggtctcccaccccttaccctgggggtctccatgggaatgaaagccaggagttcatcaggcacccagctgagtcgagggggcgggacccagtgcagcccggcccctccctggcccaggacctcaaataccggcccctgccttggtgccagagctactgccagagggagtcagtgcagtcctgtgtcggacacgcccgcagcctggacccgggatccccatccccctaggatctctgagcctcgggcctctgcacccacatccaaggtgagtctctcggctgccctgagctggggctggatgggccggaccctccattccggctgcagcttcccgcgcagtgagaaggcagcggtccctgagagcccagcag

SEQ ID NO: 15066 - DNA, 2300 bp, Homo sapien
cagagccaccagggaaaagtgaggctcttgggggtggtttgaccctgcttacctgggagcacacttttcccttccccgatgacctgggatggtggccaggccgtgcccttgctgttgctgggcagtgtccttttggaaagggagctgccccaggctttagtgcagctgccaaccctgttaggcctggcctctcgaggcctcttctgacctcaagggtcacaccccctcaaagatcctctcacccatggtagttgctgctcgtggttctgtctgtccgtgcaccgatgcacacaccgcaccccaccactgtactctgaaattggcgagtgagtggagagccagctctgcggagtcatcacgcagccatggttgtgcctgccgttcatggtggtctttcaggttatcttggcaacatgtacattgcttttattttttttcttttttgctttcattgtacagtcagtactataaaatttctcttttgagttttatacctttgtagcattttagatgacattgtgtttgtactttgttgtgtagagtggaagaattgtgttgaataaacccaagatcggaatgcaaatctagttctgggttcactgccttctcacttgtcccctcgcccctagtaactttctgttcctcaccatccgcagtggcacctccgatgctttcagccaggagaacctagggtttgtgtgctgtggggaccaggttgctcctagggtggacaaatagaaggagatggttttatcgccaccttggaatgtgtgtgtgttttcagacagactctcgctctgtcacccaggctggagtatgtaccatggtgcgatcatagctcattacagcctccaactccttcttcagtgtccagagtagcaggggctaatttttttttaattttttaattttttttttgagacagtctctgttgcctgggttggagtgcagtggcgcaatattggctcactacaacctctgcctcctgggttcaagtgattttcctgcctcagcctcctgagtagctggaattacaggcacctgccaccatgcccagctaattttttgtatttctagtagagacggcgtttcatcatattggcccggctggtctcaaactcctgacctcatgatttgcccaccttggcccccaaagtgctgggattacaggcatgagccaccgcgcccagcagcaggagctaatttttaagaattttttgtagcaacaagttgttgctatgttacccagctggtcctgagtcactggggttacaggtgtgtgtcaccatgccaggcttgcttcctcctccgttaagtggccatttttccacctcaaaaattggtttgggacacaaggaagaattggaaatgcttaagatgagaacaaaagttgagaccacccaacacagctgggaccttactgcccagtgctcccagtggtctgaccaaaaccccacaccagacagtacaaaggcccactcccgagctgccgcttacggcccagcgggaacagactgtattcttatctttcggcatttctctgcaaataaaaaggtgccactgcggtccggcctttgtgcacttgcccttgtgctgagcaaggcgggtggcctgttcttaccgctgggttctgctgcccccacccccatttcggtgactaaacctgcagctctgatcctgttcccaaaggggcaggaggccgggctcaccccaggcagcccctggcctccctgacggccccctcgggaggggttccgtgctttgatcgcctttccagcgccgatactgcagtagctgggcccggccgagagctcgcggtcacgaacaccggcagcctcttgcctacagtgtcccgcgctgtagaagagcctgccctggcgctgagctggtcgtggctgcttcagcagtgggcctgcgcctccttgtaggccagccctggcccagatccaggtgcctgccccggaagcgcgcggctgcccggggtgaagccggagggcggcgagcggctgtttcggccggtaggtggaggcgttgaccagcctctgggaacggggcgggacctagttgggggggctccgccccctccccaggaggcgagctcagcccgcgacctttatcccgcgcgttgcggtcaagatggcgctggtggcttctgtgcgagtcccggcgcgcgttctgctccgcgcgggtgcgaaacccggggtgggcagggatcgggccggggccggggccaggaccgggaactaacgggctcccccacgctgccttcgcaggggcccggctcccgggcgcggccctcg

SEQ ID NO: 15067 - DNA, 2300 bp, Homo sapien
atttttagtagagacatggtttcaccatgttggccaggttggtcttgaactccagacctcaggtgatccacccgccttggcctcccaaagcagctgggattacaggtgtgagccactgcgcccggcctaaacgtaattttaatgcttaatttacagaaaaactagatgatacccctttaactttagccagcatgtttacatacagaattttctttacaatcaacctcccacacctttttttgagacagagtcttgctctgtcgcccacgctggtgtgcagtggcatgattttggctcactgcaacttccacctcctgggttcaagcaattcttctgcttcagcctccccaagtagctgggattacaggctcccgccaccacacctggctaatttttgtgtttttagtagagatggggtttcaccatgttggccaggcctgtctcaaactgctgacttcaggtgatcctctcgcctcaacctcccaaagtgctgggattacaggcgtgagccaacgcgcccggcatggattccagttcttagtgggtgtgtgattaccgaaaagatgttttaggaacaccttttttttgtagctccagtttaaaggaacactattcttgggggaaaaaaattagcaaatatgcgtagattaacattttagagagtttccaatctgttaaaagcttaaggatcaaattcagttttcttacatagaatacatttggctttttatatgggaatatttcctttaatcatttctgagaaccagaagtttcccagtatttcagcatttttagtttattttgctgagtgactggatttactgaatctatacagtttatttcttaaacacttgtatctcataaccactcatgacgtttatagctatttgtatctggcagaatggttttaaaagcacatggacccttgtgaatagtttcgggtggcattttgtcctcagtgcagcattttgaggcatgtggagtcatctctgctccactccctgctgctgtgactgaggccgctggcactgagaacacagcccacagtgctgtctgggctgccaggcctggtggggagtggagtgtgcgtgccccagaactttccgtcttccgaggccctgttacaaactgtataagtagcttagctggtttttttcagtaattgcccttcaggcattaggaaagtttccttgatatttggctaacttttctttcaagtttcttaagtcctgaaatgggttaggagctctgtgcgctcacatcagctgttggccttgtaagtcacacctttgctgtggagtctgctgattatctgctgtttgacagtctgagtgcttgctgagctaaaaacccaggggacccgggtaccttctgggtgggcgtgattacagacattccaacttttcgtaagattctggtaggattttttttgtgtgtctccccttctgtctttgaatggagtgagtccatgctgtctccataggagatgagaaggggttggcctttactggcagctacacagaagatggatttttcttcattattatagagtcagtgctgtgaaatccctaatttgggctaacttaggctgagtttactgaagttaaacctcttaagtatgttctgaatacatagccacatgccggagttagtccccatgtgccttaaaggtagttgagaaaacaaaagagccctttaccccttagggcacagaaggggctgcgcttgggctcccagtatccccagctaccagacaattcttgaggtcggggtgcatgctcccctggggttcctgggtttgcacctctatttcctttcctctctccctggagcccacatcccacactgcctctcctcgcttcatgcacatggcgtgtgtttcagtgccatctacatgcagagccacctctctgagactgcttgtttccaaacacaaagtctttggcatctcctaaaatttccttcatgcagcttcccaccgcagccccacctctccgtcagtggaagttcacacctcaccacccccatcccatccatcaccaagctctggcaattttacttcccagctgtcccctgaatccttccgtttccctgccaaatcatttgatgttgattcaggcccctctcagtgctgcagagccctcctaagagaacttctcccacttctcttagccccagacccagcttcccttggttggaggagaaggaagcgcaaacgcggatactgcctgcatggtcctgcgaggaagccccaccctggccctggggccttctgtttgcctgtcactcgctctcgatgc

SEQ ID NO: 15068 - DNA, 2300 bp, Homo sapien
aagagcaactgttagaactctatagctgattataaaaccaccttctaaaaaggattaaaacaagacaacaattgtttatggatgacaaaaaggttttagggcagccatagttaaagacacaattgacgaaatttgttagctctgtggcacacaataatttaacataacaattataattattactgatcatgtacactaggatatattgcaattgtaggagttttacgtgattttgggacacatatcaataacatttatacaaatacagcccaaacaaagccaaacccaattttatatttggtagtgcttcctgtataatttttggtaccaaataagccaaatttcacttttacatcagtgtgctgttaatgttaaaacccaatcctttttttttttttttttgagacttttttctgctcttgttgcccaggctggagtacaatggtgcaatcttggctcactgcaacctccgcctcctgggttcaagcagttctcctgccttagcctcccgagtagctgggattacaggcaacctccactatatccagctaatttttgtatttttagtagagacatggtttcaccatgttggccaggttggtcttgaactccagacctcaggtgatccacccgccttggcctcccaaagcagctgggattacaggtgtgagccactgcgcccggcctaaacgtaattttaatgcttaatttacagaaaaactagatgatacccctttaactttagccagcatgtttacatacagaattttctttacaatcaacctcccacacctttttttgagacagagtcttgctctgtcgcccacgctggtgtgcagtggcatgattttggctcactgcaacttccacctcctgggttcaagcaattcttctgcttcagcctccccaagtagctgggattacaggctcccgccaccacacctggctaatttttgtgtttttagtagagatggggtttcaccatgttggccaggcctgtctcaaactgctgacttcaggtgatcctctcgcctcaacctcccaaagtgctgggattacaggcgtgagccaacgcgcccggcatggattccagttcttagtgggtgtgtgattaccgaaaagatgttttaggaacaccttttttttgtagctccagtttaaaggaacactattcttgggggaaaaaaattagcaaatatgcgtagattaacattttagagagtttccaatctgttaaaagcttaaggatcaaattcagttttcttacatagaatacatttggctttttatatgggaatatttcctttaatcatttctgagaaccagaagtttcccagtatttcagcatttttagtttattttgctgagtgactggatttactgaatctatacagtttatttcttaaacacttgtatctcataaccactcatgacgtttatagctatttgtatctggcagaatggttttaaaagcacatggacccttgtgaatagtttcgggtggcattttgtcctcagtgcagcattttgaggcatgtggagtcatctctgctccactccctgctgctgtgactgaggccgctggcactgagaacacagcccacagtgctgtctgggctgccaggcctggtggggagtggagtgtgcgtgccccagaactttccgtcttccgaggccctgttacaaactgtataagtagcttagctggtttttttcagtaattgcccttcaggcattaggaaagtttccttgatatttggctaacttttctttcaagtttcttaagtcctgaaatgggttaggagctctgtgcgctcacatcagctgttggccttgtaagtcacacctttgctgtggagtctgctgattatctgctgtttgacagtctgagtgcttgctgagctaaaaacccaggggacccgggtaccttctgggtgggcgtgattacagacattccaacttttcgtaagattctggtaggattttttttgtgtgtctccccttctgtctttgaatggagtgagtccatgctgtctccataggagatgagaaggggttggcctttactggcagctacacagaagatggatttttcttcattattatagagtcagtgctgtgaaatccctaatttgggctaacttaggctgagtttactgaagttaaacctcttaagtatgttctgaatacatagccacatgccggagttagtccccatgtgccttaaaggtagttgagaaaacaaaagagccctttaccccttagggcacagaaggggctgcgcttgggctcccagtatc

SEQ ID NO: 15069 - DNA, 2300 bp, Homo sapien
cccactatctatccatccattcacccacccacccactccgggtcaccaagctgcaccctgtcctttgctctgacatctaaagtctccaagtcatgctggttctctcctcccaaagatcggcttggatctgttcccttctcccttccttgctgccacgaagctgttcagacaaagtctgaagctcagcgcaccgtcaatccctccacaaataaccacagggcaacgactgcctgacaggcacagcagagaacaaaacccgccctcggccgggggcggtggctcacgcctgtaatcccagcactttgggacgcccaggagcgagcactttgggaggccaaggcgaacctaggagcggatcacgaggtcaggagttctcgaccagtctggccaacatagtgaaaccctgtctctaccagaaaaatacaaaaaaaattagccgggtgtggtagtgtgcgcctgtaatcccagctactcgggaggctgaggcaggagaatcgcttgaacccgggaggcggaggttgcagtgagccgagatcgcgccgctgcactccagcctgggcaacagtgcgagactctgtcaaaaaaaaaaaaaaatccgccccgtcagtgtggggagttgacgcggagcctcctgcctgcacccctacagcgtcaccccctcctctgtccctgccagaggcgccacctctggactctcccagggtcggaccctggtcgacagtgctccctgcccggaccctgcaccggccgatggatgaagcctcggcgctgcgccgttcacacgctccgtgccgctgccgcgaagctcgcgcgggcctgcgagccggtacccgggcctcccttccctgcttccagcgaacctcggcgcctgctgttcccccgccgggcgcgcccttccattcgggtctcagcggcagtgtcacctccccggagaggcccgccgttgcaccccatctcccactctcaagctcgtcgctcttcctgcccgcacagcccgcctgccgcgcccacccggtggaggtccgcctgccgggaggccgcgtccacgggaacaccccaaacgccaccagtggattttgaccgcacgaacgcacgccctgccccagcccgtctctccgagctacttccgccctgcgggcccccacgccccgccacgcacggccgcagagcctgcgaacccctcctgtgctaccaccccgccggcctcagcacagcccggcccggagccccgcctccaccgccggcgacaggggccggagtctgcccgggcgggcccagtgcgcccgcgcaaggaaaggggcggggcacgggcgcgttaacaccctccgcgccggaggacgagcctcggtcatcgcgctgccctcccaggttcaacaggctacccatgtgcccgctccagtaagcgtgcaaccagcccggtcagtcccagggactttaccggctaggagacaccttgaacgtccccagcgcgactcccacaaactgccttgactctttaacgcttcctcgctggcgcccattgggccaggcgtttacgtcatcgctgcgcgccgggcggcggcgacttcccgctccttgactctgacgtcagagcggcgccggcctcggcggctgaggaaagcaggaggaggtggcggcggcgggaagatgtaagttggggcggaatccgactgcatccgtgtttcgggggctgcccggcaggcccggcaggacgcctcgtgaagccggtccactcctcagccccgcagtgcggcggtggcctggcagcgcggtgcgggctccgagaagaaagagtgtggcccggggcgggcggagtgggaggtgtcgaggccgtggcccggaagtggtcggggccgctgcggacggaagggcgcctgtgcttcgtccgctcggcggtggcccagccaggcccgcgggactcagaccagcggggagcgcggcctccgcccttggggccctcccgccgggccggagacccaagcccccaacgccaggccctgccctggaagcgctcgcggcccggcgcctggacgggggagttgtgagtgaacgcggacgggtagcggcgaggtcggcgtgtcgggccggtgtcggcgggcgcggagtttctttgtgggatgcggtggaaggtcggccgatccccccttcggagtcattaattcaaacgtgtactccgcgaacgtttcccggactcccgtgtgcaattatcggcgctaggccgtggggatacggcccactatggaccgagcacggtggccgagctcagtttgatgggttaccccagaggggcggatacggga

SEQ ID NO: 15070 - DNA, 2300 bp, Homo sapien
agcagactcgggaggtagctcctcctcctagctgcctttgtccccaactccttggacatcccttagcccagggtgaagggtcaagggcacacttgacaccctcggacagggccagagggagtgggtctcggcaggaagtcaccaagagctggcttcccacacagggaagagggcagtgatggcagaccacatccccactatctatccatccattcacccacccacccactccgggtcaccaagctgcaccctgtcctttgctctgacatctaaagtctccaagtcatgctggttctctcctcccaaagatcggcttggatctgttcccttctcccttccttgctgccacgaagctgttcagacaaagtctgaagctcagcgcaccgtcaatccctccacaaataaccacagggcaacgactgcctgacaggcacagcagagaacaaaacccgccctcggccgggggcggtggctcacgcctgtaatcccagcactttgggacgcccaggagcgagcactttgggaggccaaggcgaacctaggagcggatcacgaggtcaggagttctcgaccagtctggccaacatagtgaaaccctgtctctaccagaaaaatacaaaaaaaattagccgggtgtggtagtgtgcgcctgtaatcccagctactcgggaggctgaggcaggagaatcgcttgaacccgggaggcggaggttgcagtgagccgagatcgcgccgctgcactccagcctgggcaacagtgcgagactctgtcaaaaaaaaaaaaaaatccgccccgtcagtgtggggagttgacgcggagcctcctgcctgcacccctacagcgtcaccccctcctctgtccctgccagaggcgccacctctggactctcccagggtcggaccctggtcgacagtgctccctgcccggaccctgcaccggccgatggatgaagcctcggcgctgcgccgttcacacgctccgtgccgctgccgcgaagctcgcgcgggcctgcgagccggtacccgggcctcccttccctgcttccagcgaacctcggcgcctgctgttcccccgccgggcgcgcccttccattcgggtctcagcggcagtgtcacctccccggagaggcccgccgttgcaccccatctcccactctcaagctcgtcgctcttcctgcccgcacagcccgcctgccgcgcccacccggtggaggtccgcctgccgggaggccgcgtccacgggaacaccccaaacgccaccagtggattttgaccgcacgaacgcacgccctgccccagcccgtctctccgagctacttccgccctgcgggcccccacgccccgccacgcacggccgcagagcctgcgaacccctcctgtgctaccaccccgccggcctcagcacagcccggcccggagccccgcctccaccgccggcgacaggggccggagtctgcccgggcgggcccagtgcgcccgcgcaaggaaaggggcggggcacgggcgcgttaacaccctccgcgccggaggacgagcctcggtcatcgcgctgccctcccaggttcaacaggctacccatgtgcccgctccagtaagcgtgcaaccagcccggtcagtcccagggactttaccggctaggagacaccttgaacgtccccagcgcgactcccacaaactgccttgactctttaacgcttcctcgctggcgcccattgggccaggcgtttacgtcatcgctgcgcgccgggcggcggcgacttcccgctccttgactctgacgtcagagcggcgccggcctcggcggctgaggaaagcaggaggaggtggcggcggcgggaagatgtaagttggggcggaatccgactgcatccgtgtttcgggggctgcccggcaggcccggcaggacgcctcgtgaagccggtccactcctcagccccgcagtgcggcggtggcctggcagcgcggtgcgggctccgagaagaaagagtgtggcccggggcgggcggagtgggaggtgtcgaggccgtggcccggaagtggtcggggccgctgcggacggaagggcgcctgtgcttcgtccgctcggcggtggcccagccaggcccgcgggactcagaccagcggggagcgcggcctccgcccttggggccctcccgccgggccggagacccaagcccccaacgccaggccctgccctggaagcgctcgcggcccggcgcctggacgggggagttgtgagtgaacgcggacgggtagcggcgaggtcggcgtgtcgggccggtgtcggcgggcgcggagtt

SEQ ID NO: 15071 - DNA, 2300 bp, Homo sapien
ctgggcatgggctctaggtttggggccttttagcacctctgaccactggactccaatgccacctcagagaattccgcctatgcctgcctggaccaccgaggctgccccctcccctagcgccgactctggggccccttcagcaggggggcggcccctctgttccacttaatcttccatgcctgggcacagcaggtgtgacagtaatgcagagactctaactcactttacatgtcatcaaacccaaatccaacgggtacccaaaccagactgatgggcctgccagcctccacccacaggaacacactggtgacttactgcagcagactcgggaggtagctcctcctcctagctgcctttgtccccaactccttggacatcccttagcccagggtgaagggtcaagggcacacttgacaccctcggacagggccagagggagtgggtctcggcaggaagtcaccaagagctggcttcccacacagggaagagggcagtgatggcagaccacatccccactatctatccatccattcacccacccacccactccgggtcaccaagctgcaccctgtcctttgctctgacatctaaagtctccaagtcatgctggttctctcctcccaaagatcggcttggatctgttcccttctcccttccttgctgccacgaagctgttcagacaaagtctgaagctcagcgcaccgtcaatccctccacaaataaccacagggcaacgactgcctgacaggcacagcagagaacaaaacccgccctcggccgggggcggtggctcacgcctgtaatcccagcactttgggacgcccaggagcgagcactttgggaggccaaggcgaacctaggagcggatcacgaggtcaggagttctcgaccagtctggccaacatagtgaaaccctgtctctaccagaaaaatacaaaaaaaattagccgggtgtggtagtgtgcgcctgtaatcccagctactcgggaggctgaggcaggagaatcgcttgaacccgggaggcggaggttgcagtgagccgagatcgcgccgctgcactccagcctgggcaacagtgcgagactctgtcaaaaaaaaaaaaaaatccgccccgtcagtgtggggagttgacgcggagcctcctgcctgcacccctacagcgtcaccccctcctctgtccctgccagaggcgccacctctggactctcccagggtcggaccctggtcgacagtgctccctgcccggaccctgcaccggccgatggatgaagcctcggcgctgcgccgttcacacgctccgtgccgctgccgcgaagctcgcgcgggcctgcgagccggtacccgggcctcccttccctgcttccagcgaacctcggcgcctgctgttcccccgccgggcgcgcccttccattcgggtctcagcggcagtgtcacctccccggagaggcccgccgttgcaccccatctcccactctcaagctcgtcgctcttcctgcccgcacagcccgcctgccgcgcccacccggtggaggtccgcctgccgggaggccgcgtccacgggaacaccccaaacgccaccagtggattttgaccgcacgaacgcacgccctgccccagcccgtctctccgagctacttccgccctgcgggcccccacgccccgccacgcacggccgcagagcctgcgaacccctcctgtgctaccaccccgccggcctcagcacagcccggcccggagccccgcctccaccgccggcgacaggggccggagtctgcccgggcgggcccagtgcgcccgcgcaaggaaaggggcggggcacgggcgcgttaacaccctccgcgccggaggacgagcctcggtcatcgcgctgccctcccaggttcaacaggctacccatgtgcccgctccagtaagcgtgcaaccagcccggtcagtcccagggactttaccggctaggagacaccttgaacgtccccagcgcgactcccacaaactgccttgactctttaacgcttcctcgctggcgcccattgggccaggcgtttacgtcatcgctgcgcgccgggcggcggcgacttcccgctccttgactctgacgtcagagcggcgccggcctcggcggctgaggaaagcaggaggaggtggcggcggcgggaagatgtaagttggggcggaatccgactgcatccgtgtttcgggggctgcccggcaggcccggcaggacgcctcgtgaagccggtccactcctcagccccgcagtgcggcggtggcctggcagcgcggtgcgggctccgagaaga

SEQ ID NO: 15072 - DNA, 2300 bp, Homo sapien
aggagtggctggagtcctgagtgtttaacttagagtagctgatgggggctcagccggggccggtcctgggcctcagtcatcagcacttctggagactctgccgcctcggcgtcaagtgcagaaggaacattaacttctttctcttgtgtacatttgcttttgtaacaaaaaacttgccagattttgtaattctaggatctcttcctttaaactccttttgctgaaacagaacagatgcaagcgtagtgttcagtgagactttaggtaaagcctcacacgtatcaggcaacaagctgggtgccgtgggggcacagagataaaacctcggcagggcacagtggctcacgcctgtaatccccacactttgggaggccgaggcgggcggatcacttgaggtcaggagtttgagaccagcctagccaacatggcaaaactccgtctctattaaaaatacaagaattagccgggcgtggtggcatgtgcctgtagctacttgggaggctgagatgggaggatcacttgaacctgggaggtggaggttgttgtgagccgagatcgtgcccagcctcggcgacagagcgagactctgtctcagaaaaaaagaaaagaaaagaaaagaaaacttctattaaggtgatggggcttaggggtcttttttacctttcagtttctgatgttatgttctaggagtgatatgcaaaacttgtatgaagttggaagttgttctgtgtttttaggacccacaggttgtagtagtgtagtagttagaagacagacttggaagttaaaacaagccaaggttcaagccctgacttggcagcttcttgctgtgtgattttgggccaggcatttcctccttgtttcttcgtctgcaaaagggtgatgttccaggtcaggagatcgagaccatcctggctagcacagggaaaccctgtgtctactgaaaaatacaaaaaaaattagccgggcgctgtggtgggtgcctgtagtcccagctactcgggaggctgaggcaggagaatggcgtgaacctgggaggcggagtttgcagtgaacagagatcgcggcactgcactccaacctgggagacagagtaagactccgtctcaaaaaaaaaaaaaaaaaaagggtggtgttgccagaagccaggagaggatgaggaggttgtagaagcagagtgcttacaagcaggaaagcagagtttcagctgggtacagtggctcacacctgtcatcccaacactgtgagaggccaaggtcggcggatcacttgaggtcaggagtttgagaccagcctggccaaagtggtgaaaccccatctctactaaaaatacaaaagttagctggatgtggtggtgggtgcttgtaatcccagctatttgggaggctgaggtaggagaatcgcttgaacctgggaggtggaggttgcagtgagctgagatggcaccacggcactccagcctgggccacaagagtgaaactctgtctcaaaaaaaaaaaaaaaaatagagcttatattctttttttttttttttttgagacagggtcatctcggagctgatgactctgagttagcaccatctcggttcactgcaacctccacctcctgggttcaagcaatcctcccacctcagcctcccgagtagctgggacaggcacacgtcaccacacctggctaatttttgtgtttttagtagagacagggttttgccatgttggctgggttggtcttaaactcctgacctcaggtgatccgcccagctcagtcttccaaagtgctggaattgttcaggcatgagccaccgtgcccggccaggtgtttattttctaaatccaaaattttttatcagatctgctcagttttaagtaacatcctcaaaatctattttgctcttctgttttctaacttggtaagaggtgttttataattattttccaaattacactcaaacaccttccatctgtccaaaggtgctggagagtcatgcctgtgagccctgggcacctcctgatgtcctgcgaggtcacggtgttcccaaacctcagggttgccctgccccactccagaggctctcaggccccaccccggagccctctgtgcggagccgcctcctcctggccagttccccagtagtcctgaagggagacctgctgtgtggagcctcttctgggacccaggtgagttccctggtactgccctgcagcctgtgtgggaaggggggtggtctatctttctgaccttctctcccagccctgggactggagaggacaagattaagcatggggatctttcctttcttg

SEQ ID NO: 15073 - DNA, 2300 bp, Homo sapien
cagcctcctgagtagctgggattacaggcacgtgccaccatgcccggctaattttttatatttttggtaaagatgaggtttcgccatgttggccaggctggtctcgaactcctgaactcaagtgatccgcccgcctctgcctcccaaagtgctgggattacaggtgtgagccacttagcccggcttccaattcatctttccattgtgcacaaggccttccccgtcagagccgtccccaaagttccagaatgcttcccctcaatagattccacagtctccggaagcagggctggggaagaaatggcaaactagggatcttacctgggccttcccagttgagactacgtcaaaatgggctcccatgagactgcctggctcatgcagatggaaggctaacatctttttagaaacaactcgtgctaccctctcctgttccaaaagcctgtctggtcagaatggtggtaagtcactttaggaagggagagacgtcgtcctgtttttcaggtagagttagcaaaggttcaatttaaaagaaaaattatctaagaagttaaaaatgaaagtgtgggggagattcccatgacatccatttttatctatttttccctttctcttacatttctcatgaggcaaactttctaaaacagtcttagtcttttcaagtttacaaaaggcagcgcccagactatctgaataaaatgacgggatgcccaggagaagagtgaacctctcccacgtgctccctgcctgggctccatgctgtcgcggggtctcggctactcactcagcgggcatttctggagttccaggaacacaaaccccaacaagatccaatcgacgccttcccggagtgcacagtccaggacgtaacccggagaacaagcggcaattaccccctgaggacatggcttcatctgtgcgacagacaccaagcgccttccccacgcccctgaccataaggccgtcccggcccttctgaagcgtggagccggcttggaacagagccaagacacacggacgcgatgcacacaggcgtcctgaccgagggcgccgagaacgcggcctccggcgactgccacaagcccctccgcctggactagcggctcccctttcccgttcccacacagtggagggcgcagcaaacgcccgccgcggaccgtgggccttggattcggatttggaggctcctcggaaccagagggtgggagcaggcggaatccaacccgggcggctttgccaccgcgcgcccggcatccctgcggccggaaagcggcgccatctccgcaagtgcgcggcggacgcctgcatccctcggggccggggctgtcggtcgctacatatccaccttctgggcgcacacagagggcccgggccgtgccgagtctccgcagggtcgagcttccccgcgcggcgcgggctcaggcactgcccgcagtgcgggacacgcccaaggctcggatgggagccgacgctgagggagcggcacctgcagggagcgcccggagccgaggccgcggcaggaggggcgggcgcgggcgcggccggaggggatgcggggtcgcgggaggggcccgcaggccaggccggagctggggggggcccgaggcccgagctggccggcgagggtgggaagggcggacccgggtggggaccgcaagccccgggaacgagcgcgcgagcggcgggtcccggcggcactcaccgagcctgggcgccggggcggcggcggccggcgcgcggccctctcgcggggtcccctccctcggccacccgggctccgctccagcctcgcagtggcggcggcactgacagctgcgtggccgccctggaggggagggtgcgcctgcaacccgctactggcggacgcagcggccgctccggctcctgcagggggcgccgcggatggcgcgtgcgcagtcggccgcccctgcaggtgcccggtccacccccggccgcctcggccgctccggccagcccaaccccgcgcctgcgcggtgccccctgcatgtcgcccatgcccggcagagggcgctctgacttgcgcgtgcgcagtcagccaccctgcgagtacgcggttcgcacccggccgcgcggcagcccgtgcttgcgcactgctctgtgcccgcgcctatgtccagcagggggcgcgcagcggcggtagccgagcgagggcgcggtggcctctgacaggaatgactctgcgcacgtgcgtttcgcagcagtggaagtcttcacacccggaaactcgactttggccgtttctccatttctcctcacgcactgtctttccttgggccctc

SEQ ID NO: 15074 - DNA, 2300 bp, Homo sapien
aactgcattcaattgtttggggttttttttccccctgtatgctcattacggagactaggctatgtaaatccctagctatactcacattatatactaccatttatttggcatttatgtgtcaggtattgtagtaagcacttaaacatgcattttctcatttgacccaaaaaagaaaagaatacaccaacaaaaaacctttgagtttgctattattattaattactattattataatttcaattttagggataggaaattgagactcagaaagataaaatgacatgtctacattaattggtgggtcaagatctgaagccaggtctctgtgattccactgaacaaattatttagcatgagcctcctccgccccaggcactctaggaccctggatctaggcatgaacctgacgaagtccctttgctcgcggaatgggctatccagaacatcatcagagtgaaaggtgctatgtacacagtaaaatggggaacgagccgctcaaaccctactccatcaggactcttgggggtgggcgatttccgcccccggcccggggcgttgcattaggtcggggccgtcgggtcgtggtgccggcggctggctgggcgcggggctggcggtgcgggtcgcaggcggctcccagcggcaggaccggcagcagccctccctcacccggggcgccgggaccacggacgcacctcactgtggtccggccgctggcggcgctcggggacccattggccccggcccgcggcaactgtcggccccgcgcggcgcccgccctcatgctggagcccgggagtccctcactccacctctccctgccacgccaagggggcccgcccctcccaggctctcctgcctggggcgacccagtcccacgacccggtccggcccagggacaccccgacccacctccccactcccgtcccgttagaccgcgacccgtccctgggaccgcctaatgtgacacgcccgggaccctccctgcaggcgactccctgcagggcccccgccctggacactccctccaggtgaccccgttccgctcgctccgtgaggtgaccccgaccctctccggaccacctcctcaggtgaccccgaccctctccggaccctccccgaccctcccctcaggtgaacccgaccctccccggaccatcccgtcgggtgaccccaaccatccccgaacccccccaccctcccctcaggtgaccccgaccctctctggaccctcctcacaggcggccccgccccaccccgggaccctcccgccaggtgaccccgacaaggccgggccctcctgcctgaggtgactcctacccggctggggacccccgaggcctccctcgctccttaagtgagggcgactccgctcatcccgggacaccgcgccttctcctgtaaactcgacgcctgccccgacggccgaattccagaaggttcctcgccgccgcctcgccttcggtcgcgccccagcgcccggccagaggcggggaagcccttcccccggtgccaggagtgacgagggcccaaggaaagacagtgcgtgaggagaaatggagaaacggccaaagtcgagtttccgggtgtgaagacttccactgctgcgaaacgcacgtgcgcagagtcattcctgtcagaggccaccgcgccctcgctcggctaccgccgctgcgcgccccctgctggacataggcgcgggcacagagcagtgcgcaagcacgggctgccgcgcggccgggtgcgaaccgcgtactcgcagggtggctgactgcgcacgcgcaagtcagagcgccctctgccgggcatgggcgacatgcagggggcaccgcgcaggcgcggggttgggctggccggagcggccgaggcggccgggggtggaccgggcacctgcaggggcggccgactgcgcacgcgccatccgcggcgccccctgcaggagccggagcggccgctgcgtccgccagtagcgggttgcaggcgcaccctcccctccagggcggccacgcagctgtcagtgccgccgccactgcgaggctggagcggagcccgggtggccgagggaggggaccccgcgagagggccgcgcgccggccgccgccgccccggcgcccaggctcggtgagtgccgccgggacccgccgctcgcgcgctcgttcccggggcttgcggtccccacccgggtccgcccttcccaccctcgccggccagctcgggcctcgggccccccccagctccggcctggcctgcgggcccctcccgcgaccccgcatcccctccggccgcgcccgcgcccgccc

SEQ ID NO: 15075 - DNA, 2300 bp, Homo sapien
ttgcccagaacaacggcgttgcacacccatggtcgccaacccaccctcctcagtcctcgtttcaggtgactgctccctgtgatgaaagccactccctgggctcccatatccagctctcattcctcccatgcccctctctgcctccactgaaggcccatcttcttctctgaatgtgggatttctcaggctcccaagctacttcactttcccttctctcccctgcccctcactacccataacgttttcaaccgacacctcattccaccaggaatttccctgagctcctaacagtttagacttttccaacaaggtctcaccttcctgaagcccagtgggaaacgggcccacaccctggaggagccacttatcaccccagggcagccctggaggctcccactgccagtgcagggtgtggggcgagagcaggcatggctgcagtcaagacaactcctgctccctgaaaaagaaatttgcctgtccatgttgaaaggagagtgatcaggacacaaagcacaggatagagctaaacaacaacctagggaccaaggatgctgttctagattctagaggcagctggtgtggctaatgtgctcatggctggctctagttgattaatcccttcaagatgctatggaagctaaccctgaaagtgcacctctgccctagggggagacaggtaacagtgacaaagtaggaaacagtaacccaggaggacaaaagtgagataaggggataataaatctgggggctgagaacatgggacatctggggagcaggccccaaactcgctcagcctgtcctctcttcaccctccttcacccgcttcctgattccgggacagggaatattcccaacttccagaccctctctggggccacggactcttctgtaccctgtgctgtgatcacctgtttactctgtctcttgccccaggccggctgaagcctgcacgccagggctcctgtctgtgtgcccagggcaggcccagtacttgaaggagttctatggggacccggaaggatggaagggtgcagactgagggaagcgtgagggaggggtgggcagccttggcccaggcccctgccttccccaggaaaagccccctctgtcctccaccagacagtcaggaggctgcgagtcttccccttgacagcctgtgccgtaaaaggggtgcggtgtggctgactcctgaaggacagctcagatgggcactgcccaagacaagagtgagcagatacgacacttcccgcggcgagcagctccaggtagcagccgaggaggccagacagggggcagcatctggccaaagtgatggggagggcttgccccggggctggagcactgaggcgtccagggtgcgccacgtttcgcgggaagaaggggtcagcgttccgcgggggagacttcccagcgtcagctccgacctcctctttctctaccacgatcccggccagcatccccgcccagcagcggctcagccacaaacccaagggtctccacctgaagcaggcggcggaagggaaggccgtgcaagctgggggtgagggtcgcgggcccaggagcgaccccgggacccgggcagggcacggcctcgtcttagaagcgccacgtcgaggctgtcccaggctggatcacggccgcgactgcgagggacgccaaggagtcctctttcccctggccgcaggcgtgcgccttcgcagcccatctggcaccgcagatgccggtcgccggggtcagcggcgaagcccgaacccatgcggccgggaggggacgcccacaaacccctgcccgccggccgggaagcgctcctacgggaccccagccccgttggggaggcggggcggccacgcgggttccaccaatcagcggccaatgttcgaattcgcgtcctggcgcggccaatggcgggtcccggagcaggcggggagggcgtggagggcggtaaatgaggcgagcacagggcgggacatgggcggggccggcggcggcccccccgggcaggccaatgggagggccgggtgcgtttgaaaactggggtgggcggcggggcggggtctgcgcctgcgcgagggctacgcgcgctccggccggggcgcgggcgcgctctcaggcgggctccggcggcagcgacgcgagcgcggcgatggggagcggcggcggtgagtgcggggcgatgtccgctggtttctgccccacaccccttctgcctgccctgcggggcggacggtgggtcccgcgggaggggaggccctggcggcctgaagagggctggctcgagctctttaacccggggcggatgt

SEQ ID NO: 15076 - DNA, 2300 bp, Homo sapien
cgtgtcctggctgatcccaactgcagctctgctgtgggggcccgtgggagggaggcagacccctgggctttcctgctggccacggagactctgctcctgcatggaaagggagcctgggagccagcagcccacgcctggggagcctgcctggggccatgtgaccatggcctctccctgggaacgggctgaccacaacacaccctgctgccatccacttctgtttactctgcaaatgtaagaaagaaccacttggccagaagtgtcccccagatgcttttttttttttttttttggagacagttttgctcttgtctccccggctggagtgcagtggcatgatctcaactctcaactcactgtaacctccgcctcccggatactcctgcctcagcctcctgggtagctgggattacaagcacccaaccacgcccagctaatttttgtattttcggtagagacgggatttcaccatgttggccaggctagtctcgaactcatgacctcaagtgatccgcccacttcggtctcccaaagtgctgggattacaggcatgagccacggcgcctggcccccaaatgctcttgaaccggaaacccagggatgggagatgctcactgagctgctgcttttatgtgtgctggtgctatgtgtgttcatgtccgcggcagctgtctttttgctactataagggaattctggccaccctgggtggggtgtggtcggggtgagaacccaagcgttggaactgtagacccgtcctgtcgactgtgtgcccctgggcatgtgtgagcctcagtttcctcatctgtaaggggggcaatgatacctacctcacaggggtgttgtgaggattaaatgtgaggaggatagtggcagatgagtgatggacgtccttcactgcctcggccccttgtccaggggctcttaatcccaactctgcatggagtcagttctctgctttctcccagcttgcacctgaaggaggaaaccactccagggggacctggccccgcctgcctgtggtgggtgggttcctgcatcacccacctgctgactgagcatttccctgcctcctccttcacagagaatctccagggaggcagggccaccgtcaccctcccccaccgctgatggaggggcccacccggagcgctgggccagagctgcctgggtcccaacctccctgacaactccctttgtgccctccttcccctctgcgatggcaccttcccattaacgactatggaatggactcacctgtcccatctttaaacagcaaccccaggctctgtttttctttcagctaccgcctgggatttcttgccccctaattgtttattcttgttaacaccaactacatggggccctgctgccttcctcacttcctccctcaggtgtcccccgcatcaccgaaggccctgtacccccgcccccctgctgtgctgtgtacaccgccgaggcctcagcagcacttggcctgtgacccactccctcccgtgacagcctcctgttgcctctgtgacactgtcctactgctcctccacctccctggccattgcgtgggccccgtgatctgtccctacccgtcccctgccccaccaggggccacctcgcctggcccactgctccaaggtctgagcttcctcccctctgcccagtgctatcacgtcacatgtccaaaagtgaacactttctcctccttcatccccgcccctgacacgcggaatcctcacctccagcaaccccgtcctgtccctgtgctcggtggcccaggcgtcagcaagacggctggtccctgcgttaagagcactttcaataaggacagatggagcctctcgtataaccttcaccggccccctgcaagagaagcgcgataatggcgcccccatctacccagttacccaaaccaaaatcccggcgtcgcccgcagtcacctccctggcggcctcgggggcccagctccgagccggagtccccgtcagacctgggaggcaggagtgggcggggcttgaggcttgcccgcaaggagggagagaaagcttcgggggcggcccctgagccccggttcaggattgggcagcccggccgggaaggggcggccttccctcccggaaggggcgtggctcttcagaggcggcaaattgcaaggagacgccgccgccttcatgctgccggcgggctgctcgcgccggtgaggcctgcgcggcaggagggggtgggaggatgcgggcgggccggtagccaggcgcggggcccgaggcccgacgctggccgaggtgctgagccgccggtgcgtcccc

SEQ ID NO: 15077 - DNA, 2300 bp, Homo sapien
gtgaggaggatagtggcagatgagtgatggacgtccttcactgcctcggccccttgtccaggggctcttaatcccaactctgcatggagtcagttctctgctttctcccagcttgcacctgaaggaggaaaccactccagggggacctggccccgcctgcctgtggtgggtgggttcctgcatcacccacctgctgactgagcatttccctgcctcctccttcacagagaatctccagggaggcagggccaccgtcaccctcccccaccgctgatggaggggcccacccggagcgctgggccagagctgcctgggtcccaacctccctgacaactccctttgtgccctccttcccctctgcgatggcaccttcccattaacgactatggaatggactcacctgtcccatctttaaacagcaaccccaggctctgtttttctttcagctaccgcctgggatttcttgccccctaattgtttattcttgttaacaccaactacatggggccctgctgccttcctcacttcctccctcaggtgtcccccgcatcaccgaaggccctgtacccccgcccccctgctgtgctgtgtacaccgccgaggcctcagcagcacttggcctgtgacccactccctcccgtgacagcctcctgttgcctctgtgacactgtcctactgctcctccacctccctggccattgcgtgggccccgtgatctgtccctacccgtcccctgccccaccaggggccacctcgcctggcccactgctccaaggtctgagcttcctcccctctgcccagtgctatcacgtcacatgtccaaaagtgaacactttctcctccttcatccccgcccctgacacgcggaatcctcacctccagcaaccccgtcctgtccctgtgctcggtggcccaggcgtcagcaagacggctggtccctgcgttaagagcactttcaataaggacagatggagcctctcgtataaccttcaccggccccctgcaagagaagcgcgataatggcgcccccatctacccagttacccaaaccaaaatcccggcgtcgcccgcagtcacctccctggcggcctcgggggcccagctccgagccggagtccccgtcagacctgggaggcaggagtgggcggggcttgaggcttgcccgcaaggagggagagaaagcttcgggggcggcccctgagccccggttcaggattgggcagcccggccgggaaggggcggccttccctcccggaaggggcgtggctcttcagaggcggcaaattgcaaggagacgccgccgccttcatgctgccggcgggctgctcgcgccggtgaggcctgcgcggcaggagggggtgggaggatgcgggcgggccggtagccaggcgcggggcccgaggcccgacgctggccgaggtgctgagccgccggtgcgtcccccaggctggtggccgagctgcagggcgccctggacgcctgcgcacagcgacaattgcaattggagcagagcctgcgcgtttgccgtcggctgctgcatgcctggtacgcggaccccggacccactggccagacctccctcgggccctcagagtcccgccccgagcgcccagggctgggagaccgggcgcagccgcccacttcggagctgtgggttgtcagtgccaccctccttaccctgcaggctctgagctgggggcctgccgcggggcccggcggccccctcgggtctgtttgggctgggccctgcctcctggccgtgcgacggctgcccgtgtctttgcagggaaccaactgggacccgggctttgaagccacctccagggccagaaactaatggagaggacccccttccaggtaaacctccaccacccgccttctccaggtgctgctctggcctgtctgctggcgtgcagttgtgaggaaccctcctgggggacagtggggagagatccctgcataattcttggctttcacagcatgcacacccagtccacaagacctcaaagagttggagtttctgacccaggcactggagaaggctgtacgagttcgaagaggcatcactaaggccggagagagagacaaggcccccagcctgaaatctaggtccattgtcacctcttctggcacgacagcctccgccccaccgcattccccaggccaagctggtggccatgcttcagacacgagacccaccaagggcctccgccagaccacggtgcctgccaagggccaccctgagcgccggctgctgtcagtgggggatgggacccgtgttgggatgggagcccgaaccc

SEQ ID NO: 15078 - DNA, 2300 bp, Homo sapien
gacagcttgggtttccccagaggcttgtctctggccagtgggacccctctgtcaggcctgggcttttctctccactgtcccagaatgatgatctcagcccccatagtccccccagggttcctcccacccttagggtggggtgtcggggggtgggggttgggagccagaaggaccttgaagagggtggttgggacgtttcaggttctaagcttgacccacagagcggagcgtgagccccgtcaggttgaggtccctcaacttgtaaaggacacaattcccattctctttatcaggaagctgaggggcaggggccctgtggcagagagagagccccttagccctctctgttcagtcctccggtgcccccatccctgtgcatctgtggctgtcacatgcagatgtgtggcaaggagaaggtgcccaccagccagtgtcagttgctccaggagccaagccaggtgccctatcaccctgtcttcccgttcctcccctccatggtcaggccctcctgctccctcctctggtccttcagtttcccctaggaggcttccgtgtcctcctgcccctcctctccccaacagcgggatgcgtctacctctccattctcttcctcctggtccttgctcatctctggtcgtgtccagggtagcacccacgtggcctcctccaccagctgcaggcctggcctcccatctgaaacggggcattcaggcctcgatgctggccctgcacggaacttgttccctgcccctccctgggatgcttggcctcctctgtcaaggacctgaaagtcggaggggaggaggtttctctgaccagagctgttcctggaccctctttggtggtgtcgctcccaggcacagctaccccatccccagctagtccccaggccacccagctgggcttctgcctcagtttccctgcccaaacgtgctgtgacgtagggcagtgggctccgggttgcgaccagccccttcccatgattaaaccctactccctgcccctgcagaggggtcctcaacagctaaccaagcccccgaaccccaagaagccaccccatcccaccctccagcttccatgtcctccctgccagctgggcccgtggcagaggtgcccctagaaacttgcagacccagggagctttgggatcagaatctggcctggtgcaggggatgctggcctcatgtcttagcccagctcaggcccatgggggtgccccccttcctcaacatgggcaggagacactccaatttgtgcagctctcgacttgggcctgatgccacttgagactcatcaaatccaacagcttcagagcgcgtgctgagtaacaggcatctggcaggtgaggaaacaggagcccaagacatgcagccagaaatggggcagttggattcaaaattagacctgaccgaatcctgggttccttctactcgagtagatgctgctttggggatgacccttcaactggtggttacttggcttccctacctggggaacatccagggcctctgctgtcagacccggggccttgcctgcctgatggtcttcagggaggaggcgacccagacccccgtccagcacgtggcacagccccaggagcagtaaagacctggctgtgggcccaggaccctgctgggtggtcccccacgggctgcgaaggctgagctgcccccctccagacccctcccgccagcgcattcctggctccccggcccctcccctggctcccgggcctcccagcccccttccccgctggcccagcccgcgtctgaatctgcttctgattccagctctgcgatgaggccccctcccctcccctgcctccttcccgacccgagcagccccgcccccggctgggcccgggcttgcgcctgctgcgccccccaccccctcctggcacagctcgtccgccctcgctgcagccgggaggaggcggcggcccgtgcaccgcaggccccgcccgcccacggcccttcccgggaggccgggagacctgctccgcccggccctcggtgggtgagtgcgagcggcgggtggggcctccgcgggcggaggcaccgggagcgggggcgacgcctgtcatcgctctaggcccagcgggaggacgcgccaacatccccgctgctgtgctgggcccggggcgtgcccgccgctgctcccacctctgggccgggctggggccgcccgggggccctgttcctcggcattgcgggcctggtgggcagagccgcggagagggcttcttttccccaagggcagcgtcttggggcccggccactggctgacccgcagcggctccg

SEQ ID NO: 15079 - DNA, 2300 bp, Homo sapien
aaggatggcgtcactggcctcacctgcaaccgctgcgcgcctggcttccagcaaagccgctccccagtggcgccctgtgttagtgagtgaccctgccccgcctcagccaccaagccaaggccaccccagctccctgctgttgtcccgtctattccccgagccctgcagatctctctgcccctccatcgcaggccattctccctccctctctgcagagacccctatccctggacccactgaggacagcagccctgtgcagccccagggtgagtggacacaggacagggccccagactggcatgactttgggggagggggctctgggaggagagggtggggaaagggagtctgtgccagcctcccaccttctacccagactgtgactcgcactgcaaacctgcccgtggcagctaccgcatcagcctaaagaagttctgcaagaaggactatggtaggtgccctcaggcctcccgcggaccttcccaccttcctcctctccctaccttccctcctccgccagcttccccttggaacgccttgacccttgctgggccccaaggcccatcctcatccctcaggtcctccacgggcagcgaccccgccccttcagcccccactgccctcctggtgtcctccccgtgcctccccctaccgcgggcaggccgccccttcctgaccccgccccctctcgctctccccgcagcggtgcaggtggcggtgggtgcgcgcggcgaggcgcgcggcgcgtggacacgcttcccggtggcggtgctcgccgtgttccggagcggagaggagcgcgcgcggcgcgggagtagcgcgctgtgggtgcccgccggggatgcggcctgcggctgcccgcgcctgctccccggccgccgctacctcctgctggggggcgggcctggagccgcggctgggggcgcggggggccgggggcccgggctcatcgccgcccgcggaagcctcgtgctaccctggagggacgcgtggacgcggcgcctgcggaggctgcagcgacgcgaacggcgggggcgctgcagcgccgcctgagcccgccggctgggcagggcggccgctgctcccacatctaggcgcacgttcaccctgtgccttcgcctgccaaggagtccttgctcgcgtcgcgcgtgtcgccacctgggccgccgccccgtccccgccggcagctccctcggtacctcccgtctggccctggggggatgtgaccggcgcagcgacagcccgccccgcacagaggcagatgatatggcacacccggaggaccccatggtctcccgccctctggctgtcggccctgtcccaggggcactgggatacccggaaggctgtgaatccttcgtgatgccgggccctctcggggatctcagatcatccccggggccgctgtgatgcacccccacctgtgcggcgacccgccagggagcgcactgacctccccaaagactgtggccaccgcaggcgccttggacccccatggggggacagggcgtcccctgcctcctgcagccccacgagggcggcggccttggcccctgcgggctgggcgtccgcgtccgggcgccccgcggcgtctgctgccgggtcccgtaactttcttggccgcctgtgtccccgtctgccggctccgtccggccgtccctctctctgccgcgtctctgaccctcggcgccacagctcctcagctcagggcccgtcccagaacctccttccagcccttctcccccgactcgggaagggacgtcgtgcccacgcggttccggatccacgcgtgacccggccggaccgcgactccgacaggcggctgtccgggcccccgatgccctcggcagggccgtgccaccccccgccccccttggcttgtccccccgggaccgcactgccgttgcctcctctccgcacgggaccggttcccggccggccccagcttccgccgctgcggccgccgaccgtcagcgcgcatgcccagagccgggcaggccggagccccgcgggctctccggggtgggcacagggcgacagctcggcgggggcggggccgagcacgcgcgtgcgcagaaaggccggcgcggcaggctgaggagaaagcggcgcgcggaggtgggtgcgctcggggcgtgcggggggcgcgcggcggggtggcgggtggcggggccgggtccccgctgtcaccgcggtcggcgcgtgctgggggcgggagcgtgggggccgggctgcgggccccattcgaggcggggatccccggccacgcgcgggttgggggctccagagcccggcaccgc

SEQ ID NO: 15080 - DNA, 2300 bp, Homo sapien
acactagaacttaggcagaaaatgaatgggtaagaggccagtgagcacagctgacccactccctgctcctgcaagagggaagtctctccacgtccccatgtccccagtcctggtgtttcagccacaatggagttaggtgctctttgcccaccctacaatgttttgtttgagacgaggtctcactttgttgcccaggctggtcttaaactcctgggatcaagcaatcctcctgcctcggcctcccacagtgctgggattacaggcgggagccaccgtgcccagcccacccctgagcttggactgtgctgtttctccatggtgggctgctctgcgccacctttccttggtctgaattcggccccaggcacagccttcctggcctaggctttcctggagggcttggagttatgggggcaggcactggtgttgctctcactcagagggcggtcggggctggaatggtgcaggtgagggacaagacggcgtaagatgggggacaaagccagggaaaggatgggatcaagcaggggaagggcagagctaggggtagccctgggtatgccaggacctgcagcaaaattggggctacagggccttgtgactccaggaagaatgagggcgtctgagatttaggaagtccgcaggagagaggagagtgtgtggagagggtggcaggccacgcagcacagaggtccacttggacagcctgacagatgtccttctgcttagagaaatggcggtcaccagtgaccttggcaagggcaaggagctggagagggaagggcaggtgaggaggtggagacagagtgaagattcgtcttctcagaaacaagggccgggcaagaaagagggaggagcagaaagggcctctggccgtatctgttgcctcctctcctttgaaccaggacagacttagggactttcacgggctgcaagttccaagagtggcagacccaggctagcctggggaaggggcttgagggaggctcctgctggggaaggtggggctgagtccagcaggagggccagaccaggggccatgaccccattgcctacatagagaaggtgatgagccagcatccaggctactcagggagagctctaacccaggatgaggccttagagctcaaaggacactcaggcctggtggcagctgcccagggcccctgaaagggggaatggagatcaggcagagggggtgccagggactgccacacaggatcagtagggcagcgccagccctggctgggctgctttcacggctgcgggaaccgctccaactgctccagaaagacagaaagatggccctgaaggtgcaggctttgcgtgagtgggtggctgcaaggacaggtgggaggaccaggacgccagaacgtgcagagcccggggggcctccagaggtcgcagttccgacagggcttccaccagtcatgcctacatcttgaggggcagagacacaccccactaatgtttgggtccctgatgcaaaggcagagacaggtgcggggagggggtcctttttctccgaagcgagaggtgaagtcaccaactgctgggtcagaggcagtaggtctgggtctggaggagactggggacagggtggagggaggtgaccgcagccacgggctgggacttcacaggtgtgggctgggggcttttccggacgctgtggcagaggaggcccgcgcgccgcacatctgctgggacccttagctcgcccaggattggtagggagatcctggaagaccagcgcccggaggggtgaggccccgtcttgggggcaaggccgcgaaaccacggcctgcagcttcacgccaggggtacaaagaaaagcgtcgccgggaacccaacacctgcagacgacgcgcagccgcagaggaggcggggcgtccgaggccccgccccgtatgctaatgaagcacacaccacaccgccccgccccggcgcgagaccggtccaacgctgcggagatccagaggccggcggcgcccggaaacacccgcggaggccgaggcagggcggggccgggcgccggggccgggtcgctgggcgggcggcacagcccgggggaggtcaacgggccggccgggcgtcccggggacgcgtctcccccacggtgcgaagtggtacggctcgcaggggcggggcccaggtcatgtgacgcggccgcggccgccattttgttctgcggtgctggtatttagagcgcagcggctgacgggccggatcgccttcgccgccgcccgcccgcaaaccttcgtgcccggcccgtcctcgcccccgcctccgccaccgcctcg

SEQ ID NO: 15081 - DNA, 2300 bp, Homo sapien
tgagaatagggcccaggagaggggaactgaaaagaaaggcaacattctcttgggagaggaaggagggacagctctggaggagacaggccaccctggagcccagcccaccagcactgttgcggtgggaggcttgggccctctggccaggctcctgtgtgcttggagccaccccgtgtgcaggggagacctctctgggaggtcagctgaggcctcgtagttggactgttgatgatccccgtcgtcttctctgcccccatcctcttcttggctcaccctgtctcctgtctggtagagaagattctccaatctgtcaagggttcaggcctgctgtgtggctgagggtgctgagagctgccctttctggcagaatgtttggccctcctaggttaatatttggggctgggagcgttggggagcttggcctgggcagtgagtcaagggagctctggcctgggtgacaagagtggccaggtcagctgcttctgaccctccggtcacaccctgtagcagtggctttgccatccccaagacctttggtggcttttccagcatgttgtcctgggcagtagccccaagggtcgactgaccctgaccccacatgggggctgctgaggctgcactgaggctccctggggtgacaggtgggttcactgcagagccaggagccccagatgggtcacgccgccccaagagctgctgctggaggaagagctggactctgagggtgggggcctcacgtagaggaaggaggagtggctgtcctggcctccttttgcttgcccgtggctgttcctcctgggtcctcttgccctgggctggatgccttcttcggctccccctctgcatgtgataacttggggtggcccttggagctgtgccaaagctacacctcggggtcctagtctcaactggcctgcgtactgctgtgggctcaccccgccttcctcccacagccctgggcgctgcctatggcacagccaagagcggtaccggcattgcggccatgtctgtcatgcggccggagcagatcatgaagtccatcatcccagtggtcatggctggcatcatcgccatctacggcctggtggtggcagtcctcatcgccaactccctgaatgacgacatcagcctctacaagtgagcactggggtcaggcccctgcccagggctggaggactgcagggaggggggcggttcacctgtgggtggtgacccggacccttgtctccccctggttggcaggctgctgatgtcagtcctctcttctcgcccccaggagcttcctccagctgggcgccggcctgagcgtgggcctgagcggcctggcagccggctttgccatcggcatcgtgggggacgctggcgtgcggggcaccgcccagcagccccgactattcgtgggcatgatcctgattctcatcttcgccgaggtgctcggcctctacggtctcatcgtcgccctcatcctctccacaaagtagaccctctccgagcccaccagccacagaatattatgtaaagaccacccctcctcattccagaacgaacagcctgacacatacgcacggggccgccgcccccagtagttggtcttgtacatgcgcagtgtcctagtgcccatcgtctgtttccccggccttgcccccgcccgccccgtgccgtggacatctgggcccactcatcgcccctccaggcccccggcgccccaccccctagagtgctctgtgtatgcggatgatttagaattgtcatttctctttactggatgtttatttataaagatctggcctgttcctgcgtctgcggagcggcccttgtctcccagctatctataaccttagctagagtgtcgccttgtgggttcctgttgctgagacttcctggatggagccgccctcaccgccgggcccgtggccctgcgcggagctgtgtccaataaagttcttggatgtgacgggcctgtgtctgctcagcttgttgggggcgggggcgggcgggcgggcgggcgggcgccgggcgctgccggtcacgtgggctggctcgatcacgtgggcgcggcggtcacgtggcgcgccgcttcagtcagctgaaggtcacgtgggcgcggtctcagctctcggctggggttcgtcactgggcgcgggatttggccgccgcggggctccggagccgctcgctcccgacacggctcacgatgcgcggcgagcagggcgcggcgggggcccgcgtgctccagttcactaactgccggatcctgcgcggagggaaactgctcaggtgggcgcgggccggggactgcg

SEQ ID NO: 15082 - DNA, 2300 bp, Homo sapien
ctggggaccgggcggggtgcagggtgcggggccggggaccgggcggggtgcagggtgcggggccggggacagggcggggtgcagggtgcggggccggggaccgggcggggtgcagggtgcggggccggggaccgggcggggtgcagggtgcggggccgaggtcaggcccgcgatgcgagcgcccacccactgcgtccccagggaggatctgtgggtgcgcggaggccgcatcttggacccagagaagctgttctttgaggagcggcgcgtggccgacgagcggcgggactgcgggggccgcatcttggctcccggattcatcgacgtgcagatcaacggtgcggcccggggccggcaggggaacccaggggaggagctctgagctccatgcgacacttccttttctgtggctgcaggtggatttggtgttgacttctctcaagccacggaggacgtgggttcgggggttgccctcgtggcccggaggatcctgtcgcacggcgtcacctccttctgccccaccctggtcacttccccaccggaggtttatcacaaggtgaggtgaggctccctggctgaggtggagggggctcccggagcaaccagcgccctcattttcaaactcacgccccaccccccacccccagcacgtattccatggtcctgagtctggcctcctttgatgaccggatctgggcctgggtcccgcccctgtgcttctttatcagttgtcgctctgcctggcctccctagaccctctgtcctccgcagctgtctccacactgctggctcagcaccgtctgagccataggccgtccccaccccctgcactgcactctggctgcctccaggcttcagaaaccatccccttaaccaaggccgcaggggattctgtgattggcacagcgatagtccctggtcaggctcttcctccctaacctgtctgatgtgtgactcagtggaacacgccttccagaagagactccccctgctcctgtactgcttgccccacgcttccattttctttcctgcccggaagaaatttggttgtccttggtctttttttattttaatttttacttaggttctacagggttaactttttgctgtatgttactactattcaggctcctcttggctgtacctgtgctactgttttttactgaactatttgagagtaggttgtatccaacatgctttttttttttgtttagttttttttttttttttttttgagacggagtctcgctctgtcgcccaggctggagtgcagtggcacaatcttggctcactgcaggctccgccccccagggttcacgccattctcctgcttcagcctcccaagtagctgggactacaggtgcccgccacctcgcccggctaattttttgtatttttcgtagagacggggtttcaccgtgttagccaggatggtctcgatctcctgacctcgtgatccgcccgccttggcctcccaaagtgctgggattacaggcgtgagccaccgcgcccggccagtttttgttatttttaagagacagggtttctctctgtggcccaggttggagtagagtggtgtggtcatagcccattgcagcctcattcttctctgctcaagcgatcctcttgcttcagcctcttgagtaggtaggactacaggtgtgtgccaccatgcccagccaattttaacattttttgtagagaaagtctcactgtgttgcccaggctggttctgaactcctgggctcaagagatcctcctgtcttagtcccccagagtagctggcactacgggcttgtgccaccacacccgactaatttaaaaagctttttcggccgggcgcggtggctcacgcctgtaatccctttgggaggccgaggcaggcggaccacgaagtcaggagatcgagaccatcttggctaacacagtgaaaccccgtctctactaaaaatacaaaaaattagctgggagtggttgcgcctacctgtagtcccagctacttgggaggctgaggcaggagaaccgcttgaacccaggaggcagaggttgcagtgagccgagattgcgccactgcactccagcctgggcaacagatcgagactccatctcaaaaaaaaaaagttttttgtagagacagggatctcattatgttgatcaggctggtctcaaactcctaggctcaggagatctactgcctcggcctcccatagtgctgggattataggcgagagccactgtgcctggcccatcatgcctgtttattccttagtacttaactttttttttttttttttgagaca

SEQ ID NO: 15083 - DNA, 2300 bp, Homo sapien
agagcctgagccagaccacccagcctggcctctcctggattccagacccgcaggagccatgagtttctttgttgttttacacatcaaagttttgaggcaatttgttacacagcagtatataactaatacaccagctgtagggctttgggcacgttccttagcctctgcacccccgtttcctccctcgtgccatgagcattgtagaggcgagtgaggaacacgtagacgcagcacagtgccacgcacatgaggcagctttccagcccctcccgggatggttgtggtcattttcttgcccctccctggatggaccgtgacctcacaacgtcaggccaagttattgcattcttggcctgaggtcatccattggccatagacagaggttctcggcaggaaagggtgagataaagagaggggtcagtctctttcctccagcccgggtcgggagaaccgtgctgggccaggtgagacatccgctgtctgtgcggtgtcctgggatgagccactggacctgacccatggggagatttgtctgtgtcgccagagggcgaggggtttcctggtctagcttgccttgggcttggccaagcattctggctgccactggggcccccaggacaactgagaactgtcctttcttctttgaccttcagctgcccctctctcccctgtcccctggtgcctgctcagatgctttcttcttgtgacccttgacccttggcccttggcccctgccccgaggctcctccaccctgggctccgtgttctagagttcactgtgtactagttcctcaagctgtttgtccttcactgcttccgatttttctgtgcattactcaagaactgcatgggcatgtgtcagtataaaaaaaaataaagttggccgggcgcggtggctcacgcttgtaatcccagcactttgggaggcagaggcgggcggatcacgaggtcaggagattgagaccacggtgaaaccctgtctctactaaaaatacaaaaaaattagctgggcgtggtggcgggcgcctgtagtcccagctactcggagaggctgaggcaggagaatggagtgaacccgggaggcggagcttgcagtgagccgagatcgcgccactgcactccagcctgggcgacagagactctgtctcaaaaaaaaataaagttggccgggcgtggtgactcacacctgtaatcccagcactttgggaggcggagacagacagatcactggagttggagaccagcccctggccaacatggtgaaaccctgtctctacaaaaaaatacaaacatttgcctgtgtgtggtggcacatgcctgtagtcccagctactcgggaggctgaggcaggagaatcgcttcaacccgggaggcggaggttgcagtgagcagagatcgagccactgcactccagcctgggcaacagagcaaatttccatctcaaaaaaaccaaaaacccaaaacaaaaaaacacaaaaaaacattatcgacattaacaactacaaggcgcccggctaattgtatatttttagtagagacagggtttctccatgttggcaggctggcctcgaactcctcacctcaagtgatccgcccgcctcgacctccgcctcccaaagtgagccaccgtgcccggccgtgaatgtgacttgatagcccagatttccttccgtgaacgcttgttagttgtgaaactagcaaagttgcgcctctgagtttacgcagagccggctccggaatccgagttccgggttcgagcacagctccgccgctacctcgggcgtgaccttggccggagcctggtcccctctgagcctcagtttcccggtctgggatgccggaatgacagctcgccccctgccccgcccagccccgcccagccccgccccgcaggccctgggattggttcgcgcgaggtccccctccccaggcggggtcgggcctctcccgcccgccaggccccaacccggaaatgcagctggagcggaggcggagcccactaaggccgcggcggagcgacgatgggcgcggccaatgggcgcgggcgtcggctgcggcgcgacggaagtcctgcccggcgccgcgcgggggcggggcggcgccgggggcggggggcggcgggcgacggggcgggcgcaggatgagggcggccattgctggggctccgcttcggggaggaggacgctgaggaggcgccgagccgcgcagcgctgcgggggaggcgcccgcgccgacgcggggcccatggccaggaccaccagccagctggtgagcgcgcggcggcggactggacgcgccgg

SEQ ID NO: 15084 - DNA, 2300 bp, Homo sapien
gcattgtagaggcgagtgaggaacacgtagacgcagcacagtgccacgcacatgaggcagctttccagcccctcccgggatggttgtggtcattttcttgcccctccctggatggaccgtgacctcacaacgtcaggccaagttattgcattcttggcctgaggtcatccattggccatagacagaggttctcggcaggaaagggtgagataaagagaggggtcagtctctttcctccagcccgggtcgggagaaccgtgctgggccaggtgagacatccgctgtctgtgcggtgtcctgggatgagccactggacctgacccatggggagatttgtctgtgtcgccagagggcgaggggtttcctggtctagcttgccttgggcttggccaagcattctggctgccactggggcccccaggacaactgagaactgtcctttcttctttgaccttcagctgcccctctctcccctgtcccctggtgcctgctcagatgctttcttcttgtgacccttgacccttggcccttggcccctgccccgaggctcctccaccctgggctccgtgttctagagttcactgtgtactagttcctcaagctgtttgtccttcactgcttccgatttttctgtgcattactcaagaactgcatgggcatgtgtcagtataaaaaaaaataaagttggccgggcgcggtggctcacgcttgtaatcccagcactttgggaggcagaggcgggcggatcacgaggtcaggagattgagaccacggtgaaaccctgtctctactaaaaatacaaaaaaattagctgggcgtggtggcgggcgcctgtagtcccagctactcggagaggctgaggcaggagaatggagtgaacccgggaggcggagcttgcagtgagccgagatcgcgccactgcactccagcctgggcgacagagactctgtctcaaaaaaaaataaagttggccgggcgtggtgactcacacctgtaatcccagcactttgggaggcggagacagacagatcactggagttggagaccagcccctggccaacatggtgaaaccctgtctctacaaaaaaatacaaacatttgcctgtgtgtggtggcacatgcctgtagtcccagctactcgggaggctgaggcaggagaatcgcttcaacccgggaggcggaggttgcagtgagcagagatcgagccactgcactccagcctgggcaacagagcaaatttccatctcaaaaaaaccaaaaacccaaaacaaaaaaacacaaaaaaacattatcgacattaacaactacaaggcgcccggctaattgtatatttttagtagagacagggtttctccatgttggcaggctggcctcgaactcctcacctcaagtgatccgcccgcctcgacctccgcctcccaaagtgagccaccgtgcccggccgtgaatgtgacttgatagcccagatttccttccgtgaacgcttgttagttgtgaaactagcaaagttgcgcctctgagtttacgcagagccggctccggaatccgagttccgggttcgagcacagctccgccgctacctcgggcgtgaccttggccggagcctggtcccctctgagcctcagtttcccggtctgggatgccggaatgacagctcgccccctgccccgcccagccccgcccagccccgccccgcaggccctgggattggttcgcgcgaggtccccctccccaggcggggtcgggcctctcccgcccgccaggccccaacccggaaatgcagctggagcggaggcggagcccactaaggccgcggcggagcgacgatgggcgcggccaatgggcgcgggcgtcggctgcggcgcgacggaagtcctgcccggcgccgcgcgggggcggggcggcgccgggggcggggggcggcgggcgacggggcgggcgcaggatgagggcggccattgctggggctccgcttcggggaggaggacgctgaggaggcgccgagccgcgcagcgctgcgggggaggcgcccgcgccgacgcggggcccatggccaggaccaccagccagctggtgagcgcgcggcggcggactggacgcgccggtttgttaccctgccgggtccggcggccgcccgggtccggcgaggcggggcggcccggggtcccgagggccgggtgcctccttacctgcagccgggcggccgggccggggatggcgggcgccggccgagggcgctgcttggctgcggcggggagaccgggcctgggttgcggcgggcggcggcctggccgggggcg

SEQ ID NO: 15085 - DNA, 2300 bp, Homo sapien
ccacaaccacacacggcttcatgggtcccacgtcagcaaaacgtcccatgtcagctgctttcgaccttcatttctttgctttcagaggaaaaaacaccccgaagacaggtaacaagtgtgacttgacagtactgcgacaatactcctgtttgtgaaactcggaacacaagactctggaggctgtgtctccagcaaatgtccagagcgtactgttttatgtattcaaaaaaacaaaacagagaaataagaagaggtcaataaatgtccccaaaaaccctggagagatactaactttcaatctaagaaaaagaacagcttcccagggccctgccagtgagacacaaggacacagaatgtaacttgctgatgccaggttaaaatgaaattaactacatcagaaaaaacctccgcagaccatcaagagatgtgtctaacgttctcatctacaaaaccaggttaaatatttagccacactcatcacgtcatctgcttggggggtacccagcccccaaagactcaagtggccttcacaacaggtgacacccctcaaggggcctgagacctcctgcctggaaggacaccagccttgcttggagtctccggcaagccccgaggaaggtgagcctccccaaggaaatcacgtacgtttgacacacagcagcagcaaatactcaccgtggaaaaagagccttccccaaggattttcccaaacttgaagtcctcaggccgcttcttccgaggctgcggcggaggctgggcatgctgcagggagccggcgccgggccgaggctcggctgcagtgccgtccatggcggggccctgcctgctgccaccaggaatgccagggggcgtgctggactcagtctgggtcctcaccattgatggggatgggcaggaacataacaccacgctggactggatgggcacggcgtcatactaggcgacaaagaggaaaaggaagtaaggctcaaggcagctgccttgctctcaatgcacggactaaggtttaaggacctcatttcaacgctcaaaaacaaaccccaagcacagggcaggccagctgagccccgcggtctgctgtgagctgccggcctcctctcctgagtcctgcccgtgccatggctccccgctaatccaccaggcagcgcctcgccctcctcctgtccctcgcgctgcctgagcctccagccaactcatcccaaggccaaggtaacctgagcagagatagcacggcacatctttaattgtgggggggatggagagataagagtgatgatcgcatgtgtttacaatacacagagacgcccagtgctggcaagactataataaagcgagcgcactcacaccactgcggctggcaccaaaaaccgggattgcagtggaaatgtttttggaaagcagtttggcaactgtcaacaaagcgactacagaacagttgtcaatgagacacagaaatacgaaggagaggagggagggcagaaacccagttaacaatgtaagcgggcacggagggaagatcagcgtgcaaagctaggtcggcaagacgtgcaaggtgcacccacagccataacaatccctccccagaccccaacgtgtcctcacggtggtggcagtggccccccgcactacagaagaacaatgcgaggcgagctcaggcgcgctgatggtggtttccgatacaactccccactcaaagaaccccggagagctcttgattccatctctcagtagggtcctgaagtccatgctgtctgaagacacagggtctccccctgcgtctgtgccaggacagagggactgccaccagccaagctgcaatccttttaaacgctaaaaacggccgggcttggtggctcatgcctgtagtcccagcagtttgggtggatgaggcgggtggatcccctgcggtcgggagttcaagatcagcctgaccaacacgaataaaccccttctctactaaaaatacaaaattaggccgggcacagtggctcaggcctgtaatcccagcactttgggaggcagaggcgggaggatcacctgaggtcaggagttcgagaccagcctgaccacatggagaaatcccgtctctactaaaaatacaaaaaaactagccgggcttgttggcgcatgcctgtaatgccagctacttgggaggctgaggcaggagaatcgcttcaacctgcaaggcagaggttgcagtgagctgatagcatgccattgcactccagcctaggcaacaagagtgaaatttcgtctcaaaaaaaaaaaaaaaaaaaaaaaataggccgggcgcagaggcc

SEQ ID NO: 15086 - DNA, 2300 bp, Homo sapien
ggcacgatcgtggctcactgcaacctctgcctcccgggttcaagcgattctcctgcctcagcctcccgagtagctaagactacaggcgcgcaccaccacgcccagctaattttttatatttttagtagagacggggtttcaccatgttagccaggatggtctcgatctcctgacctcgtgatttgcccacctcgacctcccaaagtgctgggattacaggcttcttttattttttatttattactactattttttaacagttgatcgctctgttccccaggctggagtgcagtgggatcatcctagttcactgcatcatccatctctcatttcagcctctcgagtagctgggactacaggtgtgtgccatcacaccaggatgatttttggcttttttgtagatatggagtctcaccatgttgcccagtggctggtctcaaattcctggcctcaaacgatcctcctgcctcagcctcccaaagccctaggattacaggtgtgagctcccatgcacagccagggtgatgtttgaggattctgagagaagttcccagatccaagacaaggtcttagggcctccatgactgtgcagagatgaaagcaccaactgacagaatctcagccagagccctgagtgtgaaaacacagggctggaaacgcccagaagggaaagataaggcccggtggaggaaacgagcaactacctcaaggtgccaagagaggccccacaggcaccagctgggtacctcccagcacacagaatacagggccaattcctaagaaacagaaaagccgagctgagtccagagtgcctgccttgctgaagggcctgctctccacccagctgtgctctcctccagctactgggggccggctggccgtccatggagacgaggccagaaccaccactgctctgtgctcacggttccccttttccacacgagagcagctacaacaacacggtcacttctgtctgaatctttcctccaccaacaaacctgcactcgcgtccctccaaaccgggctccagcacctctcacccccacagagccctctatggaggcctttctctgacgggcaccccaagcccaggcagaggcccatgcaccacttggaggcccttggacccagcctcttgacccagacagactccagcaatcacccgaggttcaccttcaaggtcacttataatgcacacagcagccttcagcttccccaaacctcatcccaaggctttatcttctctctacccagcactcgggagcactcttcagaatttcagctgcctttctttacacctccagagtttgtgatttctacccaataagcacctgaagggcatcgagatacccccggccggctaagacaacctaggccacttctctggcccgagtggactttcagcaacatctccgatggagttgtcacaacatggtccgaggctagaaactacccttgggaacaggactcggaggctttgtgatgacaaacgtgcacgtggccagcagggagacagacggacagctaacggagggagcgcaccgaggtacagggatgtgcgcgcccggatactacctgcaacacaggcaggaggagccaggagctgaccacaccggctccacatcctgcacgcgggtggctgggtacgaatgtggccccccacactgtccagaagacgagtagggaggatgaaccagagcaggcgccgaggagaaccagcgacctcccactctacaccaacacacactgcctggggcccccccaggaagacctgctggcgtggcagggtcttgcccagagaaagttcaagatctgtttgagaacggccaaggtatccccacctcagtcgttgatgaagatgacacaatgcaaacactcctcagaagtcgctttccatctgaagcacagagccaggctctgctagaaataaaactcacacaccttgtttgctctctggggataagacttttgctgttccaaaatctgtgatctggatgtgcatatcttcatttaacaaaatgttttccggtttaaggtccctgtaaaagcagattttcacatttgagaagaaatacttaaaacagcaacattattacgtactctaaattttgctgaaaacaaaatgaacgaatgaatgtatatgatccttacaggctgacaaccagggctacaggcctaaagctcacaagcaacaagtgttggctggacacagtagggattcaccacctcacatctccatgtcattctaagtcgttttttaacgaagtaaaatctatcatttttaacgcacaaaatgaaag

SEQ ID NO: 15087 - DNA, 2300 bp, Homo sapien
ttgcatttctttgattctttgcagggttgaatggcttcgtttgtttttggcccttggtttggttgtctttcctctaggccggcaggggcggggtgcgtgtttgcggatgtccttggtgttcttggcaggatcactgagggtcctggcaggatgcaaatgcagccatgaagtgtttgttttttgtttattatttgagacagggtctggctctattgcctaggctagagtaccgtggggccattgtggctgactgtaccctcagcttcccgggttcaagcgatcctcccttctcagcctcccgagtagctgagactagaggtgcaccaccatgcctggctaattcttgaaattctttctagacacggagtctcactatgttgctcagactggtctcaaactcctggcctcgagcagtcctcctgccttggcctcccaaagcagtgggactgcaggggtgagccaccgcacctgggcagtcatgaagtccgcagaaaagtcattcactgaagggattgagtccccgcagcagaggctgggaggttctctcagcgtggccggaggagggcaggtggaagggaccactcagaagcggcccacgggcagggccggtgtggacagcagctgcgtggtggccctgggccagctcgtgctgtggctctgctccgtcacagctcctctgtggaggaaggcccttgggctggaggcctgagtcttgttccctttgtagcgcctcagctcccaagctgtttgtgatggaaaggaggtttttctggcctgcaactgtttattgtgtgcctaggcacgtttggataccccaggtcctgcagtgagccagccagcgccgtgtcctcatgccctccgttgagcgggcgccaccggcagaatgtgctggccgtttgtgtgcagctcactgtccaggcgcgtgtcgggtgggagcgccagggtgcagggcgccggtgtccagggatcaggcaggcgtctttgagccggtgagccatgagccagccccggtgcgccccggacaagtctggctcctgggggtgcatggtccgccatgtgcgacacccaccgcgcagcccttgattgtcacagatcgtgagtccgagtgtgaccttctctctcctctgcagccagggccaactcattcgtgggaacagcgcagtacgtttctccagagctgctcacggagaagtccgcctgtaagaggtaaccactttcatctaagccgtgcttcccttttctttaacacagaaattaatatttgagagagtgaatttggtggcctttaagtagctaagcatacttgggaagaaattagcatttcgcattttaaggcgtattttccgtggcgtacacacacgtgatgcgttagtgttgtgttctaagcttcctgggtttgctgatgctttctggttgcagattgaatcgtttgggttttttttgtttttgtttttttgttttttgagacggagtctcgctctgtctccagactggagtgcagtggcaccatctctgctcgctgcaacctccgcctcccgggttcaagcaattctcctgcctcagcctcccgagtagctgggactacaggcgcacgccaccacgtccagctgattgttgtatttttggtagagacggggtttcaccatgttggctaggatggtctcgatctcttgagctcgtgatctgccagcctcggccttccaaagtgctggagttacaggcgtgagccaccatgcccagcctgatcgtttctttgggaaaaactattgagtgaggaaagcgtggctgccgtgtgcacagagcccaggcttccttggtgctgccccccgtcggggtggagggcaggcagcccggccttcgggttgctcggccacacaccagctgcagtgggacagcgtcccgcagagcgcagggaggccctggagggtgcgggtgtgggagggaggaggcgtccagcaggcatgagggtctttgagagacacagctgggtcttggtggcagcctccatagtgaaaaaatgaaaaaagtgcagatggtacaggggctgcagggccggtgcgggtcaaggaaggggaaagtggagaagcccagccaggggaccaccggcggtgtgggggaggatgtccagggagctgacggcaagggttggtgagaagtctgaggtgctgtctagggtggctgggaggcaggtggcaggctgagaggcagcatcagagtctggagtttcaagtctagggagcagttttgtggaatgagggtggggctggggttcctcctgccccaggccagtcaagtgctgc

SEQ ID NO: 15088 - DNA, 2300 bp, Homo sapien
tctcgcttctgagcctttgttaaaaatgttgaatgttgtgaatactttgtgggatgaagtgggaagtatacagaagggcactcaattctgccgcaaacatgagtgtgcagccatctcaggggagacacgcttgtggctgttggcctgctgtcctcgcggagcgtctggctgacgggcaaaccgccgttatgcagacttagctatttggccagtatttttcttgaaaatgattggaatgagcttgttactttaaggaaaacaactgcctgtatttatgtcagtgataacattgaaaccttcaagtgaaaattggaattttggaaaactttattcattactgtgagcctgataccttcccaataaaagactttttttagctatgtttttttgtttgtttatattattttttaaaaagaaagagacaagctctcactatgttacccaggctggtctcgaactgctgggctgaagcattcctctcgcttatgacttcccaaagtggtgggattacaggcgtgagctactgcaccaggccaaaagtctttttttttttttttttctgtttttgaaacggagtctcattctgtcgcccaggctggagtgcagtggcacaatctcagctcactgcaacctccgcctcccaggttcaagcatttctcctgcctcagcctcccgaggagctgggattacaggcgtgtaccaccacacccggctgagttttgtgtttatagtagagacgtggtttcaccatattggtcaggctggtctcaaactcctgacctcaagtgattcacctgcctcggcctcccaaagtgctgggattagaggccaaaagtcatttgatacatagtgatatccatgaattgatctgtggaaaccgtagaatgaaatttgtcaacgtttggaagctttacatcattcagcccccatgtatgaccctatgaaatcacatgagggtagaagagcccctagtgcagggtagattgatggtttttagtgtcacggtgtgtggaaatgtattgttacgagtcagatttcacattgcaaccgagctttaagcagccaccaccttctgaactgcagtgtagtgtccaagaagaatatccacaaacatctacacttattcttagccaaaaggccaggaagtgactccagtctctaaaaaggctgagtatactcctcccttttctagctgtttatctgagtgaggctgggtgtttgccgtgttcttccgcctgaacacagatctcagcagagtatgggcgcaggtggatgcggggacccagcactctccttatcagccgaacaggagaggcctgtgcagcgcacagagtggcacactctcctcattcattatttttgttttggaaagtagttattttaaaaataaaagtaatgtatgttaatagtaatgggtttattgtattttaatgaattaaacatttgaaaatgtctcagttttaatttcctgcgtagtacatatcagttgatctgaaagctctttggggtcttccacagaggtaaagagtgtgaggggccataggactggaaggttggagaggaaacctggggcccgtccgccattgccactggctcccgcccttactggcagtgaagctgagcctgcagagccctcccgaggggtggaaaagcctccagcggggctctgggtccttgctggggctctcctgggcgtggcaggtgctttgccagtggctttgggcttggatccttgacaatgctctttttggggtctgggtgagggagggtggaggaggtggcaagaacctgcgctttggcatcgggaaagggggttttctatggtcaccccttgtggattgccctgcatcctcctctgtgcagaggtggggagaggtgtcgcctgttttgagggagccaagatggcggtgtatgagagtgaggtgcctcgggaaagtcccgtgtgcatggcgagtagttaggtgtgtctccaggtcttcagctcttgcccagcctcccagggaggaaagggctctcagggcaggggattttctgcaggagacagtagaaaatcaaggtgattgcagcctggccaacatggtgaaaccctgtctctactaaaattaccaaaaattagctgggcctactggtgggtacctgtaatcccagctactcaggaggctgagacaggagaatcgcttgaacccaggaggcagaggttacactgggccaagattgtgccattgccctccagactgggcaacagagcgagactctgtcttaaaaaaaaaaaaaatcaaggtgattcctggaagtgctca

SEQ ID NO: 15089 - DNA, 2300 bp, Homo sapien
gggacccagctccatgcacgtcaacccagtcccgcccagactagtggacagacctggtgtcaccagtttttcctagcatcagtccgaaccatgcgcccgccctgccccaactgtgtgctggtcctgctgtggccgaggggaccgggtgtgtttggctctttatgcccctcccgctgtggtcctggaactcttcaccagggagggagccctgcgggggccgcagctttgtggagggagccgccgtgcttctgtcacctgctccctttcttgcgtctccctgtgatgggcccttaggcctggctgggcccattacatatccctgtggtggctctggtggcagctttctgtggcccctgctgtgttggcaggcaggtttgcgtggtgaggagcgggaggggttggagtggtgcgggagcaggctgccgagtggagggtgccatcgagggctccggatcccttatcctacttagcagtgttggtctctggggctggaagccgagcgcatgctgggagcggtactgtcagaagtgagcccagttagtaccccgctggctcactgcacgagagagtcctgccccgagccctaggtggggccaggaggtgccttggagaagccagccagagcagagagggctgctgacttccgtgtggagcagagaggcctgagggcctcctaaaaggtttaaatgtccacgcctctccagttgctgaagtagggtctgagagaaccctggcatcagcagacccagggtgcttctgtctcctgcagaccacgccagggagtgcagacaccaccgtcacacacgccccttttgtgttttggttcaagtttctcagagcccctcagagcttctacatctgtgcatcagaaatctcacagccttctcatgctgccggctcatctgggcccatagagtgggctttgccagttgctgttgcacaggaggcgagaacagcacacttcaaccccagcttgctggtcggctttcctctagagagagccggttttggggccatttccctttgatgctttggtggccttgccccgctctgcagcacagacaggccagatgcatttgtcctttgcctagctactccccaggtagagagtgctcctggtggcctggcaggtctgggcccttctctccctgcccaggttgtccctggagggcagccctcactccctttgggggagaggcagacattgctgcccacagacctgcctctgactcaactgtgtccaccctccctggtccctacccccaagtcacaggtgactcagcagtgaccctgtgtgccaggccagatccaaactgagagggaaggtgtcgtttttacactgctaatgacgagagtggctctttttagctaggcgagtacagacggggcctgggagggggcagagatgttccccaggccctgcctgtggttcctgcctgggccttggctgctgctgtgtgagagctgcatgtgagcctgtgaccgtgagctggggtgagctgggccgcacctaccctggggccccagggagcaggacgctccggggcccagcacgttgccctgggcctgtggccggagtcggagtcctctctcctcctcctggcttttggaaaggcttggctgtgttggggagtctctcttagccctttcaggaatttctgttcaggcttcctcctcctcatcagctattttacccatctcagaacgtcctgtgtctccatgtaggagagtggctctctcagatctctcagggcgtctggttatagggaaacaagtggagcagggacgtggctttaattggagcactcggctgggctgcttggggagactcttccgtgcgttcttcctctggatagaaccaccacctcctgggcgtcactgacaagctccatcttaacctccaaagccacagaactaggggctcagagccagagctggcagccgccagccaaaatgatgccattgcctgagctgacagccaagcccttctgtgggtcacctttctcctcacccagccccttgctcttcccttttgaaaggcccgtgtgttttctttccttaccctgtgcttgctcatgtctactccggttttctctaccacatccttagagccatcacctggcacgcaggcgccttacattctacggtagaacgtggggtactgtgtgtgcacatagacacacttacgtggaattacagttgtgggtttatccaagatgaggaagatttcacctgctgtttaatagacttggggccatgtgcctccccacacatgggcaaggacaggtggaatgtcggga

SEQ ID NO: 15090 - DNA, 2300 bp, Homo sapien
agattctgaacaaatcggtttctgataagccatgtgttccaaagaatgtctgaataagaccgctctttatttaaatgctaagaggatgtcactactgcaatccatctgtggccgattttttccaagagccaatttccttgttttggttgcaagaacctggctctgcctgcatgtcagctctctgccctccctgctgccgtggctttcaagcgcttggcagaatcttgtacttcgtgtccacaatggtactgaatttgcatctgcacagtcagcagagataacaagtgttgaactgaccttgccacatgcttagtgagtgatttgtaattaagtttatagactcagaaggtatattaggacatttggaatcagtagcagagcaaagcctctttgaaaaaaaccacgtagctgattgggttttacaagagtgcatttgtctcccccttccacccgtggggccccaccttcaggtcttagtggttcacaagagcccagcagccaggctggctttttcattgtagggcgtggttgtcccagctggtgtagatttcaggccgccccccccaactccctgcccacagtgttgcagattgcctggctggcagcaagtccagaccacccaaatttggttggattcttcatttctccactgtagttggggtccattgattgtgcaggggaacgtgcaggaggtttttctaggcaccgtgttcagtgctgcttcactctaccagagattatggccaaattgcacggaatttggtttcttgccctctgaagcctgagggcccccccttgcctggctggttgacagacccggggtggtcactgctgagacttcagagatcgcagctgctgtgagaatacggtgaaggtactttgttctggaagatgttgtcatacacttttccccagttattttcaaacttgacatgagcctatgttgactcactgggtgggggtcccttcttacgcagcacacgtggcaagtgcctgaatcggggctggaggcacttcagagcctctgaggggccaccacttctggcccaaaattgcagggttgtagatgaggctgcctgtggagaactggtgtgaggaggaagctgtttccaacaaagagcactttcatctgttgagatggctgtggtgagcaactgaacgagcctacgtgtgtacctgaattttccccgtaactcatttcttccatatgaagaaacaccaaactatgtacagagaactttttacaaaaggcagaccttttttaagctgtgtaacccacatagcctaaccacctggcagaatgactacgaataggggtcattgtgctggtaaaagcctctattacgactgtaagtaagttggatgttggcaaaattaaattgttacagtatttagagctgctgtagctgttccttcacaacataaaataggataaatgactagtacgtctttcaggtgggtggcaagcagaacatgcgtaatattctctacctggtctgtagctgtaactgtgatgtacagacaaagcaaaaattaaaagaacttatgaaaacaaatgcaatgatactaggatatacacttttgtatttttattcttatataaggttatttgctggctattgttggcctctagttcagtctgtgttatttaaattctaatatatgaattatttgaattgaattcatgttcggggccacgttgttgtatgtattgatgtacagccttgaatgtgaataattattgtaaactatattttacaactttttttctggctttattatataaattttctattgggtcagtgatttaatcatataatttaatgaatctgtttatcctttttttttttccaaatacttgtgctttaggtgtagttaccagatgatgaattttcctcgtatggtcagtagtcttgtaataaaaagcatgtagagtgtagaggtttgctggcgtggctcttcctttgaccccgccacggagtgggggcgcggttgggggcgggtgtctgccattgcccgctagcgttggcgccccaagctcggtttcactccctccggaagtgggaccagccggctgcttttcccggatggaacttccgcctgccatgtgaccggcgggtgttctacaagggctgaccagtgggcgggacagaacgcaaagggcgatattaaaagccggactcttccggtgaagcggaggtgtggtggggcttgctgggatcatggcggggaatcactgcgagctcctgccgctggcccgtggcaggctcggggcggggttggggtggcttcttgtgcct

SEQ ID NO: 15091 - DNA, 2300 bp, Homo sapien; identical to SEQ ID NO: 15086

SEQ ID NO: 15092 - DNA, 2300 bp, Homo sapien
ccacaaccacacacggcttcatgggtcccacgtcagcaaaacgtcccatgtcagctgctttcgaccttcatttctttgctttcagaggaaaaaacaccccaaagacaggtaacaagtgtgacttgacagtactgcgacaatactcctgtttgtgaaactcggaacacaagaatctggaggctgtgtctccagcaaatgtccagagcgtactgttttatgtattcaaaaaaacaaaacagagaaataagaagaggtcaataaatgtccccaaaaaccctggagagatactaactttcaatctaagaaaaagaacagcttcccagggccctgccagtgagacacaaggacacagaatgtaacttgctgatgccaggttaaaatgaaattaactacatcagaaaaaacctccgcagaccatcaagagatgtgtctaacgttctcatctacaaaaccaggttaaatatttagccacactcatcacgtcatctgcttggggggtacccagcccccaaagactcaagtggccttcacaacaggtgacacccctcaaggggcctgagacctcctgcctggaaggacaccagccttgcttggagtctccggcaagccctgaggaaggtgagcctccccaaggaaatcacgtacgtttgacacacagcagcagcaaatactcaccgtggaaaaagagccttccccaagaattttcccaaacttgaagtcctcaggccgcttcttccgaggctgcggcggaggctgggcatgctgcagggagccggcgccgggccgaggctcggctgcagtgccgtccatggcggggccctgcctgctgccaccaggaatgccagggggcgtgctggactcagtctgggtcctcaccattgatggggatgggcaggaacataacaccacgctggactggatgggcacggcgtcatactaggcgacaaagaggaaaaggaagtaaggctcaaggcagctgccttgctctcaatgcacggactaaggtttaaggacctcatttcaacgctcaaaaacaaaccccaagcacagggcaggccagctgagccccgcggtctgctgtgagctgccggcctcctctcctgagtcctgcccgtgccatggctccccgctaatccaccaggcagcgcctcgccctcctcctgtccctcgcgctgcctgagcctccagccaactcatcccaaggccaaggtaacctgagcagagatagcacggcacatctttaattgtgggggggatggagagataagagtgatgatcgcatgtgtttacaatacacagagacgcccagtgctggcaagactataataaagcgagcgtactcacaccactgcggctggcaccaaaaaccgggattgcagtggaaatgtttttggaaagcagtttggcaactgtcaacaaagcgactacagaacagttgtcaatgagacacagaaatacgaaggagaggagggagggcagaaacccagttaacaatgtaagcgggcacggagggaagatcagcgtgcaaagctaggtcggcaagacgtgcaaggtgcacccacagccataacaatccctccccagaccccaacgtgtcctcacggtggtggcagtggccccccgcactacagaagaacaatgcgaggcgagctcaggcgcgctgatggtggtttccgatacaactccccactcaaagaaccccggagagctcttgattccatctctcagtagggtcctgaagtccatgctgtctgaagacacagggtctccccctgcgtctgtgccaggacagagggactgccaccagccaagctgcaatccttttaaacgctaaaaacggccgggcttggtggctcatgcctgtagtcccagcagtttgggtggatgaggcgggtggatcccctgtggtcgggagttcaagatcagcctgaccaacacgaataaaccccttctctactaaaaatacaaaattaggccgggcacagtggctcaggcctgtaatcccagcactttgggaggcagaggcgggaggatcacctgaggtcaggagttcgagaccagcctgaccacatggagaaatcccgtctctactaaaaatacaaaaaaactagccgggcttgttggcgcatgcctgtaatgccagctacttgggaggctgaggcaggagaatcgcttcaacctgcaaggcagaggttgcagtgagctgatagcatgccattgcactccagcctaggcaacaagagtgaaatttcgtctcaaaaaaaaaaaaaaaaaaaaataggccgggcgcagaggccaaa

SEQ ID NO: 15093 - DNA, 2300 bp, Homo sapien
agtgaaagtggcaatatctggcatttgtagatggaagctggaactcagtacaggtgggaacgtaagcgcctgtcgttgctgaggtggggcagcagtcagttgccagcgcgtgttcaaacacaggctgattcaacagttcccgttctgggaatttaagatcggaaaataattaaagtgtatgcaaagattttgctactagaatatttgtcacagctttgaaataggggagaactggaaatatcttgaatttccctcaggcagagataggtagaaacattgtggtgaagtctgtgtcgtccctcaggatctgtgggaaattggtcccaggacctctctcagataccagagtcggagggtgctgaagcccttgctctgaagtggtatagtgtttgcatataatctgtgcacaccctcctgtgtactctgtcatcaccagattacatataatgcctaatgtaatgtaaatgctatgtaaatagttgctttactatattctttagggaataatgacaagaaaaaaagtctgtgcatgttcagtacagatgcaatttcttgtttttctaatattttctatccactgttggttgaatccatgcatgtggagtcaacctatggatggggatggcagactgtactctcctgacaggtggttacaaagtatttctatctgaaaagagctggctgcaaagcagcatgcccagtataactttcctcaggcccagggaaaagcttggagggaggttcccacagaaacattagcagtggtttcctgggccagtgggataaggaccaggcattgtgctagcagtggagaaacagtggtgaataaggtaggtctggctctgtctcctggagcttactggactgaagatgaacctttctccactaatttttattctgaaaaatttcaaaactaaagaagagttgaacgcatagtacaatgaatatccctagcctttcacctggattctaccagttgttaaccttttccatatttgcttgtatatgttaccctctcacctccccaaatttttttctattatttttattatttgaaagtaagtcacacacatgatagcatttcaccccagaatccttctccaggtgccttctgagctcagaagctgtctcctctacaacctcatcattatcacatccgagatagaattaacattgcattttctttttttttttttttttgtttttttgagatggaatctcatgctgttgcccaggctggagtgcagtactttgattttggctcattgaaacctccacctcctgggttcaagtgattcacctgcctcagcctcccaagtggctgggactacaagtgtgtaccaccgtgcctggctaatttttgtatttttagtagagatggagttttatcataacatggcattttctaatgcaaaggtgacatgcagccttcctcagtggtccccagtcctcctcaaagtcctttatagagacagttttactctgttgcccaaactggaatgcagtggtgtgatcatagctcactgcagccttgaactcccctgggctcaagccatcccccagccttagcctcctgagttgctgggactacaggcctgtgccgccacacctagctaatcttttttttttttttttttgagatggagtctcaaacttgtcacccagcctggagtgcagtggcacgatcttggctcactgcaacatccgcctcccagtttcacgccattctcctgcctcagcctcctgagtagctgagattacaggcatgcgtcaccatgcctggctaattttgtatttttagtagagacgcgtttccaccatattggccaggctggtcttgaactcctgacctcgtgatccagcctccttggcctcctaaagtgctgggattacaggcgtgagccactgcacccagcctaatttttgtatttttagtagaggcagggtttcaccatgttggtcacgctggtgttgaactcctgacctcacatgatccacccaacttggcctcccaaagtgctgggattagaggcatgagccaccatgcccaatctctgcaccatgcccagtatcccttagtggcccttctgactttacactgcttttccctcctgacagcggggccctgctttcgtggtctgtatcctgcttgagcaaggtgccatgaggcttttcctaggccttgactttgctgtagcttctaaggtgtcctgtggcggcaaaagggacgtgtgctctgtgggtgggtgcagccacctgtagagctgcagctatatccccaggatggttgtgtgactgat

SEQ ID NO: 15094 - DNA, 2300 bp, Homo sapien
agaggttgcagtgagccaaaatcatgccactgtactccagcctgcgtgacagaacgagactgtctcgaaaaaataaataaataaacagaaaccagaatcgggtgctcttataaggatgtgtagcccagaaactcaatcttaacacattctaaatgacctggaatttcttggagcaaaaattccagtttaaatatcaggaaaattgtctagactaagagaatggaaacggactttgtgcaaccaacatcaggtacagaaaagagaccccaacaatcatcatgaacccaaacaggcctttctcctcactaagagaagagaacacacacaacccatgccttgttactctttgagaagatgtgccctgcctgtgatctagcagctagagacggaacatacaacctgttctcaatattcaaataattttttaaaggacatggtatcacactgagcaagtgaataatgcaattctgttgtagaagaatgaacggctgaaaagacctgagcaactcatgtccaaaacttgcagtttccacagcagcacttcctcccagcacactgccctttgaacctgctttctaaacaactgtgctgggcagcccggtgaccacatgtcatcgcacggcaggtgtggagcagcatagagcaccctgaccctcgcacctgcttgggggactgtttctgcacccagtgcttctctgcagccacaacctgccccacacagaactgcagcactacgtggcatcctgtccaagtccatttccacagaaggggaaagtgccacgccagtgcccactctcttccaaacacatcctctcagaagggactggccacgcttgccccctcatttctgcagcgcttcccagttcatcacctgcttgccagactccatctcccaccggtgtcaatcagctgccctggagcatctaaaccctgggtcaggcggctcaggggatgagcgcatagattgaaaaaggaacactccctgtttctccccaaaactgtgctgaaggcagtctagagggccaagacctgttgagaagagctgcccaaggcctcttttcaggccccacatctctgcaggctgctgctggatccttctcataagaacacatctcagaagagcagaacaaaccacttccctcttgtagggaccagccccacagggtcggtgggtctctccctgtgtgtggcgatgagagagtgtagaaataaagacacaagacaacgagataagagaaaaggcagctgggcccgggggaccactaccaccaatgtgcggagaccggtagtggccctgaatgtctgactgcgctgttattggatacaaggcagaaggggcagggtaaagaatgtgagtcacctccaatgataggtaaggtcacatgggtcatgtgtccactggacagggggcccttccctgcctggcagccgaggcagagagggagaggagacagagagaaagacagcttatgccattatttctgcatatcagggactattagtattttcactaatttactactgctatctagaaggcagagccaggtgtacaggatggaaaatgaaggcagactaggagcgtgaccactgaagcacagcatcacagggagacagttaggcctccggataactacgggcaagcctgactgatgtcaggccctccacaagaggtggaggaacagagtcttctctaaactcccccggggaaagggagaccgcccccctttcccagtctgctaagtagcgggtgttgacaccttttgcaaaaggtgttccttgacaccttttgctacggctgggccacgatccgcctggtaacgggtgtcttcccagacgctggcgtcaccgctagaccaaggagccctctggtggccctgtccgggcataacagaaggctcgcactcttgtcttctggtcacacttcactatgtcccctcagctcctatctctgtatggcctggtttttcctaggctatgattatagagcgaggattatcataatattggaataaaaagtaattgctacaaactcatgattaatgatattcgtatataatcatatctaagatctatatctggtataactattcttgttttatattttattatactggaacagctcgtgtcctctgtctcttgcctcggtgcctgggtggcttgccgcccacatctcccccctttttattaactagaatcgccatcgccatcattgcttgttgttgacttcggacttggtttcggactccttagaggcatctgcagactaaaaggagacaacataagcataccaatattaataa

SEQ ID NO: 15095 - DNA, 2300 bp, Homo sapien
ggctgccacggcaagtgtgaaccaggcttcaagggagtctgtgactctgagtccgatttgcaggaaaggaaccaggcttcaagggagcctgtgactctacccaagtctgatttataggaaagggaccaggcttcaagggagcctgtgactctgagtccgatttgcaggaaaggaaccaggcttcaagggagactgtgactctactcgagtctgatttataggaaagggcttcaagggagtctgtgactctaactgagtccgattaggagaaataggattgagggcctcattaccgggccgagaattggaagcctcttttctgagctgttcatatagcggagcctctgtaccgggctgcatagaaacataatttatagactcgtttacaggctgcctggtctcatctgctatttgcacagcggcagcgttgaaacagtgaggagagacaggagggtctggctgcaatggctgttgatatgtttcagctgagttttgctgattgggggagattagtatatttaggtcagttaaaagatcatcataaagcggcaatgggggtgcagtagcctctggtgtaggtggaagtggtgcaggcatgtcagagtggaagtcctcctttgaaattacgttctcaatttgtgtagtatcctcaggggaaagagagctgagcgcttcctcgacctccctcagaggagaggaaagagggatcagtctccatattgtcctcctgagtctgtaaggagtctaagacagagtgaaccgaagcccagattgaccaaatggtgggtgggataaaatgtccccctttatgagcaattttgaattgtttgccaatctcaacccaatctttaagttctagagttccctcagtcggaaaccaagggcaaagaagatctacaacctcaaatagttcaattaacttttcagtagaaactttaacacctccttctttaagaagagtttttataaaatttaaataagccaaatactttgtactggcctgtcccatggtgtccccagaaaactgagtgctcaagcttaccaccaagtttatagactgcaatcctcaggaatctctcgttgaactcctccgctgatcccgcactcagggtgcaacttcacacagcgagggagagccccacgtcagagcgccagatgtagggaccagccccacagggtcggtgggtctctccctgtgtgtggcgatgagagagtgtagaaataaagacacaagacagagagataagagaaaaggcagctgggcccgggggaccactaccaccaatgcgcggagaccggtagtggccccgaatgtctgactgcgctgttatttatcggatacaagacagaaggggcagggtaaagaatgtgagtcacctccaatgataggtaaggtcacgtgggtcacgtgtccactggacagggggcccttccctgcctggcagccgaggcagagagggagaggagacagagagaaagacagcttataccattatttctgcatatcagggactattagtattttcactaatttactactgctatctagaaggcagagccaggtgtacaggatggaacatgaaggcagacaaggagtgtgaccactgaagcacagcatcacagggagacagttaggcctccggataactacgggcaagcctgactgatgtcaggccctccacaagaggtggaggagcagagtcttttctaaactcccccggggaaagggagaccccccccccgcccctttcccggtctgctaagtagtgagtgttgttccttgacaccttttgctaccactgggccacgatccgccgggtaacgggcgtcttcccagacgctggcgtcaccgctagaccaaggagccctcttgtggccctgtccgggcataacagaagcctcgcactcttgtcttctggtcacacctcactatgtcccctcagctcctctgtatggcctggtttttcctaggctatgattatagagcgaggattatcataatattggaataaaaagtaattgctgcaaactcatgattaatgatattcatatataatcatatctaagatctatatctggtataactattcttgttttatattttattatactggaacagctcgtgtcctctgtctcttgcctcggtgcctgggtggcttgccgcccacaccctcttactactgggagctcaccttgccagctctagactcagcttggactggctgtcagggcaacgttgcgtacaggaatacatcacactatgcaccagaccagccacataaggaggaactccccaaaag

SEQ ID NO: 15096 - DNA, 2300 bp, Homo sapien
tcgcgcaggctggagtgcagtgacgcgatcttgacccgggaacctccacctcccgggttcaagcgattctccttcctcaaccacccgagtagctgggattacaggcgtgtgccaccatgcccggctaatttttgtgtttttagtagagaccggggaaggtatgggccctcttttgagaaaaatgcagagtgacactgaattttgtaactacatcaggaggctcttgaaccttctgcagctcactcgtggagtttgtagagatgcgtaataatccgaagtgttaaggaagaaggttctgttgagaaaaagttggagggctgaaagggatgcctttcgctatttcgacatgtgtggctgtaccccagagtgccctggctaacacgcaaaaccatgaattaggcggcttggcgaggctcagtggaggctggggccgagagtcatgtcaaagtttgtggggttaacctgcacccagtgacagtcatggcgaagtttgtgaggttaactcgcacccagtaacgctgttccaatgcaaggtgtgtatttggtgtcatccacgggaagaggaaacagcaaattttctcatggccttggcagttccacatgatggacatttcatatctgcagttttcttcgcatgagatggcttttttgcacaaaaacactggaatccagtgagcaagaatgatagaatgcaagatggatttccacatgaggaagtgtcacgaacaagcgttttgcatctctgtcagctggattcccccatgtgtacgtatgtgagaacatgccgtgtttcctgtctgtaatggtagaggcagccctgatactggattttcacctgaggatggatagatcttcagggttcaagtgggtttgcatctggactttagggtggccctgtaggccctgtgtgagaagcccccttcccagtgaactttcccttgtgtgcccgcgtggacagccaacagggggagcagtgcgagcgtgaaggcagacagtggcctggcccagtctgatggtaagtgggccagaggcagtgagtaccatttcttgatctgactactcaagacaggcgcttccctaggtactttcacacctcattgcgaggtacgtgttgttcccattttacaggtgcagaagctgagctgcagaggcgttaggtacctgcctcataagtggtagagactccagtgtcaccctgcccctcacgttcggagcccccgagggagggtctgccgggcagctcagcccagcactctgtaaggaaatcttcagtgccactgcccaggatgtcttcccggggattgggcctgaatgtcttgaccatgccgtgctggaggtaggaggggtgtcttcatatggaagaactgtacatatttctttggcagatggctgaactctgtgaccccggggcctgtttcagcctcctgctgtcagaaagcagctgtttgggaagaggctgtgattcggccttgtttgagggccgatactctgaatgggtgaggcttggaatcctccctttggaacaaagaaacataatgattttgctgaaggtagaattgggggactaggcagagtggcctcctgccctccctggggtggttctgtcttttgcaaaggtggctgcatccttaggggaaggtgaggggagaagcagggagcatggagagaagtggctttcgattttctctctccttttggggagttcctccttatgtggctggtctggtgcatagtgtgatgtattcctgtacgcaacgttgccctgacagccagtccaagctgagtctagagctggcaaggtgagctcccagtagtaagagggtgtgggcggcaagccacccaggcaccgaggcaagagacagaggacacgagctgttccagtataataaaatataaaacaagaatagttataccagatatagatcttagatatgattatatatgaatatcattaatcatgagtttgcagcaattactttttattccaatattatgataatcctcgctctataatcatagcctaggaaaaaccaggccatacagaggagctgaggggacatagtgaggtgtgaccagaagacaagagtgcgaggcttctgttatgcccggacagggccacaagagggctccttggtctagcggtgacgccagcgtctgggaagacgcccgttacccggcggatcgtggcccagtggtagcaaaaggtgtcaaggaacaacactcactacttagcagaccgggaaaggggcggggggggggtctccctttccccgggggagtttagaaaagactctgctcct

SEQ ID NO: 15097 - DNA, 2300 bp, Homo sapien
tcggcctcctaaagtgctgggattacaggtgtgaatcactgcacctggccagccctggcagcatcttgatggcaagttcactgagccagaccacccagcccagcctctcctggattccagacccacaggaaccatgagttagacgtctttgttgttttacacatttaaattttggggcaattggttacacagcagtagattactaatacaccagctgtagggctttgggcacgttccttagcctctgcaccccatttcctccctcgtgccatgagcgttgtagaggtgagtgaggaacatgtagacacagcacaggaccacatacgtgaggcagctttccagcccctctcgagatggttctggtcatcctcttgcccatccctggatggaccgtgacttcacaacatcaggccaagttattgcattcttgtcctgaggtcatccattggtcatggacagaggttctgggtaggaaaggatgagataaagagtggggtcagtctccttcctccagcctgggtccggagaatcttgctgggccaggtgagacatccgctccctgtgtggtgtcctaggatgggcagctggacctgaccagtggggaggtttctctgtgtctccagagggcagaggggctgcctggtctggcttcccttgggcttggccaagcattctggctgccactgaggcctccaggacaactgagaactgtcctttcttccttgcccttcagctgcccctgtcttctctgcccctggtgcctgctcagctgctttcttcacaggacagccttcttgtcacccttggcccctgccccgaggctcctccaccccaggctctgtgttctaaagttcaccgtgtacaatttcctcaagttgtttctccttcactgcttcccttttctctgttcattactcaagatctgcatggccatgtgtcagtataaaaaaaaataaagttggccgggcggggtggctcacccctgtaatcccagcactttgggaagcgtggtgggcagatcatgaggtcaggagttcgagaccagtctggccaatatggtgaaaccccatctctacgaaaaatacaaaaattagctgggtgtggtggcacgcacctgtagtcccagctactcaggaggctgaggcaggagaattgcttgaacccagaaggtggaggttgcagtgaaattgccattgactccagcctgggtgacacagcgagacttcgtctcaaaaaaaaaaaaaaagttaacccatttcagttgggtgcagtacctcacgcctctaatgccagcactttgggaggccgaggcaggcggaaagagcgagaccatctcaaaaaaaaaaaaaaaaaaaaagaattgcttgaacccaggaggtggaggttgcagtgactagagatcgagccactgcactccagccttggcgacagagcaagactccgtctcaaaacaaacaaacaaaaaaacctaaaatacaaaaaacacaagcaaaaaatcatgattgacattaacaactacaaaaagaaaaacaaacaaaaaaaaaaccgccacaaaatcatttataggtaaggacagaagttctgaggctgcctccaggactatggacagtggtaggattggttgttttccgctttatgaatgtgacttatagcccagatttccttccgtgaacgcttgttagttgtgaaactagcaaagttgcgcctccgcatttacgcagagccggctccggagtccgagccccgggttcgagcccagccccgctattacctcgggcgtgaccttggccggagccaggtcccctctgagcctcagtttcccggtctgggagctgggaatgacagctcgccccacccccgcagagccccgcccccggggccctgggattggttcgcgcgaggtccccctgcccaggcggggccgggcctctcccgcccgccaggccccaacccggaaatgcagctggggcagaggcggggcccactcagaccgcggcgaagggacgatgggcgcggccaatgggcgcgggcggcggcggcggtgcgacggaagtcctgcctggcgtcgcgcgggggcggggcgtcgcggggggcgggggcatcgcggggggcggggcgtcgcgggcacagcgtgagggccgccgttgctggagttcagcttagggaaggaggactctgaggaggccccgagcggcggagcgcttcgggggaggcgcccgcgcagacgcgaggcccatagccaggaccaccacctagctggtgagcgcgcggcgaggcggggcggcccggggtcccgaggg

SEQ ID NO: 15098 - DNA, 2300 bp, Homo sapien
cagagattatggccaaattgcacggaatttggtttcttgccctctgaagcctgagggcccccccttgcctggctggttgacagacccggggtgctcactgctgagacttcagagatcgcagctgctgtgagaatacggtgaaggtactatgttctggaagatgttgtcatacacttttccccagttattttcaaacttgacatgagcctatgttgactcactgggtggggtcccttcttacgcagcacacgtggcaagtgcctgaatcggggctggaggcacttcagagcctctgaggggccaccacttctggcccaaaattgcagggttgtagatgaggctgcctgtggagaactggtgtgaggaggaagctgtttccaacaaagagcactttcatctgttgagatggctgtggtgagcaactgaacgagcctacgtgtgtacctgaattttccccataactcatttcttccatatgaagaaacaccaaactatgtacagagaactttttacaaaaggcagaccttttttaagctgtgtaacccacatagcctaaccgtctggcagaatgactacgaataggggtcattgtgctggtaaaagcctctattacgactgttaagttggatgttggcaaaattaaattgttacagtatttagagctgctgtagctgttccttcacaacatgaaataggataaatgactagtacgtctttcaggtgggtggcagtcagaacatgcgtaatattctctacctggtctgtagctgtaactgtgatgtacagacaaagcaaaaattaaaagaactcatgaaaacaaataatacaatggtattaggatatacacttttgtgtttttaatcttatagaaggttatttgctggctattgttggcctctagttcagcctgttatttaaattctttttttttcttgagacggagtctcactctgtcgcccaggctagagtgcagtggcctgatctcggctaactgcaacctccgcctcctgggtttaagcaattctctgcctcagcctccgagtagctgggattacgagcgcccacaaccacatctggctaattttttgtatttttggtagagacggagattcaccatcttggccaggctgatgttgaactcctgacctcgtgatccacccaccttggcctcccaaagtgttgggattacagacatgagccaccgcgcccggcctaaattctaatatatgaattatttgtattgaattcatgttcggggccacgttgttatatgtattgatatacagccttgaatgtgaataattactatatattttacaacttttttctggctttattacaaaaactttctttttttttttttgagacagactctcgccctatcaccaggctggagtgcagtggcgagatctcagctcactgcaacctctgcctcccgggttcacgccattctcctgccgcagcctcccgagtagcttggattaccggcgcccaccaccgcgccaggctaatttttgtattttcagtggagaccgggcctcaccatgttggccagcgtggtctcgatctcctgaccgcctgatcctcccgcctcggcctcccaaagtgctgggattacaggcgtgagccaccaggccccgcccttattatataaattttctattgggtcaatgatttaatcatataatttaatgaatctgttctttttttccccccaaatatttgtgctttaggtgtagttaccagatgatgaattttcctcctatgctccgtagtcttgtaataaaaagcatgtacagtgtagacgtttgctggcatggctcttcctttgaccagttcatgaactggagtcagggtgggggtgaaggctagggtcgaggtctgggtcaggcgctcgtgcaccgctcgtgggaggtcgaggctgatgtccgctgctccccatcagcgttagtgcccagatcaccccgtgctccgctcccgccggaagcgggcccagcctcctgcttttcgggaccggaacttccgcctaccgcgtgacgccggggcgggcgctctaccagggcggacctgtgggcgggacagaactcagaggacgctattaaaagccggacgcttccggtggaagggagctgttgcggggcttgctgggatcatggcggagaatcactgcgagctcctgtcgccggcccggggcggcatcggggcggggctggggggcggcctgtgccgccgctgcagcgctgggctcggcgccctggcccagcgccctggcagcgtgtccaagtgggtccgactcaacg

SEQ ID NO: 15099 - DNA, 2300 bp, Homo sapien
tatcttttccgggcagagtgaagacatggtccatagcagctggcccgggcaccggaaggcactgggggttaaggggaagctgagggcctaggtgtggggaggtggctgttctaacccctccccagctacgggcgaatcttgcccccacagaatcagacgcgtggagtgcaggggtggtgagaggactctctcaaggccaggaagttccaggctttgctaccctggggctgtacactatggtcctggctggggtctccaagctggggtagaggctccagtgtttggttaaaggcccagcaagaggccctttgtgtcctggggtgtgggaggcaatggacagcagaaaatatgttcccatccttggttcccccgaacgaccccatatcttgcttctcttccgggcccctcactttatccgctccaaagcccccttgcacagcccagcagggggtcctgggcctcgtctgccaagcctgctgcatgcctgggagaggggtcagctcttgggactctggaatcttgagaaggctgatccctggtggccaatgcagaccactgtaccttctctactcccctgaggccagggagaagcctgtggggctcgggcctcagcctcgggaccaaagtgagacttggggaaggagctcattccggagcagactgtgagagagccctgggcagctcaaatgtagagacagctcccgggcctcttccgctctgagctgttccgggaggaaaggccaaccttacagtgccagggctggaggctggaccctccccagaaacttccagacaaggatgggtgtggagtgtggagggagaggaccctttccaggatgagaaggggacatctagcctggggatcccttcactggcatctcctgaccggctccccatgtggcaaggagcatccacccttgcagataagctgtggcccatgggcctgggcctgagcatacggcagagccagccctgggggggaaactgcaggcccttgggctctccggtgaggtccctctgtggactgtccctctggagtcctcaggagctggggagggtcagtggagaggggctgcagggttggggagggcaggccaggctgcagctggcctggctgatcaccctctcctcacttccagggtctcagagggccaaggcagcaacaggtaagcacccagggccctggggtgggagggacaggagccggctggactgagccagggacactcatggccagagggaatttggaacgcacaggacactggggaattccagaggaggggaaagtgggggctgtgtggaactggagcccagaaaggagaggaggaggaaggtccacacaagagcaggacgggcagcacagagccttgaggcgcggtgcaggatgagggcggcagggtctgaggatcaccctgaaccgtgactggccccctctgggtggctcccttgcagagggcttgacacctgttctatccttccaggcacctgtttgggtcaggccctgggacaagacccttccctgggttatctcagtgcctccgtggcccccaagaggcaggtgttaggttgcctttctcggcgaggagagtgagactttggggggcagctggggagggtctgcctgtatcccagactgccccgaagcccaggcctccgacttccccaaggtcttcgggcaggtcaggggcaggagggccgaggactggagtgtgaggctgagagctgggcctcggccatggaaccagccccagtgagcgcccccacccgctccccatgctcccccagcctgtggtcgccccaggatgctgaaccgaatggtgggcgggcaggacacgcaggagggcgagtggccctggcaagtcagcatccagcgcaacggaagccacttctgcgggggcagcctcatcgcggagcagtgggtcctgacggctgcgcactgcttccgcaagtgagtccgcccgcccctgcccccgcccatagcgctgacagcgccccgcgcgcgaccggttcagcaccgtggacagcgcccgccgcgccaaatcctgcgggtgacctccctgggggctcctggtccagcccctcccacccagatgcttcccttaggtccaactccagggctaacttccagttgcaaccgctgctcccgcccgcgggaggtgcctcgcaccgccccccgaccccctccatcccctccacccactcacccactccctgtgggtccctgcagaagcggcccggcaggctctgcccaccggcccctcctggcctttccccatcccgcacacacctcagctccagga

SEQ ID NO: 15100 - DNA, 2300 bp, Homo sapien
tttttttgagacagagtctcgctctgtcacccaggctggagtgcagtggcgagatcttggctcaccgcaagctccgcctcccgggttcaggccattctcctgcctcagcctccagagtagctgggtctacaggcgcccaccaccgcgcccagctaattttttgtatttttagtagagacaggattttaccgtgttagccaggacggtcttgatctcctgacctcgtgatccgcctgcctcggcctcccaaagtgctgggattacaggcgtgagccactgcacctggccctgatctgcatcttgacttttgtcactttcttgattttaaggcagagacacccttagaggaatgggcttaaaaggagggttggggagcagacaccaaggaacacacagaaaggtgccaagaggaaatagttacctgcgaggctctaagactgcctctgagatcccatcagtgacctgaccatagggtgctggagaaatgtggtcacccagacactttgaaacactttccgtggttgataattattattctcctttttttttttttttttttgagacagggtctcactgtctcccaggctggagtgcagtgttgcaatctcgtgtcattgccatctccgcctcccgagttcaagtgattctcctgcctcagcctcctgagtagctaggatcacaggtgcccgccaccaagcccggctaattttgtattttagtagagacggggtttcaccatgttggccatgctggtctcgaactcctgacctcaggtgatctgcctgccttggcctcccaaagtgctgggattcccggtgtgagccactgcacccagcccgtcgcggtttataattagagatttctctgctaaatgatgttctctctctcacactgaggtgaggtctgtttgggtcacctttgtattccccaaaccggggacagtattgggctcaaatctgctcagaaatgactgactgactgaatgaataaatcaatacatgaatgaatacgtttggagtcccctcttcccactcctcgccctccctccttccctccagacccccaggggctgcccagcccgcctcccacccccgacccgggaactccagggactggacggggagggaagggtgggaggaggcggtggaggcggaggcggagacgcgggagggcggggctagggagggcgatgcggggagccggagcccggaccatgaggctgggagcgccccttctgcacccctggccgcccgcgccgcgccccgcgcccaccagagggcagcaccacgacgcgcgcggacaaggctgaggcgggaacggccgcacccccagccccgcccggagccgcccggccccgccccgcccgcgagtaccgacccccggcgccggcggggaaacaggtccggcgcccccgaccccacggcccggccccactctgtctctgacgtcagcgccgtgccccaaataacttcctccccgagcctcttccgccgcggcgccgcgcccagagccaggcggggacaccgaaacggtaaccccggcccggccttcccggagccgcttccgccccgcctggtgccaggaagcccccgccccttccaagggatggcagccggggcccgggtcggccgcctgggccgcgctggcgcgcgcctgaggaacttctggggcctgctgtcccgggaggagggtcgctgcggccaactccggaccccgccccatgtcccatcgcctcccctgccctcggccccgcaaacacccctggccttgactttcccaccagcgcggcccagccccactgtgttccatcggcgctcaataaaatactgaatgaggccgggcgcggtggctcacccctgtaatcccagcgctttgggaggccgaggagggcggatcacgaggtcaggagatcgagactagcctggccaacacggttaaaccccgtctctactaaaaatacaaaaaattagccgggcgtggtggcacctgcctgtaatcccagctactcaggaggctgaggcaggagaatggcttgaacctgggagacggagcttgcagtgagccgagattgcgctccagcctgggcgacagagcgagactctgtctcaaaaaattaaaaaaaataataataataataatgaatgaagctggacggacttcgcgtgcaccgcggtcagctcggggtctgctggggggtctgggtcagctcagggtccaggaaccgaggccaacggcaccccgtgctgcgctggggtgaggggtctgccctggggtctcggggttcagggctaggtcacgga

SEQ ID NO: 15101 - DNA, 2300 bp, Homo sapien
tccatccccgggctggtatcccaggctcagcaggagcagtgctgggggactctacgggacctcgtaccccagagcctagaaccccccgtgcggtgtgcctggccctcactgtgaggactacgccggccgcttctgctctgagagccttcatgtgtccccctggctccttccaccagcccaggggtagagggtgggatgccaaggcctctgggagacagaactcagaggggcagagtccctgcccagaggccaccagcaggtccctgcaaagggcagagtgggcagtatctggtgtggagcctgtactcagtgggatggggccatcgtgagggtccaggccagcctgtctgagacctctgctcactgctccagtctgtccaggccctgggtctcctggcccccactccagtggcatctttgtgaggattagattatggtgccctcccccaaccccaggtgtcccagccctctaccaaggcccatgacccagccctttagagtctggtttggacatggcacctgctaagcccaggccagcagccccatgggatggactccccactgccggtgtctgcctcctgggtctgaggaatctttttttttttttttttttttttgaggcagcgtctcactgtgttgcccaggcaggactgcagtggtgcgatctcagctcactgcaacctccacctcccgggttcaagcaattctcctgcctcagcttcctgagtagctggaactacaggtgcgccaccaacccagctaatttttctttttctttttctttttttttttttttttttgagatggagtctcactctgtttccaggctggagtgcagtggtgcaatctcagctcactgcaccctcagcctcccaagtagctgggactacaggcacataccaccacacccagctaatttttgtatttttagtggagatgggggtttcaccatgttggccaggatggtttcgatctcctgacctcgtgatctgcccacctcggcctcccaaagtgctgggattacaggtgtgagccactgcacccagccctaatttttgtgtttttattagagttggggtttcaccatgttggccaggcatgtctgagaattctacagcttcattttgtgcctagggccaggacagtggaggttgtgggccacacagcattcccaggtagctgaagcttctctgttgatggaacagccccaggcacgtggcttggcttgtggtgtgaggggtggccattgggtccattgctgtggtgtcactgtttgcttctccgcaccaagagactccacctgggacccgcctgctaggggctagcgtcagggttaggttagggaggaggtggcttcatctgagctccaggacattggctggagcttcctttgcttttctgtcacggtgtggtccccagtccttgggacaaactcacctgagtccctgaggtttccccctcctgctgcccctggcctgagctctgagaagcctgaccccaaccctcccagagcttccctcgaggggcccttcgtaggctgccctgtgttcactaccctcccaggtccaagtctcacctcctccagaaggcctcccaggactgctggccccagacacagaactcccaagggaaggctcttccactaaaagtccagctgcagcgataatgatgagtttggagagggctgcagaccctgaggcaggggttggtgcaggggctggacctgaaactgggttcacacaacaagctcggactcctcttaacactcctgattggtgacattatggggtcttggatgcctcctcctctctgtccctcgtactgcccctgccacctgggactccaccaagttccttctccaccagccatgaggagagcctgcccaggggccagcactctctccctgagccttagaaccaggaggattctcactgcttctatgtcacagtaggtaaaaaacacataaaataaaatgaaatatcatgatcacctgagaagaaagttcagagtaggcccgtatcacgtgtttccagagaatccacagcttccctatgaagccattgctggcatagggaagggtggggccaggaaacagccgctatccagcccctccaggttgactcaagtcagagtgtgtgggggccagtcatggaacagagggagcctcctgcccagggcaagcgtggggagaccaccaggggccccagacaggtgagccgctccagcagggacagcacaggtggtgcatggtcggggctggacatcggggttagtcggcaaggatgaggagtctctgggga

SEQ ID NO: 15102 - DNA, 2300 bp, Homo sapien
actcgagcatggtggtatgcacctgtagtcccagctactcgggaggctgaggcaggaggatcacctgcgccttggggggttgaggctacagtgagccgtgatcgtgctgctccactccagcctgggtgacagagtgagactcttgtcccctccccccaaaaaaaagcctaaatgcccatctacaggaaatgagttaaattcatttgaaattcattaattatgaaattgggcccacctggttgatgacatgattaatttaactcatgaatcactgaataaagaggagctctgcgacccggcacggtggctcatgcctgtaatccaagcactgtgggaggccaaggcgggtggatcacctgaggtcaggagtttgagaccagcctgagcaacatggtgaaaccccatctctactaaaaatacaaaaattatctgggtgtgatggtgggcacctgtaatcccagctactctgaaggctgaggcagaagaatctcttgaacccgggaggtggagattgcaatgagccgagatcgtgccactgccctccagcctgggcgacagagtgagactctgtctccaaaaaaaaaaaaaatggagctctgcattctcctggtgctcaaggcaccaaccatgtcaggcaacattgtcatcaggctagtaggtgggtgcagagatccaggggcaggtaggtggcagacaaatccaggcagcatccaggagccctagcagcttccctgctccagcttggtgaccgcagccagacgcgcccactcctcaatgctgcaccgggagcctgtggaaacctttgtgacccaggttcggctcgtgggccaggacacgatgcacttcccctcagcagggacagtgctcggcacagtgcctgcagccttcacacagctcagctcttctttctgggagctaggaagctgtcagcttagctctctgtgagtggggtttttaaaattctgtttgcagtcagagcttatggtcccaacacacaaatccccacctatgggcctgtcaaggaggcacagggcccacgcccatccctccaggtgcccttctgcaagtgacaagcacccacagcctcaggggagtcctcagtcccccagctgagcgtgttgctctctgcagggttgggtgcccgaggtgcctaaaccagggaggaagatcgtctagtgggctgtatgcccagcaccactcaaggccgtaggtgcgaatgtggattccagtcctcgggggccctggagaggggacctttccatacttggggtgtaggaacagtgggaggcagatgtagggagaggagagcttgcacagccaggcaggggcaggaagtagggggctgagacgcaacgggtggccaagatgcagtccctctcctgcaggggtctcatcgacccctgtacactaaagactccgtctccatctgtgtgtgcggggtttgctaggtgaggtctccagtgcctgaagccctgtgtgccagggctgggtctaccccagagccccacgcaccttccaggtcagccccagtggcagtgctgctgtcttcctctgtgatacacagccgcaattcccccctccccagcttccctccaggccagtgtggctgattttgcccacccaggaatgccctgtgcagaggcccctccaggcaggtacctgcagggctgaggagggcttgtgagctcctgagtggcccaatctgcccccagagaaggttggctccaataccgttacttgatggcagaccagtccctgtgttttgagcagaaaatgttccaatacagagcgactccaaatagttcaaaaatacaaagcgtgttgggaggagtctggcttgctgcccttccccccttacctgtcccaccccagtgggtcagcctggggttggtttctcccatgccttgtgtatctttggacaaacccccctgtggctgtctgccttcttcatggcacaggccaagctgtgtcaggagcatgctgcgctgccctggcccggagggacatctctgtcacagcataaatgcatctgtgacctggtcaatggggtcactctgccctctgcagccaggtactaattgttccctgcctgtagtgcccagatgcctgttcaacaaaactttgccgccagagcgtgttgcctttttttttttttttgagattgagtctcaccctgttgcccaggctggagtgcagtggcgtgatcttggctcactgcaacctctgcttcccgggttcaagcaattctcatgcctcagcctcctgagtagctgggattacagccacatgctaccacaccc

SEQ ID NO: 15103 - DNA, 2300 bp, Homo sapien
cctgggcaacacagggagacacaatctctacaaaaaactccacctctactaaaaataaaaaaatgagctgggtggtggcgtgcgcctgtaatcccagctacttgggaggctgaggtacaagaattgtagtgcgtggagatcgtgccactgcactccagcccggggttaggagtgagactctgtcccaaaaaaataaaatagacaaaagacacgaagagaaatttctccaaagatgtacaaacggccaacaagcacatcaaaagattctcagcatcatcagtcattagggtactgcaaaccatgttttgtcactattcacgggcattaaatgtgctgactcacgcacaaaacattccataaagaatatcagtgggggtacaggaaagggtctcactggaggtgctggggtctttaaccagaaaggcaaagcctttgccactttactatgccactccagagttgcggccggcttacagaagcaccgtccatagatgcagagttcagacactccaatctgcgatcagagctcctgcaggagatgggggtggtgggggggagggtctcccggctctagcatctgagataagtacatcctcccacgggcaagtgaaaaacaaatcttaaagccggatacgggccgggcgtggtggctcacgcctgtaatatcagcactttgggaggctgaggtgggcagatcacctgaggtcaggaaatcgagaccagcctgaccaatatagtgaagccccgtctttactaaaaatacaaaaattagccaggcgtggtggcacacgcctgtaatcccagctactcggaagactgagacacgagaatcacttcaacctgagagacaggttgcagtgagccgacaacacaccattgcactccagcctgggtgacaagtgcgaaaccacgtgaaaaaagaaagaacaacaacaacaacaaaaaacaagggccagatagggtgtcatgcacgggtagtcccagctacttgggaggctgaggtcggaggatcgcttgagccccaaattcgagaacagcctgggcaaaaccctgcctcttaaaaacacccccaaatcgtaataacaaatataaatccttgcactcaaatggacagttcattacgtggtaccgcgtcctgttgcggatcaaggccacctgagttggttaggacagctaagcgggacgtccagggctgctcgccagcggtgggtctagatatgaacttgtgcttgagcagcccagcgtcttacaactctgctgtgaggacggctggctgattatcaggcccagaatcacgggcttagaaacattaacaggaagtacggtaccgaaaagtggaaactttaaggtgcttattattttcctcctgccttgttcctgtatgtgccgcttcaccggtatcacgtcctgggtctggtgggaccccggcctggctgccctaccggaagctaagaaaactcctcccccaggggtggccgtcgggcctcagcccggtctacagcgggagaacgtggcccatgctacgggtaactggttgggcccctggtgcaggtctagggcctgcagccaggctcggggcctccgggggtgcccgctggctggggtctgaggcggcttctctcgggtacgggaaggcggactgctgtgcagctgcgggctcgctcgggaaacccaaagtcacacgaaagcggcagcaccaccgcggctgggatatcgtctcccaacatggggagacaaaatggccgccacgccccgagccgaaattacatccgggctccgcgacacgcccgaaccacaactcccagaatgctctgcatcgacagcgggagacgagacgcgctcgggcgtcgctttgctgccgctaggccctgtgctcctccccgcagcggaaggcctacgaatacgcggtgtcttacgtcgcttcctccgttcttcgttgcactggccaacgggacgcttagtctttcggcaacggggtgaaaccttccttgtgcctgaaaaaacggtacttcgcggtgtggcttcggcgcctgcgcaaaaggccgcggggcgcactccagttcccggcaggccccgcgacgcgcgtttgcgtgctgacgcacgcagttagtcgtgctgacgtgcagcgcggcccaggcggggtgcgagtggcgcagttggagcccgttgcggcccctgaggaagcgaggaggcgtcggcgtcggctgaggcgggcggaccggcgaggcgaggcggcggccccaggcccgagggactcgggagctcgagcagcggcggcggcaagacctctccccctcgga

SEQ ID NO: 15104 - DNA, 2300 bp, Homo sapien
ttggcctcgcgccggggccgccgcccctcccccacccggctcgctggctccctcaccctctcacccgccgcctccgcccgccgcctccgagggggagaggtcttgccgccgccgctgctcgagctcccgagtccctcgggcctggggccgccgcctcgcctcgccggtccgcccgcctcagccgacgccgacgcctcctcgcttcctcaggggccgcaacgggctccaactgcgccactcgcaccccgcctgggccgcgctgcacgtcagcacgactaactgcgtgcgtcagcacgcaaacgcgcgtcgcggggcctgccgggaactggagtgcgccccgcggccttttgcgcaggcgccgaagccacaccgcgaagtaccgttttttcaggcacaaggaaggtttcaccccgttgccgaaagactaagcgtcccgttggccagtgcaacgaagaacggaggaagcgacgtaagacaccgcgtattcgtaggccttccgctgcggggaggagcacagggcctagcggcagcaaagcgacgcccgagcgcgtctcgtctcccgctgtcgatgcagagcattctgggagttgtggttcgggcgtgtcgcggagcccggatgtaatttcggctcggggcgtggcggccattttgtctccccatgttgggagacgatatcccagccgcggtggtgctgccgctttcgtgtgactttgggtttcccgagcgagcccgcagctgcacagcagtccgccttcccgtacccgagagaagccgcctcagaccccagccagcgggcacccccggaggccccgagcctggctgcaggccctagacctgcaccaggggcccaaccagttacccgtagcatgggccacgttctcccgctgtagaccgggctgaggcccgacggccacccctgggggaggagttttcttagcttccggtagggcagccaggccggggtcccaccagacccaggacgtgataccggtgaagcggcacatacaggaacaaggcaggaggaaaataataagcaccttaaagtttccacttttcggtaccgtacttcctgttaatgtttctaagcccgtgattctgggcctgataatcagccagccgtcctcacagcagagttgtaagacgctgggctgctcaagcacaagttcatatctagacccaccgctggcgagcagccctggacgtcccgcttagctgtcctaaccaactcaggtggccttgatccgcaacaggacgcggtaccacgtaatgaactgtccatttgagtgcaaggatttatatttgttattacgatttgggggtgtttttaagaggcagggttttgcccaggctgttctcgaatttggggctcaagcgatcctccgacctcagcctcccaagtagctgggactacccgtgcatgacaccctatctggcccttgttttttgttgttgttgttgttctttcttttttcacgtggtttcgcacttgtcacccaggctggagtgcaatggtgtgttgtcggctcactgcaacctgtctctcaggttgaagtgattctcgtgtctcagtcttccgagtagctgggattacaggcgtgtgccaccacgcctggctaatttttgtatttttagtaaagacggggcttcactatattggtcaggctggtctcgatttcctgacctcaggtgatctgcccacctcagcctcccaaagtgctgatattacaggcgtgagccaccacgcccggcccgtatccggctttaagatttgtttttcacttgcccgtgggaggatgtacttatctcagatgctagagccgggagaccctcccccccaccacccccatctcctgcaggagctctgatcgcagattggagtgtctgaactctgcatctatggacggtgcttctgtaagccggccgcaactctggagtggcatagtaaagtggcaaaggctttgcctttctggttaaagaccccagcacctccagtgagaccctttcctgtacccccactgatattctttatggaatgttttgtgcgtgagtcagcacatttaatgcccgtgaatagtgacaaaacatggtttgcagtaccctaatgactgatgatgctgagaatcttttgatgtgcttgttggccgtttgtacatctttggagaaatttctcttcgtgtcttttgtctattttatttttttgggacagagtctcactcctaaccccgggctggagtgcagtggcacgatctccacgcactacaattcttgtacctcagcctcccaagtagctgggattacag

SEQ ID NO: 15105 - DNA, 2300 bp, Homo sapien
gaactaggagagaaatgcaggaaaaaaaactgaatttatttattttaataagttattacctctccctttcacatcacatgtctatcctaaatctatacatttgcaatccaatgaacatcaccaactcaggaacatacctccttcttgtctttatctttgtcttcataagggctgctaggctgtttcgtagcagtctccgggctactaggccgttgtgtgctggtagtacctggttcactgaaaggcgcatctccctccccgcgtcgccctgaagcaggggaaggacttcgcccagccaaggcagttgtatgagttttagctgcagcacttcgagacctgcaggagttaattgaggacgtgggagaggaaggaaatcagctcaaagggagaacagaaaaccccctccccaactcccatccacctttcctaactggacaaccctcttccaaaaagcctttagtcgcacaactcaaatcattcactgaaatgcaagtacagtccactttggttcttcttttcccaacacaatcccaaagagcgttctccctctacccctttactcacctcccccaaacatccccaaaccatccacccagcccactccctacccgcttcattcacaactcacctctgagcccacctccttcaggaagccttccccgattaaggaagccagggtaaggattccttcctcccccagacaccacgaacaaaccaccaccccccctattctggcagtccatatacatcagaacgaaacaaaaataacaaataaacaaaaacaaaaaaaaaaagagaaggggaaatgtatatgtctgtccatcctgttgctttagcctgtcagctcctagagggcagggaccgtgtcttccgaatggtctgtgcagcgcctagcacaccgtgggcgctcaataaatattaaattaattaacccatcattccctctccctcccttcctcctggactaccccttaccgactgcgggaagtatcggaggaggaagcagagtcagcagaagttgaacggtgggcccggcggctcttgggggctggtgttgtacttcgagacctgaaggaagaccaccaccacagctcagggtactgctgtacctgccctggattctcctcacgtatccctcaaccctttaccagtcagggacataactcattcaactccctcccactaaggtggcgttcacttacttcctaagcaaattccccacaaattcactcaccgctttcgctttttgtccttagatttacgtttgctctttggagtgggagacctgggaaataaggaaaggttgttaaaagtaacttctttaaaaaaggaaataaaaccaaaagtgaaatggaaagagggagtgttgacacaaggaagatcaaggaattgagcttcactccaagaaaaaaaaatcaccactccacatgccactgcgccccctatgagttaaagagctcttacctatgcttacgtttcttggactcagattctgacctgttggaaaaaagagaagaaaaaacataagaaacacctctgcctgaattcagcaaaccttctccagtcattcaagtattcccacctcatacctgtgcttcttcttctttgagcttttctttctctcccgtcgaggagagctgctctctgacctgctaaagatggattcaaaagcaagctcatcctgcttggcttctttcctggccctcccacttacaatctctctcctaaaaaggtttctaaaacacttgaatgtcctaatagcactaatgccccagacctaagcccaggacttatttcttctttctccaacaagcacaagtaactccttaagtcaacaaacctcaaaatgaaaaagaaaattccagaatccaaaatgctgctggccaatcttaattagcagaactgcaaactcaacacttccccactgagaaactcaggtatttcttctagttgaggcctcaatggtaactccctcctccctgacaactatctcctgctttgtggaagccagaactgtccacttccagagagaaaggtacaccacaggattggtcctctggctatcagagtcactttccaactaacttaccgtcctctatctttcttctttttcttcttcttctgctttggggttggtgagcgagaactgctagactcccgaacaaggctagggaaaaatgaaaagcagcagagatgggtggtagaacaaacattcctttcttttctttaaaagacagagtctaaaaaaatagtaataaaaataaaaaaataagagtctcgctctgttgcctcaggtgggg

SEQ ID NO: 15106 - DNA, 2300 bp, Homo sapien
ctttggaagcagtagaagtcccttcaatggcctcatcttggggtgggccacatttttctccagaacataaagaactgtctaactccccactcagggagaacagctttggatcacctttagaatttagaaactcaggcccacttggtacagaaatgaatactggattttcttctgaggttaaagaagatttgaatggaccgtttcttaatcagctggaaacagatccatctctagacatgaaagaacaatcgacaagatcctctggacacagcagttctgagttatccccagatgcagtggaaaaggcagggatgtcttcaaatcagagcatctcttcacctgtgcttgatgctgtacccagaacaccctcgagagaaagaagtagttctgcatcttctcctgaaatgaaagatggtttacccagaactccatcaaggagaagcaggtctgggtcttctccaggacttagagatgggtctgggactccctcgaggcacagcctgtctgggtcctctcctggaatgaaagatatacctagaacgccatctagagggagaagcgaatgtgattcttccccagaaccgaaagctttgcctcagactcctaggccgaggagtcgttctccatcatccccagagctcaacaacaagtgtcttaccccccagagagaaagaagcgggtcagaatcatcagttgatcagaaaactgtggctcggactcccctggggcagagaagtcgttcgggatcctctcaagaacttgatgtgaaacccagtgcatcccctcaggaaagaagtgagtcagactcttctccagattctaaagccaagacaagaaccccacttcggcagaggagtcggtctggatcatctccagaggttgacagcaaatctcgactatcccctcggcgcagtaggtctggttcctcccctgaagtgaaagataagccaagagcagcacccagggcacagagtggttctgattcctctcctgaacctaaagctccagcccctcgggcccttcccagacgaagcagatcaggttcatcaagcaaaggcagaggcccttctcctgaaggaagcagcagtaccgagtcctctcctgaacatccgcccaaatccagaactgctcgcagaggttccaggtcatcaccagagcccaagaccaagtctcgtacaccacctcgacgtcgcagctctcgatcatctccggagctaacaaggaaggccagactgtcccgtagaagccgctctgcctcatcctcaccagaaactcgctctagaactcccccaaggcaccggagaagtccctcagtgtcttccccggagccagccgaaaaatcgaggtcttcacgccgacggcgctcagcttcatctccacgcactaagacaacctcaaggagaggccgctctccttcgccaaagcctcgtggactccagaggtcccgttcccgctcaaggagagagaaaacaagaacaacccgacgtcgagataggtctggatcttctcagtcaacctctcggcgaagacagcggagccggtcaaggtcgcgggttactcggcggcggaggggaggctctggttatcactcaaggtcacctgcccggcaggaaagttcccggacctcctctcgacgccgaagaggccgctctcggacacccccaaccagtcggaagcgttctcgctcacgcacatcaccagccccgtggaaacgctctagatctcgagcctctccagccactcaccggcgatccaggtccagaacccccctgataagccgacgtaggtccagatctcgaacttcaccagtcagccggagacggtcaaggtccaggacttcagtgactcgacgaagatcccggtcaagagcatccccagtgagcagaaggcgatccagatccagaacgccaccagtaacccgccgtcgttcaaggtctagaacgccaacaacacgccgccgctcccgttctagaactccaccagtgactcgcagaaggtccagatccaggactccaccagtaaccaggaggcgatctcgaagcagaacttcgcctatcactcgcagaagatcaagatccagaacatctccggtcacccgaaggagatctcgatctcgcacatctccagtaactcgaagaaggtcccgctctcgaacctcaccagtgacacgccgccgctctaggtcccggacacctccagctattcggcgccgctctagatctcgaacgccactgttaccacgcaaacgttctcgaagtcgctcaccacttgctatccgccgccgctccagatcccgtact

SEQ ID NO: 15107 - DNA, 2300 bp, Homo sapien
caaggaaggccagactgtcccgtagaagccgctctgcctcatcctcaccagaaactcgctctagaactcccccaaggcaccggagaagtccctcagtgtcttccccggagccagccgaaaaatcgaggtcttcacgccgacggcgctcagcttcatctccacgcactaagacaacctcaaggagaggccgctctccttcgccaaagcctcgtggactccagaggtcccgttcccgctcaaggagagagaaaacaagaacaacccgacgtcgagataggtctggatcttctcagtcaacctctcggcgaagacagcggagccggtcaaggtcgcgggttactcggcggcggaggggaggctctggttatcactcaaggtcacctgcccggcaggaaagttcccggacctcctctcgacgccgaagaggccgctctcggacacccccaaccagtcggaagcgttctcgctcacgcacatcaccagccccgtggaaacgctctagatctcgagcctctccagccactcaccggcgatccaggtccagaacccccctgataagccgacgtaggtccagatctcgaacttcaccagtcagccggagacggtcaaggtccaggacttcagtgactcgacgaagatcccggtcaagagcatccccagtgagcagaaggcgatccagatccagaacgccaccagtaacccgccgtcgttcaaggtctagaacgccaacaacacgccgccgctcccgttctagaactccaccagtgactcgcagaaggtccagatccaggactccaccagtaaccaggaggcgatctcgaagcagaacttcgcctatcactcgcagaagatcaagatccagaacatctccggtcacccgaaggagatctcgatctcgcacatctccagtaactcgaagaaggtcccgctctcgaacctcaccagtgacacgccgccgctctaggtcccggacacctccagctattcggcgccgctctagatctcgaacgccactgttaccacgcaaacgttctcgaagtcgctcaccacttgctatccgccgccgctccagatcccgtactccacgaacagctcggggtaaacggtccttaacaagatctcctccagccatccgcaggcgttctgcatctggaagtagttctgatcgttcacgatctgctactcctccagcaacaagaaatcattctggttcacggacacctccagtagcactcaacagttccagaatgagctgcttcagtcgtcctagcatgtccccaacacctcttgatcgctgcagatcacctggaatgcttgaaccccttggcagctctagaacacccatgtctgtcctgcagcaagccggcggctccatgatggatggtccaggtccccgaatacctgaccaccagagaacatctgtgccagaaaatcatgctcagtccaggattgcacttgccctgacagctatcagtcttggcaccgctcggcctcctccgtccatgtctgctgctggccttgctgcaagaatgtcccaggttccagccccggtgcctctcatgagtctcagaaccgcaccagcagccaaccttgccagcaggattcctgcagcctctgcggcagccatgaacctagccagcgccaggacacctgccattccaacagcagtgaacctggctgactctcgaacgccagctgcagcagcggccatgaacttggccagccccagaacagcggtggcaccttcggctgtgaacctggctgaccctcgcactcccacagccccagctgtgaacctagcaggggccagaaccccagctgccttggcagctctgagtctcacaggctctggcacaccaccaactgctgcaaactatccctccagctccagaacaccacaggctccagcctctgcaaacctggtgggtcctcggtctgcacatgccacagctcctgtgaatattgccggctccagaaccgccgcagccttggcccccgcgagcctcaccagtgctaggatggctccagcattgtctggtgcaaacctcaccagccccagggtgcccctttctgcctacgagcgtgtcagtggcagaacctcaccaccgctccttgaccgagctaggtccagaacaccaccgtctgccccaagccaatctaggatgacctctgaacgggctccctccccttcctctagaatgggccaggctccttcacagtctcttctccctccagcacaggatcagccgaggtctcctgtgccttctgctttttcagaccaatcccgttgtttgattgcc

SEQ ID NO: 15108 - DNA, 2300 bp, Homo sapien
tcagcacgtgaaggcaactgttgttgtatttatgagctgatgcgcggtgagggcaggcacactccccaacctcccaagggctccacactgtgtatccccgcttcatggatgggaacacccaggtggaggccccgggctttgccggtaggagctggggtttgaacccagtgatatgctctctggaggacaggcaccacccttaagaggatggtgactcctggtttctggtggacatcctgagctggggcatcagctgtgacggcccccacaaacgaggtgtccacccctggtctctgcagatgaagcctggatggagtatggatccaggcgtctccctgtggagacggcccctcctgtacctacacaccccttgacttctgcgtggcctgctgggctacctgagaacttcctggcccccactgtccacactcttccttcgctctccctccacagaagcacaggatttaaagttgccagttctatgtaggtaaagacactgggattaattaattggagacagagtctcactctgtcgccaggcgatgtgcagtggcgcgatctcggcgcactgcaacctgcgcctccgggttcaagcaatcctcctggctcagcctctcgagcagctgggaccacaggcgtgcgccaccgtgcccacctaattttgtttgtatttttagtacagacagggtttcaccttgttggccaagctggtcttgaacttctgggctcaagtgatccacccccttcagcctcccaaagtgctgggattacaggcgtgagccaccgcccccagccagacactgcgactgagaaagaaattttagcctggccaagagctcttcccagcaattacctgtccaatgcctcatgactcacgtcatgaagaagagacaggttctgcagggactgcgatgctgaggaccctgggagcgggggtaggggctgcagtgaaccgcagtgaaggaagtcacacgagggaagggactttggaggactccccagggaggagccacattccacaagtcaaaagtagcaataactagaattacagcttagaaaacacaaatgcagcgctaagacttgccgaggttctacgcagttcaaaaactgttcctctcccatctacaacaggaggaaactgggctttgatgaggttaacggcccatggccacagtcagcagcggagcccagggctgctccttcgcctctctagatgccgaggcaaaaatcgcacctccaccttccacccctctctcaacagccctcaaagcgcagctcggaggactgcagggcggtttggcgtccagggccaccctctggctcatctctccaacgccgcctccgacacccgcccagcacgacccagcctggggtgtctctgcaagggagaggtcaagtggggggccctcactctcatgtaaatgtaacttggggcgatgcaggatagtgtccagcattcaggaaacagggccttggtggaaagagcggccagccaggagaatcaagtctctaggccttttcagagccgaaatgcagccaagcaggaaggcggacaggcgcccagggctcctggggcaaggagctgccccttccctcctcctgcgaagagcggtcgccaaccgctcccgtgcctcctcttctagcccaaggagttcgcccgggccatccctaagcccaacagcagcccccagggctcttcacaggtcataagcccctctgagcggcgacagtcctcgcatccagcccgggtcagggagcgggggtgactgtccccagcacggcggccagaagaccccaaatgcggagcctgcccaagatggcggccacgactacgccgcgacaagacggccccgagctcggtgtgcccgagcttggagcccgccggaccgcaccaacacggggacctcccctctgccagtcccaagacggcgccaccgcctccaaaggccatgcccgccgtcgggatggcggccgcacgcccctcgataccgcccgcttccagatcacttaaaatggcggcggctgcggggcggcacggggcggggctgcgccgggggaagggacgcggcgcggggcatgctgggccacgcgcgggctgccgggaacggggcggagcgcggctgcgccggcgcgtcgaggggagaggcagcagccgcgatggtgagcgggcgtgggggaggggcggccgggccgggccgggggcggcggggggcggctgggccgcgcggggggcccgggcttcgtgctcacgccggcccgccgcccccaggacgtgttcctcatgatccggcgccacaaga

SEQ ID NO: 15109 - DNA, 2300 bp, Homo sapien
gatcacttgagcccagaggtcaaggacgcagggagttgtgattgtaccactgcactccagcctgggtgacagagcaagaccctgtctctctctccctttttatttttttttgagacagaatctcactgcgtcgcccaggctggagtgcagtggcataatctcggctcactgcaacttccacctcccgggttcaagcaattcctgtgcctcagcctcccgagtagctgagattgcaggcgcccaccatcaggcctggctaatttttgtatttttagtagagacgaggtttcaccatgttggccaggctcgtctcaaacccctgacctcaaatgagccacccatctcggcttcccaaaatgcagggattacaggcatgagccaccatgcttggccaagaccctgtctctttaaaaaaaaaaagaaagaaaaacaaaaaaaaaaaaaaggaaaaaagtacaactatggcagggctgcaaaggaggcaggaggaggtggcagagcagaaggctgagggataagaggagttcactatgcagagagggacttgagagacttctaggcagcgaacactgtgtatgagcccaagagggaactacagggccctggaccatccgggccccggtcctccacgggcctcgagagaaggggagttcctgtcccctgaccccagcatcttgctctgtctcggccaccccaaaccaaagactgcactggtccccaaggtcaagtctccccctgcctctggtcaagtaaggagtgccaccaactttgaaccagtccctttccacctccagctgctccagaccccggatctggaagggggctggccatgctggggtctctgggtggagctgtctggccaggacttccgtctgagatgggatttctggacagaacaatggagcgcagaagctccagcaacgtgtgctctgcagggagcccaggtcaggtttggagaggagttgccccggatcctgcagagcttccccacctgactgccacccctcccagcacctacccgcaccactgctctccgccagcccccacttctagtaccttggcgcaaggcaggcttcctttgagaaacccattgaccctttcctgccacctctgaagctctgctcaaagcatctttgtttgaggctggtccggtaaagccacagccccgccccggccctgttcattactccttggctgagcctcgcgctctcctggcactttaagcccccaggccctccctcaaccccagtcagcagaaggcgccaggctgtgagggtgagagcaagccaggggctgtgggggctgcaggggcagccagtgggtgaggatgagggtgaggacgaggaggggtgaaggatgggggagggggtgaggatgagggaagtggtgaagatgagggaggggagtgaggaggaagggggtgaggatagaggagggggtgaggatgagggagggggtgacgatgggggggtgaaggatggaggaggggtgatgagagaggagtgaggatgagggagggggtgaaggatgagggagggggtgaggatgagacaggggtgaggatgagggagggggtgaggatgagggaggggagtgaggaggagggggctgaggatggaggagggggtgaggatagaggaggggtgaggatgagggaggggtgaggatgagagaggggtgaggatgagaggtgaggatgagggagggggtgaggatgagggaggggagtgaggaggagcaggggtgacgatggaggacggggtgaggatagaggaggaggtgaggatgagggagggggtgaggatgagagagggatgaggatgagggaaggggtgaggataagggaggggagtgaggaggaggggggtgaggatggaggagggagtgaggatgagggagggggtgaggatgagggagggggtgaggatgggggagggggatgagggagggagtgaggatgaccgaggggggttaggctccagggcttctgtcgagaccaaggatgcccaaatatctgggtggtgggtgctgcatacctgggccctgggcagaacgaagggtatacagcctgggccaccaggataagtccagaacccaccaggagctgaggacagacagaaggaccacggagggggtgacgggctggtgtgaggattggtgcccctgggccaggactctcctctcttctccctgctggctccagaccagagtccaagccctaggcagtgccacccttacccagcccagccttgaagacagaatgagaggggtttcctgtctccaggtcctgctccttctgg

SEQ ID NO: 15110 - DNA, 2300 bp, Homo sapien
tcagtgtccaggaagaaccaggtcacatgagctatttggaaggtagtgcatgcggaggatttcaatgggtgataaaagtggctgtcagcaggatggggaattgatgcggaaggaaggtgatctttccctgaagtcgcaccatctgaagttagccgcatctatccacagctaaagctcagccgcatgtatccccaaggctcagcagcttgtatccctgctggtcagctgcttgtgttgctcttttcttccttttcttctgccatctggtctggtttttaccggtacaggttagggggcggggtgggccaagaaggcaatcatttgggcagaaaaacagggtcagatgttttcacttagggctggggctccaggcttgaaggtgggagcccagccgttctgtgtcactcataagaagtgacaagagtgcaacctgtctctctccctcccctcatgcacacagaggccacggaagcacacagcaagatgcaggccacccaacaagccaagaaaagtggccttagaatgaaaactatgttactggcaccttgatcttggaattcccaggctctagaatcatgagcaatacatttatgttgtttaagcccccacggccgggcgcagtggttcacgcctgtaatcccagcactttgggaggccgaggcgggcggaccatgaggtcaagagatcaagaccatcctggccaacaaggtgaaaccgcgtctccactaaaaatacaaaaaaaaaaaaaaaattagccgggtgtgatggcgcgcacctgtaaatccctgctactcaggaggctgaggcaggagaatagcttgaacccgggaggtggaggttgcagtgagccgagatcacgccaccgcactccagcctggagacagagcaagactctgtctcagaaaaaaaaaaagaaagccccttcggctgtggtttttgtttatggcagcccaagcggactcctacagggacacagacccagaccctgatgctggaggggagacaagaggatgtaaatcaaacctcctcaagtccctgtcaaaggacaactatgggctggcctcggtggcacatgcctataaccccagcactttgggagactacagcaagaggatctcttgagcccaggagttcgagaacaagttgggcatcattgcaagaccccatctctggaaaaaaaaattgctaggtgctgtggcatgcacctgtggtcccaactacttgggaagctgaggtggcaggatcacttgagcccagaggtcaaggacgcagggagttgtgattgtaccactgcactccagcctgggtgacagagcaagaccctgtctctctctccctttttatttttttttgagacagaatctcactgcgtcgcccaggctggagtgcagtggcataatctcggctcactgcaacttccacctcccgggttcaagcaattcctgtgcctcagcctcccgagtagctgagattgcaggcgcccaccatcaggcctggctaatttttgtatttttagtagagacgaggtttcaccatgttggccaggctcgtctcaaacccctgacctcaaatgagccacccatctcggcttcccaaaatgcagggattacaggcatgagccaccatgcttggccaagaccctgtctctttaaaaaaaaaaagaaagaaaaacaaaaaaaaaaaaaaggaaaaaagtacaactatggcagggctgcaaaggaggcaggaggaggtggcagagcagaaggctgagggataagaggagttcactatgcagagagggacttgagagacttctaggcagcgaacactgtgtatgagcccaagagggaactacagggccctggaccatccgggccccggtcctccacgggcctcgagagaaggggagttcctgtcccctgaccccagcatcttgctctgtctcggccaccccaaaccaaagactgcactggtccccaaggtcaagtctccccctgcctctggtcaagtaaggagtgccaccaactttgaaccagtccctttccacctccagctgctccagaccccggatctggaagggggctggccatgctggggtctctgggtggagctgtctggccaggacttccgtctgagatgggatttctggacagaacaatggagcgcagaagctccagcaacgtgtgctctgcagggagcccaggtcaggtttggagaggagttgccccggatcctgcagagcttccccacctgactgccacccctcccagcacctacccgcaccactgctctccgccagcccccacttctagtacctt

SEQ ID NO: 15111 - DNA, 2300 bp, Homo sapien
ttccaaaaccccaggcagggtatgtatgtttctgatctgggcactaaaggaagcaacaactgcccccaccagtgaatcaagaccagtagattctctccaagtaccgtagcacaccaagagctgtgtcagcatgcgacttagtctcggcagcctttcatttgttttacgaatacagtttcatttccagaacaaggaggagatcagttttagggagggatgattatcatccttacttcaaagttaaactataaactaaattcctcccatggttagcttggtctacacccaggaatgagcgaaggacagccagcctgtgaggctagaagcaagatggagtcagccacgttaggtttttctcattgatatgtttgcaaaggcggttttaagattgtcttttaattcatgaacatggaatgtcttttcgtttacttaggtcttctttaattttttttttttttaaatttgagacggagtctcgctcttttgcccaggttggagtgcagtggcgtgatctcagctcactacaacctccgcctcccgggttcaagcagttctctgcctcagcctcctgagtagctggggttacaggcacgcgccaccatgcccgactaatttttgtattttcagtagagacagggtgtcaccatcttggccaggctggtctcacactcctgacctcgtgatccacccgcctcgacctcccaaagtgctgggattacaggcgtgagccaccacacccggctgggacggttttcttaatttcatttttggattgttcattgctagtatatagaaacacagctgatttctgagtgttaattttgtatcctgcaactgctgaatttattagttctaacagtttttttgtgtgaaatcttttttttttttttttttttttgagatgagtctcgctctgtcgcccaggctagagtgcagtggcgcgatctcggctcactgcaagctccgcctcctgggttcacgccattctcctgcctcagcctcagcctcccgagtagctgggactacaggtgcccgccaccacgcctggctaattttttgtatttttagtagagacggggtttcaccgtgttagctaggatggtctcgatctcctgacctcgtgatctgcccacctcagcctcccaaagtgttgggattacaggcgtgagccaccacgcccggccttgtgtgaaatctttagagacttctacaaacaagatgtcatctgcaaatggaagtattttacttcttcctttctgattctcacgtctttttttttttgtctaattattctggctagaagtttcagtacaatgttgcatggcattggtaaaactgggcatccttgccttgttcctgatcttagaggaaaagctttcactttttcatcgagtatgattttagctgtggactttactgtgttaaggtcttgtctttctttctttttctctttctttctttcttcttctttctttttcttttctttctttcttttttttttccaatatcttgatctgtcgcctagactagagtgcactggcattatcgcagctcattgcagcctctatctcccagtctcgagtgagtctcctgcctcagcctcccaagtagctgggacttcaggtgtgtgccaccatcctcagctaattttttttttttttttttttttgagaaggagtcttgctctgtcgcccaggctggagtgcagtggcgcgatcttccaggccccaccgggccctcaggaaggccttgcctacctgctttaaggggactcctggctcagggccaggcccctggtgctggaggaggtggtgggtggagggcagggggcaccaagcgggcagccaggacccccgggctgcagacaagaaaaggactgtggggtccaccgggtctgggccacatcaaggaatgtggttgaagacccgcccttaggagctgaaagccagggcgctaccaggcctgagaggccccaaacagcccttgggcctggtttgggaggattaagctggagctcccaacccgccctgcccccagggggcgaccccggtccggcgcgagaggaggcagagggcgcgccaggccgcgggagaggaggccatgggcgcgcgcggggcgctgctgctggcgctgctgctggctcgggctggactcgggaagccgggtgagctcggggcgctacaggcgggaccgggggcagcgaggaggccgggaggtggaggccgcgagggtcacttcttgtgtcctgcagagtcgcaggaggaggagctgttgtcaggtagggcgcccaggacgcgcga

SEQ ID NO: 15112 - DNA, 2300 bp, Homo sapien
cctttgtcccttgggatcagggctcccaagagagggatttactgagcatttatttcctgccccgggcacgccccagtcctcattctgccaggagaagggaacaatgaggccttctcctgcccgcagaggtggctccgggccggctggcccttatgtgtcaggagtcgggttaggaccacaagtccctgtcctccctgccctccaggtgtggggcttgggaagacccctctgtgactctgcagcctgaggcacagcagacaagagagtctccatctgcagcccatgcagcagccagggcctccctgcagcccccgggccaggcttggcctctgcgggaagcccccagcctcactggaggcaagaacctgagtccctggctcagatctccgggtaggactggcctgactgagaccctgggcaaaaccaggagctgacacctcctaggggcctcagcggatccctgggactcaggaaccagagggaacgtcctgctggctgggagaggggcaggatcagaagcccagggacctttgccccaacccagcaggccaaggccaggctgtgcatgtgacttgtccttgagcagctgctgctggggaaggaggccctgagggaaggcaccgcagccttgtgctcctgaaacccgaagctcccacacacccgctgcgccctcattgagttcccgttggtaccatgctctgtgctaagcattttatctgtactttccccaaagaaacttaatacttttattggaaaaccagaacgcctaaccacacattttgcctaatctttcatgtaattaaccttccactagtgcaagtgttgaaagtagaatacgctattcccaagtttcaagttgagggaggcgggattcccaggttctggttgtacattcccattttcactgatctgttcagtggtcaatggattcttgggttgctttcatgtcagctactgtgaataatcctgctatgaacatgggtatacaaatatctcttgaaggctgggtggggtggctcacaccttcaccctggcactttgggaggccgcagagggcagatcacctgaggtcagaagttcaagaccagcctggccaacatggcgaaaccccatctctactaaaaatacaaaaattagctaagcatggtggcaggtgcctctaatcccagctactctggaggctgagacaggagaatcacttgaacccaggaggcagatgttgcagtgagccaagatcgcaccactgcactccagcctgagcgatggagcaagactccatctcaaaaacaaacaaaactaaatccccccaaaaaaccaaaaacaaatatctcttgaagaccttcctttcagttcttttgggtgtatgctcagaagtggaattgcagctgggcgcggtggctcatgcctgtaatcccagcactttgagaggccgaggtgggcggattacctgaggtcaggagttggagaccagcctggttaacatggcgaaaccccgtctgtactaaaaatacaaaaatgagccaggtgtgctggcgcgcgcctgtaaccccagctacttgggaggctgaggcaggagaatcgcttgaacccaggaggtggaggttgcagtgagctgggatcacgccaatgcactccagcctgggcgacaagagcgaaactccatctcaaaaaaaaaaaaaattgttccagagaagtgaagagagcccagcgggagcccgcagtggggacagcctgggcagagacttggggagatccccattctgggtggaacgggccgaggaccactgttttcccaagaaggtcccatgaaggagcagccatgcctctaggccccacccggccttcagggggtccccaggctttaaggggactcctggctcagggccaggcccttggtgctggaggaggttgtaggtggaggacggggtcaccaagagggcagccgggacccctgggctgcagacaagaaagggactgtggggtccaccgggtctgggccacatcaagaagtgtggttgaagacccgcccctaggggctgaaagccagggcgctgccaggcatgagaggccccaaacagcccttgggcccaggagggtgaagctgggagtagagggcagagctcccaccccgccccgcccccagggggcgccccgggcccggcgcgagaggaggcagagggggcgtcaggccgcgggagaggaggccatgggcgcgcgcggggcgctgctgctggcgctgctgctggctcgggctggactcaggaagccgggtgagctcggggcgctgctggcgggatggg

SEQ ID NO: 15113 - DNA, 2300 bp, Homo sapien
gctgctctgctcctgccccgtcagggctggggtgtcacggggagcccccttcctgactctgccatccagcaccacggacagggctttggtggttctttgggaataggtatcaaccaggggtgggcggacgttttgtgtgaagggccagatggtacaattttaggttcaggggctgcaggtctctgtcacagccatgtgagcttctgtgcaagcatgaagacagccacaggccacatgccaatgagcgcacggcggctgtgggccagtgacgcttgacttaatgaactggagcatgggaatttcaaagaattttcatggaccacaagacatcgttcttttgaatgtttcctaagaatattaacatgtaggaagcattctttgctcatgggcgaggcagaaacaggaggtggttggctgggccatagttcgccacccctggcgcaggcacctggttcaagtcgtgaaagtcctgctcctcccgcagcccctgcccaccctcatcccgatgagaccggcgtccccgttcctggtgagccagcacttccagagccagtctgtgcatgcacaaagcccttctttgcacccatcttcctgggaagcatgtggggtccacacacactggtcttccagcctgtttccctgggggatgggtgtgcagtgggagtgtcccccaccctctccacccaagttttccacagccagggatccaccacccgggctctcggcatctccaggtggatgcgcccgtgatttctcagcttttgctctttccaaaaattagcgttgtacactctcccccaaggcataaagtctaaggctcagggcaaccagccctgggggcctcccctccagggaggccctcacagcaccctcagggggaggttctgttgttatccgcagaacagaggcccagagaggtgaagcaagagcccgcagatcccagccccgctacgtcaggaagcccggctggacccacgtctggctccagggtcctgtgttggtgatcacagccctgtggctgttcccagcggtcacaggccctgaggagcttcagtccctggaacacacacaagaggtgtcctgaggacacgcatggaactgcgcttgagctgcaatctgtcccctagttcccgcctcgcttgggcatctgacggcctttatctcttctcccctgatccttatccgacaccccaactcttctgcagactccagttccttcccagtgccctgggtccttcagggtccttgggatgagacatctccgaacacgagcttttctcagctggcgtctgagggtgatggcgttctgcccacaggcatccgcctgcacaggcctccctgacaagaggggctgagggggaaaggagtgagacagaaaaccagcagggccccggggaccgagccctggagaagcgccagttcccgcccagatgagggccgacacctcggaaggaccggcctggggggtcgccctccccaggccctctgcctcccatcgtggcatggactgcacctttggtgtccttccctcccatggcctctgagtccctgaacactggctcatacctgctccacccagatacagcacagaggagagacccgggcagcctctaagggcagtgccttgagggccagtgcctggtgcacctgccgcacagggcacaggacacaaagggctgggtgatccattcaggctctctcagggcccgcgtcgagctcggcctgggtcccaggaaggctgccaggcaccaggtgctgcctgagtccgaaggaggccctgactccaggtcgcccacggcaggagtgggccccacggagcttctgtggacccttgacccgccaccctcaggtggaagccatcaggctgcgctggataagccagcctctccccacctctgccattcaagtcggtgccagtgctgactggagagatcccagagataactgtgaaatgcctgtcactgttctcagcttcgtttatgtaggctgcagagccaagacagcaaatactgcacatccgggagcctccccaaggccggccctgggccttcccccaggaagagccccacggccagctccttcctgttcccctggcggcccctcgcttcttccttctggatgggggcccagggggcccaggagagtataaaggcgatgtggagggtgcccggcacaaccagacgcccagtcacaggcgaggtaaggtgcttggctccatgggtggggcccggcaaggtcacactggcccttgctttggagtcaggaggcctctcttcttcccacagagccctgggatgcac

SEQ ID NO: 15114 - DNA, 2300 bp, Homo sapien
gtctctaacatattcctctgtttctgtgtttccctctggactcccagtccagatttgtggactcttcaggctctgcctgttctgggctctgtccctatgtcccacaccccagatctgcagtcttgggcaaattcaggcactccttgcctcacctgggcggctgactgcagcagactgcgtctccattcccctcccaagtctgtggatcccaggctctaccatgttaaagtcggagggctgacactccggccttggtggttgcgaggaagctactggtccacccctcataccatgggaccactaccagcgaggatgttgccctgatgcagctgaactccgccttgcaggcctctgatttttccagaaaagtctatcagggggtacacaccagttgactgtctcgtagtgatgagctagctgttgaggattattccctagaccaattagtccattagattgcaacatggtgatattcctgttccatttattagcagaaattcctccataaagagaaacttttcatcatctatttatttttgttgcctctttcattctatttttaaaaatgtttatgtttttggcatctatttaattatcctcaaaataatgaactatttccttagcatactccaaaaatgataaagttttttttgtaatatgaactcatggatttcttcttttctttttttttttttgagatggagtctcgttctgtcgcccaggctggagtgtagtgacgcgatctcggctcactgcagcctctgcttctgggttaacgcgattctcctgcctcagcctcctgagtagctgggatcataggtgccaccaccacgcccagctaatttttgtatttttagtatagatggggttttgccatgttggccaggctggtgtcgaactcctgacctcaggtgatctgcccgcatcggcctctcacagtgctgggatcacaggcgtgagccaccgcacccggccttatctcacgtatttaaatcactccaagttattgcccacagtgatgctccaagtgtcccatcgtcagccagtgagaacgtcttttggttgcctcctgagagggaccactcagtttccagaccctccagggcctgaggccaggctgagatgatgctcacaggactcgcatactgaccggaaccccgcccgatcgcacaggaagtccgccggaaactctcttggagcccaccggaagtttagcgaaccaccctcaacctccggaagagcgcgggaagtttgtcggaaacggacagaaaggagtccctgcgaccgcgtagcctcctgcagcgccccctgttggcagagtcgtagcgaggccgagatgaggtccgtgacgtggctgcgtgagcatcccggctgcctgtggatgagtgggcgtggggctgagaggcgacaacagtggggagcttcctcagcgatcctgggcttctcgggtcaggccaacttcagtccgggctggaggccgtgcacaacaccaagcgcatggtggggtcctcagctgcctcgggactggctccgcctctgcccctggccctgggatgggggccaaaggttttgggcagtggcagcagcaggaggaagtagcacctggaaaacgtgtctcctgagtcgacccttcctgtctgggggggccgaaccctggctgtctttgttcccatagcaacgaatagggctcccctatgttccagccccttagatacggtgtgccccaggagggctctgcaggagctacaggtccttctggtgggaagggaggcgggaggtgggctggggcagcccggctggcctgtgtggagacatcacacttcctggttggggacagggtgaagagggttggtccccacctctgccttgagcagagcttctagtgggtgaagcagtggggatctcctgcctgccggaaggatgggtggggcttccacatcgcagcccagtagggtggactgaccggtcttctgacctctggctccttggagggactggcctgaggtgggccctggcatccccagcctcctctaaaccacctccctggaacatgcgggacaggagcccaagcggcatctgaggagggcgggttctgccaggcacagagggctccagcgtgattgccactggttaatgacctgccacccccgcccccccaacctctggtgccgtccaaggactctgaccccagtgcagtgtctgtagggaagaggagccatggggcttcgggcaggccccatcctgcttctgctgctgtggctgctgccaggtaagggatgcgcctctgtcttctcctccct

SEQ ID NO: 15115 - DNA, 2300 bp, Homo sapien
tgggcgacacagagactgcctattttcactctggatttttgagaccaattaaatatttttttctgtatatatctctaaaagatagggccatgaaaaagacctacaatatcattatcaaactaaacaaaagtaacaacaattcattaacaacatcaaatataattaatattcatatttcctattcccagctcattttatgttttccaatgtgtgcgtttgaatcagaatataaattgttaaaggatgatgtgctaaaaagataaaatcatgactcatacaaatataaaattaatacatgtcaattttttacttttagagagacagggtctgctatatttaccagggtggttttgaactcctggcctcaaaatatcatcccaccttctcagcctcccaaagttctgggattacagacataagccactgcacccagcctgtgtttttatttaactcaattaatgacagaatcagtgagatgttacaactggttcaaaggagaattcagagtaggaacatatttaacacatcagcaatgttgaaattaatttgcttaaatagatgtacaagaacaatctgcattcctatcagttatctacaatttacagtcttaaaatagctcaaagggagggacccccacagaatcagaaaacctggaagagtatgagagacaaccccattgaatttactcagtaatttttgtgggtccactttaaagtctttcacaattttcccttacaaaataaactttattcactgcagttgattgctatacgtcttaagtttcttttattctcgagatgccccctccatctcttttttttctttgtcactgtccaataactgatcatttgtcctttaatctcaccatctggatttgctggttgtgcccccatgctgtctctaacatattcctctgtttctgtgtttccctctggactcccagtccagatttgtggactcttcaggctctgcctgttctgggctctgtccctatgtcccacaccccagatctgcagtcttgggcaaattcaggcactccttgcctcacctgggcggctgactgcagcagactgcgtctccattcccctcccaagtctgtggatcccaggctctaccatgttaaagtcggagggctgacactccggccttggtggttgcgaggaagctactggtccacccctcataccatgggaccactaccagcgaggatgttgccctgatgcagctgaactccgccttgcaggcctctgatttttccagaaaagtctatcagggggtacacaccagttgactgtctcgtagtgatgagctagctgttgaggattattccctagaccaattagtccattagattgcaacatggtgatattcctgttccatttattagcagaaattcctccataaagagaaacttttcatcatctatttatttttgttgcctctttcattctatttttaaaaatgtttatgtttttggcatctatttaattatcctcaaaataatgaactatttccttagcatactccaaaaatgataaagttttttttgtaatatgaactcatggatttcttcttttctttttttttttttgagatggagtctcgttctgtcgcccaggctggagtgtagtgacgcgatctcggctcactgcagcctctgcttctgggttaacgcgattctcctgcctcagcctcctgagtagctgggatcataggtgccaccaccacgcccagctaatttttgtatttttagtatagatggggttttgccatgttggccaggctggtgtcgaactcctgacctcaggtgatctgcccgcatcggcctctcacagtgctgggatcacaggcgtgagccaccgcacccggccttatctcacgtatttaaatcactccaagttattgcccacagtgatgctccaagtgtcccatcgtcagccagtgagaacgtcttttggttgcctcctgagagggaccactcagtttccagaccctccagggcctgaggccaggctgagatgatgctcacaggactcgcatactgaccggaaccccgcccgatcgcacaggaagtccgccggaaactctcttggagcccaccggaagtttagcgaaccaccctcaacctccggaagagcgcgggaagtttgtcggaaacggacagaaaggagtccctgcgaccgcgtagcctcctgcagcgccccctgttggcagagtcgtagcgaggccgagatgaggtccgtgacgtggctgcgtgagcatcccggctgcctgtggatgagtgggcgtggggctgagag

SEQ ID NO: 15116 - DNA, 2300 bp, Homo sapien
ggtactcaatatatgtttgctgggtgagctggagaggccacccaccttattccagaaggcagtggggtggggcgcaggagggccctggacgccctgggtgcagagctgagcgggggacagtgagtagggttgggggagcccagcagaaatttctgctgcagtgctgctgctgctcagagacactgcccctccttggccactctgcgtggccttttcctgcagttcccccaaaccccctctgagtcctgggacagagaataatgcatcctctggggctccccagggccctgctgtttgacttgtctctcggtggagcagggcatggcctctctgccacgagaaagtgccagtcgtcctgctgccaccctaacccttaacagactgaggaggtgggcagcacagagtccacccccagggcaaaacccgtcctgctcagagccatggagtccctgaagcagccatggtggtctgctaagcccctgacccacgccaccctgactctgcagggagcaagttagggctcaccccaggcagggtgaggcacctcctccaggctcccgaagcctccatgagggcagtcccagcagccacccccagtgttggggtgcaggtccggctccaccactcacccagcaatctcgggcaagtcacttaaccgccctaagctgcctcagtttccttatctgcagagtgggaataataaagacatttgaggattaggaggcaatgcatggcactcctaaatgtttgctctattatataaatactatatttatatttgtataaatatatttattacatacatattcactactatggttttttttttttttttttgaaacagagtctcgctctgtcgcccaggctggagtgcagtggcgtgatctcagctcactgcaacctccgcctcccaggttcaagcgattctcctgcctcagcctcccaagtagatgggactaagggcgcctgccaccatgcctggctaatttttttttttttgtatttttagtagagacggggttttactatgttggccagactggtattgaactcctgacctcatgatctgtccgtcttggcctcccaaagtgctgggattacaggaataagccaccccacccagacactatggttgtttttaattcacccccggcggtagcaagggccctgctggaggcttgttgatcgaatgagtgaaggggcgcaggctcctgcctctttgtagaggaggaagcctgccctgcttgggtgggagtgtcccaagtgtggggcgctgcagggcactgagtcagggaaggtctcacaggattcagccccgggttgccactgtggcagccgctggggggaagcaccgagaatccactcccagcccaggacccggccccccacagcccagcccagcagctctttgaatcctgggagtcccagcccttcccggggcccctcttctctcaacccccctgcttggccgagccctggtgcccatgggctcctccccttcccaggagtccaggtgaggtgagttgtcaggtgtctgaaccgcagggcagagccccgcctccaggaacgacaggagggcggccaccaggaggccaccaaggtcgccactcacctgattcacagctttcgggaagtgggttaacgggattcccaagcccgggttgcgccaggtctctgggctgagtcacaggggcctggggccctgcaggtgggagccgttactgagctttgggcacccccttgatccctaaggccctaggaccacccccaacacccagtaccccagacttcagcctctccaaacccaggccctccccagcccggaaccccttcctttcagtgccctggcacctttctctgcccctggacaattaatgtcagggacctctgggcccaagccccctcccctgcccttccagaggccacatcctggggtctcagctagagcccccccagagccctgtagcggctggcttcctccccgcagccccgccctctgcccaggacccacagccggggtggccgcgggagccacctggggactggtctgacggcattccgcctcccaggataaaacctggggcgacctgcagggaacctacacaccctgacccgcatcgccctgggtctctcgagcctgctgcctgctcccccgccccaccagccatggtggtttctggagcgcccccagccctgggtgggggctgtctcggcaccttcacctccctgctgctgctggcgtcgacaggtacgtccggaggctgctcctccctcctccctctcacctccaccctccttcc

SEQ ID NO: 15117 - DNA, 2300 bp, Homo sapien
gctgggtgcggtggctcacacctgtaatcccagcactttgggaggctgaggcgggtggatcacgaggtcaggagttcaagaccagcctggccaagatggtgaaactccgtctctactaaaaatacaaaaaaattagctgggtgcggtggcaggcgcctgtaatctcagctacttgggaggctgaggcaggagaaccacttgaacccaggaggcggaggttgcagtgagctgagatcgtgctactgcactccggtcttgccaacagagtgagactctgtctcaaaaaaaaaaaatctttaatatctcgacaggcaaggtggctcacatgtctaatcccagcacttttggaggccgaggtgggcagatcaccggaggtaactccggtttgataccagcctggccaacatggtgaaatcccatctctacaaaaatataaaaattaagcatgattaccggtgcctgtaatctcagctacttgggaggctgaggcgggaaaatcgcttgaacccgggaggcggaggttgcaataagcagagatcacgccactgcactccagcctgggcgacagagcgagactccatctcaaaaaaaaaaaaaaaaaatctttgacatcagagattcatatacaaagatatttataacatcatcaagttaaaaacaaccagtagtctgtgaatgattaatagataacagcaaataaatgcacaaaggtagctgggcacggtggctcactcttgtaatcccagcactttaggaagccgaggcgggtggatcacctgaggtcagaagttcaataccagcctggccaacatggtgaaacccgtctctactaaaagtacaaaaattagccgggcgtggtggcgggcgcccgtaatcccggctactcagtaggctgaggcatgagaattgcttgaacccgggaggcagaggttgcagcgagccgagatcacgccactgcactccagcctgagcgacagagcgcaattctcgtttctaaaaaaaaaaaaaaagcacaaaggccttgaatgacaccagacaatgcccggggagataggatagtgggatgggggcagcgggagccttggtagcggagtccacggtgggattcagagacctgcagagccagggccgggaggggcagggcagaggaagggcgtgcagcgacgctggcattcggacgtgagaaggcggaaggtgcgggaggccccagaggatctcgacctggaccctggagccctggggcggtggcacattcagcggccgctttagagcgaggggggcggggcgcggagccaggcttagggggaccaaggtggccggggtagtgggggcgaccccgcggggctgggagagccgcggtgagcctagggggctgtgcgggggccgctctggacgctgcagccaagtgtcccaggaaagcagcgcccagggccccacagctccctgtgcccggacccagcccagtcccactgcagtgggtggctggaggatggcgagtgtcccgggcaccccttgggccgggtgaacgtggttgggcacggagagggcggggcccgtgggcacgggtgggcccaatgggccagggctggaccaataacgagaaaggatgaatggacaggggctgaactacagagagagggcgggactattgggcgagggctggaccaatgggcaggggctaaactaatagacgagggctggaccaatggcgcggatgaggctgctgcgtcgtcaaggatgcagagcttaaagcaaggcagtggcttccatgagcctaaacaccttccctccgcacgctcggtatcgcgacgggggagagcaaaacctttaaacaaatgctccagttttccccgcagagagccggagtcaaatccgtgaggaagcccgggggtcgcagtgaagcccaacccactggtgctgggataacctcgcccgcaacccggatccaggccgcaggtcccccgaggctccgcccctgacggcgacactcaatcccgggtgtccccgcccccttactgaattttggccccgcctccgccctccgattggccggacgccagctctacgccgcacgggcaagacgcggaggagcggccccagccagaagacagggcacccgcggccttgctgcgcatgctcgcgctgtgaccccggcttgaggtaacagcgcgagctgaggctggggcccttggcgcggaggctgagggacccgccgcggcgctgtcgccggagagggagggcaccgctgtcgtcggtgaggacgggccctggcgggcggggagggtcctgcgtcctcggca

SEQ ID NO: 15118 - DNA, 2300 bp, Homo sapien
ctccgtctctactaaaaatacaaaaaaattagctgggtgcggtggcaggcgcctgtaatctcagctacttgggaggctgaggcaggagaaccacttgaacccaggaggcggaggttgcagtgagctgagatcgtgctactgcactccggtcttgccaacagagtgagactctgtctcaaaaaaaaaaaatctttaatatctcgacaggcaaggtggctcacatgtctaatcccagcacttttggaggccgaggtgggcagatcaccggaggtaactccggtttgataccagcctggccaacatggtgaaatcccatctctacaaaaatataaaaattaagcatgattaccggtgcctgtaatctcagctacttgggaggctgaggcgggaaaatcgcttgaacccgggaggcggaggttgcaataagcagagatcacgccactgcactccagcctgggcgacagagcgagactccatctcaaaaaaaaaaaaaaaaaatctttgacatcagagattcatatacaaagatatttataacatcatcaagttaaaaacaaccagtagtctgtgaatgattaatagataacagcaaataaatgcacaaaggtagctgggcacggtggctcactcttgtaatcccagcactttaggaagccgaggcgggtggatcacctgaggtcagaagttcaataccagcctggccaacatggtgaaacccgtctctactaaaagtacaaaaattagccgggcgtggtggcgggcgcccgtaatcccggctactcagtaggctgaggcatgagaattgcttgaacccgggaggcagaggttgcagcgagccgagatcacgccactgcactccagcctgagcgacagagcgcaattctcgtttctaaaaaaaaaaaaaaagcacaaaggccttgaatgacaccagacaatgcccggggagataggatagtgggatgggggcagcgggagccttggtagcggagtccacggtgggattcagagacctgcagagccagggccgggaggggcagggcagaggaagggcgtgcagcgacgctggcattcggacgtgagaaggcggaaggtgcgggaggccccagaggatctcgacctggaccctggagccctggggcggtggcacattcagcggccgctttagagcgaggggggcggggcgcggagccaggcttagggggaccaaggtggccggggtagtgggggcgaccccgcggggctgggagagccgcggtgagcctagggggctgtgcgggggccgctctggacgctgcagccaagtgtcccaggaaagcagcgcccagggccccacagctccctgtgcccggacccagcccagtcccactgcagtgggtggctggaggatggcgagtgtcccgggcaccccttgggccgggtgaacgtggttgggcacggagagggcggggcccgtgggcacgggtgggcccaatgggccagggctggaccaataacgagaaaggatgaatggacaggggctgaactacagagagagggcgggactattgggcgagggctggaccaatgggcaggggctaaactaatagacgagggctggaccaatggcgcggatgaggctgctgcgtcgtcaaggatgcagagcttaaagcaaggcagtggcttccatgagcctaaacaccttccctccgcacgctcggtatcgcgacgggggagagcaaaacctttaaacaaatgctccagttttccccgcagagagccggagtcaaatccgtgaggaagcccgggggtcgcagtgaagcccaacccactggtgctgggataacctcgcccgcaacccggatccaggccgcaggtcccccgaggctccgcccctgacggcgacactcaatcccgggtgtccccgcccccttactgaattttggccccgcctccgccctccgattggccggacgccagctctacgccgcacgggcaagacgcggaggagcggccccagccagaagacagggcacccgcggccttgctgcgcatgctcgcgctgtgaccccggcttgaggtaacagcgcgagctgaggctggggcccttggcgcggaggctgagggacccgccgcggcgctgtcgccggagagggagggcaccgctgtcgtcggtgaggacgggccctggcgggcggggagggtcctgcgtcctcggcatggacgagtccccggcccggctctctcgggggtcccgagggctgcgggtgctgaggaggggtccgcgtcctggtgctcaggccgcctcctgtggggtctcccgc

SEQ ID NO: 15119 - DNA, 2300 bp, Homo sapien
aaaaaattagctgggcgcagtggcaggcgcctgtagtcccagctactcgggaggctgaggcaggagaatggcgtgaacccgaaaggcggagcttgcagtgagccgagatggcgccactgcactccagcctgggcgacagagcgagactccgtctcaaaaaagaaaaaaaaaaaaaaaaagccgggcgtggtggcaactgtctgtaataatcccaatcccagctgctcaggaggctgaggcaggagaatcacttgaacccgggagatggaggttgcagtgagctgaggtcgtgccactgcactccagcctgggcgacagagcaagactccatctcaagaaaaaaaaaaagtaattaagttctgctactattttatttttgaacagggtcttgctctgtcgcccagcctggagtgcagtggcatgagcgcagctcactgcagcctccagctcccaagctcaagtgatccttccacctcagcctcctgagtagctgggactacagcgcatcaccacatccagctaattttctcttgttcctcttttctttttttctgtagagaaagagtctcactatgttgcctaggctgatctcaaactcctgggctcaaacgatgctcctgtctcagcctcccaaagtgctgggattacaagcaagagtcactgtacccggccaacatggatgaactttgaaagtgctatgctaaggctaggcgaaagaagtcagtcacaagagaccacatatttgttgcatgatttcatttatatgaaatatgcagaatacgcaaatctataaagacagaaaatagatcatattacttagggctggggtgattagcaaattggagggtggtggctaaaggtttcttcttggagtgatgaaaggttttaaaactgactatggtgctgtttgcacaactctctgactatactacatatcatttaattgtacactttaaatgggagaaatgcatggtatgtgaattatatttcaataaagatcttaccaaaaaatagtaagctgattgtgttaacatagttttatgaaaaagtacaatattttcccaaagaaatttagtgagacgagtgacatagttatacatttttgcaaatatctttgttgcgggcttaaaagaagactactggctctcatacctgcttctacattcaatgtgttacatcacacgtcatgcagactttgtaatactatgtaatatttctgcttttttttttttagacacagtctcactctgtcgcccaggctggagtgcagtggcgccgtctcggctcactgcaacctccgcctcccgggttcaagttattctcctgcctcagcctcccgagtagctgggattacaggcgcccagtaccacgcccgactaatgttcgtatttttagtagaaacggggtttcaccatgttggccacgctgttctcgaactcctgacctcaggtgatccacccgcctcggcctcccaaagtgctgggattacaggcgtgagccaccgcgcccggcccaggtatttttttgtcgttgttggctttctgatgtaagaaacaactgtcccttctcccccgttgacttatttccttcagtttggactcatatcgtagtcaaggttataatccgttgctatcgctgtttatttgaatctcacactggttccgctctggggtagggtcactgggggcgtcaatgagatgcatgagaatcgccttcccacggggtcaggaaactgacaggcccaagagtgcatctcagcaaacgctccgtttcctgcgggcagcctcagatactggggaccgtcctggggtctcaattaagcgccccctaccccagcccctttacgccaagagcgtcctgttcagctcccccatcctagctccgcccctggacgccgccgtccaatctcgggatggccccgccttttccgtgagttacgtccccgcccccatgcgctgacaggccaggcctgcggctcggcgccgcgcagggaagacccggagcagcggtttacctaaggaacgggccgcgcggtcttgctgcgcatgctctgaagtagcgcgcctgagcgttccgcaaggccggctccccggcggggtcgcgcgcgcggtcacggggctcgctcccgaggggcaggtcggggctgggagctggtgcccgggtcggggtggcggcggcggcctgggtcgcggggtcgacgctcgctgctgcagcggcagaggctgaaggatccgccgcggcgctgtcgcgggagagggagggccccgctgccgtcggtgaggacaggcccctgcgggcgg

SEQ ID NO: 15120 - DNA, 2300 bp, Homo sapien
tatgatctctctctcttttccccacacaaaaagccccaccccacaccatgactgccactgactgcccccaggcccccaccccagccctgtgctggttccccattatctgacctttctgcctctccaggctggaacccgtggtgacctcagaattctccagacaccaccacagccccgtccccgaccagccgaggcagccacagcaacagctccggcacaaggtggctgccactgtggggccctggtatctcctgaagtgggggtggcctggggcctccaggctaggatagggactgggtctgcctgagcccagaaagggctttctgcctcccaggccgtgatgtggtgccgtcctctggaaagggctctgcgtaccaggcccacatgcctgagacaggtgcctggcgtcctggtgaagcacatggtttccaaaaaggtcctgacaagtccctgggcatctgagcagaaacgggtctcagcttcccgcctcttcagcctcaagtgtatcacaggtgtctgtgcctcactatcctcgtctataactgggtcaataagaacgttctgccgtcataatgtagggactggaggggggactggaaacgcgggtggaaacccttcgtccgtgctcagcatgtggctgagctcttagtccattagtcactctgatggccccttgtggagggtgtttattgtgcacattttccagatggggaaagtggggttggatggggctgacgtacctaaggctgccaggagaggaactggcagagcagaagcctagttccatcaggcccccggccagtcttggccccagcgagcagtgaggcagccccatctgccccacctccctcccagatccacgtctagagtcccccaagggcttccaccactgacgggattttgcttccttccttaggacggaaccactgcactccaggttccttgctgggtgctgagcgtggcctgagggacaggccctgggtcccgggatgcccctgcccgagcccagcgagcaggagggcgagagtgtgaaggccggccaggagccatcccccaagccaggcacggacgtcatcccggcagcccccaggaagcccagggagttctccaaactggtgctgctcacagcctccgaccaagatgaggatggggtgggatccaagccccaggaagtgcactgcgtcctgtccctggagatggctggccccgccaccctcgccagcaccttgcagatcctgccagttgaggagcagggaggggtggtccagccagccctagagatgcctgaacagaagtgcagcaagctggatgcaggtgaggtgtggcttcccgcccctgcccagccaccccgtgggttccagcgctcccagcaggccctgtacaccctgcttcaagcatagtgtcttgtccttgctccaagctcagcctcttggtctctgatcctgagcgtgtccgaggctggtgggatgatcacagtcaggtaccaggagctcctgggagttgcagtgacgtgcagaattccttcagctccctaaaaacatccactaccacccccaaaataaaaaccagccctgagagtctgggcttcttgcttgggagcaggaggagaaggcacctgccatactcaggatccccacgccctccctggctctctgtgcctgcgaccctgagctttgctctagcttagctaacctagccttcccgttcccccagcagcccctcagtccctggagttcctgaggacaccattcgggggccgcctcctggtgctggagtccttcctgtacaagcaggagaaggcagtgggggacaaggtgtactggaagtgccgccaacatgctgagctgggctgccggggccgggccatcacccgaggcctgcgggccacagtgatgcggggccactgccacgcgcccgatgagcaaggcctggaggcccggcgccagagggagaaactgcccagcctggccctgccagagggcttgggagagccccagggtcctgagggccctggaggccgagtggaggagcccctggagggggtgggcccgtggcagtgccctgaggagcccgagcccactcctgggctggtgctgagcaagccggccctggaggaggaggaggcaccccgagccctgtcactgctgagcctgccgcccaagaagcgctcgatcctggggctgggtgagtacaatccactcccctgctgcgtccactcggggcaggggacccgagggcccttcctcagcccaaatagaaatgtggggtcccacagggtcttttaaaatgtactcaaagct

SEQ ID NO: 15121 - DNA, 2300 bp, Homo sapien
cagcactttgggaggccaaggcggacggatcatgaggtcaggagttcgagatcagcctgatcaacttggtgaaaccctgtctctactaaaaatacaacacttagccgggcatgctggtgcgcacctgtaatcccagctactcaggagactgaggcaggagaatcgcttgaacccaggaggcagaggttgcagtaagcccagatcgctccactgtattccagcctggtgactggagcgagactccatctcagtaaaaaaaaaaaaaaaaaaaaaaaaatacataaatgtgggctgggcacagtgttcatgcctataatcctagcactttgggaggctggggcaggaggatcacttgagccgaggagttcaagaccagcctggccaatatagtgagaccccatatctacaaaaaatcagccagctgttgtggtgtgtgcctgtggtctcagccacttgggagactgaggtgggaggatcacttaagctagggagattgaggctgcagtgagccgggatcacgccactgccctccagcctggacaagagacctggaccctgtctcaaaaaaaaaaatcagaattttatctggttcccatgcaattctagtgtccattaagttcaggaaagacacctaggcctgctgcagtgattcatgcctgtaatctcagcactttcggaggctgaggtgggcggatcatgaggtcaggagttcaagaccagcctggccaacatagtgaaaccctgtctctactaaagatacaaaaaactagcctggcgaggctgggcgctttggctcacgcctgtaatcccagcactttgggaggtcgaggtgggcggatcacgaggtcaggagattgagaccatcctggctaacacagtgaaaccctgtctctactaaaaaaatacaaaaaaagattagccaggcgtggtagcgggcgcctgtagtcccagctactcgggaggctgaggcaggagaatggcgtgaacccgggaggcggagcttgccgtgggccaagatcgtgccaccgcactccagcctgggcaaaagagcaagactctgtctcaaaaaaaaaaaaaaaaaattagctgggcgtggaggcgcctgcaatcccagttactcgggaggctaaggcagaattgcttggaggcggaggttgcagtgagccaagatcgagccattgtactccagcctgggcgacgtggcaggaccctgtctcaaaaaaaaaaaaaaaaaaaaaaaaaagatggctggtgggagagtcttgggttttgggtcctaggttcaactttcagccctccctgatggtagctctgtagcctcagaaaattggcttaatttctggagtttcaggagctttatcctaaggtggctgtgataacctggattgttgtgtaaattgcacatttggggcttggcaagtggcagatgggagttctggctgttttattaccagtaactgggacatgggcttgggttcgaggaggccacgtggctcctgacacagccttaaggatctgaggtggcccctgccctgggcacctggggtgggaagggaggtgcagggaacagggagacttatttttcactgtgatcttttcgaaccatttgaatgtattataccttgtgtgttttattcaaaaatgggtagatttgttaaacaaaacctaaaaaaaatatgagcaggagtgacagaaaacagagaccactgagtctgagtccaggttggcccctcccggtgtaaccttgatgcaacattgagcaggcctgagctggggtgacctcactgacagctaggagaggaatgagactctcctctgggtcactcggtggtaggggtgagctggggtggcctcactgaccgctaggagaggaatgagactctcctccgggtcgcttggtggtaggggttcagtgggaatgggtttggggcctctgacatatctggctcaggaagccagggtaaatttcagccttaaaggagaaaggctcgtgtcagcccccacagtctgcaggggctgtccctcctgggctcctctccacccctggtgatgtgaccacttgggtctctcctctaggacaggcccggcccctcgagttcctgaggacgtgctacgggggcagcttcctggtacacgagtcgttcctctacaagcgggagaaggctgtcggggacaaggtgtattggacctgccgggaccacgcgctgcacggctgccggagccgggccatcacccagggacagcgggtgactgtgatgcgtgggcactgccaccagcccgatatggagggcctggaagcc

SEQ ID NO: 15122 - DNA, 2300 bp, Homo sapien
gcgctttggctcacgcctgtaatcccagcactttgggaggtcgaggtgggcggatcacgaggtcaggagattgagaccatcctggctaacacagtgaaaccctgtctctactaaaaaaatacaaaaaaagattagccaggcgtggtagcgggcgcctgtagtcccagctactcgggaggctgaggcaggagaatggcgtgaacccgggaggcggagcttgccgtgggccaagatcgtgccaccgcactccagcctgggcaaaagagcaagactctgtctcaaaaaaaaaaaaaaaaaattagctgggcgtggaggcgcctgcaatcccagttactcgggaggctaaggcagaattgcttggaggcggaggttgcagtgagccaagatcgagccattgtactccagcctgggcgacgtggcaggaccctgtctcaaaaaaaaaaaaaaaaaaaaaaaaaagatggctggtgggagagtcttgggttttgggtcctaggttcaactttcagccctccctgatggtagctctgtagcctcagaaaattggcttaatttctggagtttcaggagctttatcctaaggtggctgtgataacctggattgttgtgtaaattgcacatttggggcttggcaagtggcagatgggagttctggctgttttattaccagtaactgggacatgggcttgggttcgaggaggccacgtggctcctgacacagccttaaggatctgaggtggcccctgccctgggcacctggggtgggaagggaggtgcagggaacagggagacttatttttcactgtgatcttttcgaaccatttgaatgtattataccttgtgtgttttattcaaaaatgggtagatttgttaaacaaaacctaaaaaaaatatgagcaggagtgacagaaaacagagaccactgagtctgagtccaggttggcccctcccggtgtaaccttgatgcaacattgagcaggcctgagctggggtgacctcactgacagctaggagaggaatgagactctcctctgggtcactcggtggtaggggtgagctggggtggcctcactgaccgctaggagaggaatgagactctcctccgggtcgcttggtggtaggggttcagtgggaatgggtttggggcctctgacatatctggctcaggaagccagggtaaatttcagccttaaaggagaaaggctcgtgtcagcccccacagtctgcaggggctgtccctcctgggctcctctccacccctggtgatgtgaccacttgggtctctcctctaggacaggcccggcccctcgagttcctgaggacgtgctacgggggcagcttcctggtacacgagtcgttcctctacaagcgggagaaggctgtcggggacaaggtgtattggacctgccgggaccacgcgctgcacggctgccggagccgggccatcacccagggacagcgggtgactgtgatgcgtgggcactgccaccagcccgatatggagggcctggaagcccggcggcagcaggagaaggccgtggagacgctgcaggctgggcaggacggccctgggagccaagtggacacgctgctccgaggcgtggatagtttgctctaccgcaggggtccgggtcccctgactctcaccaggcctcggcccagaaagcgagcaaaggtcgaagaccaggagctgccaacccagcccgaggccccagacgagcaccaggacatggacgcagacccgggtgagctgccttcctttggggctcaccggccctgccttgactcttgcctccagaggtccagggagggaagggggtgcgatcaggcctacccagcccctgtcccctcccctgactgcctcttgaacctccccaggaggccctgagttcctgaagacgcccctggggggcagcttcctggtgtacgagtccttcctctaccggcgggagaaggcggctggggagaaggtgtattggacctgccgggaccaggcccgcatgggctgccgcagccgcgccatcacccagggccgacgggtgactgtcatgcgtggtcactgccacccgcccgacctgggaggcctggaggccctgaggcagcgggagaaacgccccaacacggcgcagcgggggagcccaggtacctgggggtgggctgggagctgggccccaggaagcaggcaggagccccacactgcctttccctctccatgctgcggctccccctggcaaacgtcctcttcccttctttgaacatcctagaaggaactatggccctggcctcctactccttggccc

SEQ ID NO: 15123 - DNA, 2300 bp, Homo sapien
cccctcccggtgtaaccttgatgcaacattgagcaggcctgagctggggtgacctcactgacagctaggagaggaatgagactctcctctgggtcactcggtggtaggggtgagctggggtggcctcactgaccgctaggagaggaatgagactctcctccgggtcgcttggtggtaggggttcagtgggaatgggtttggggcctctgacatatctggctcaggaagccagggtaaatttcagccttaaaggagaaaggctcgtgtcagcccccacagtctgcaggggctgtccctcctgggctcctctccacccctggtgatgtgaccacttgggtctctcctctaggacaggcccggcccctcgagttcctgaggacgtgctacgggggcagcttcctggtacacgagtcgttcctctacaagcgggagaaggctgtcggggacaaggtgtattggacctgccgggaccacgcgctgcacggctgccggagccgggccatcacccagggacagcgggtgactgtgatgcgtgggcactgccaccagcccgatatggagggcctggaagcccggcggcagcaggagaaggccgtggagacgctgcaggctgggcaggacggccctgggagccaagtggacacgctgctccgaggcgtggatagtttgctctaccgcaggggtccgggtcccctgactctcaccaggcctcggcccagaaagcgagcaaaggtcgaagaccaggagctgccaacccagcccgaggccccagacgagcaccaggacatggacgcagacccgggtgagctgccttcctttggggctcaccggccctgccttgactcttgcctccagaggtccagggagggaagggggtgcgatcaggcctacccagcccctgtcccctcccctgactgcctcttgaacctccccaggaggccctgagttcctgaagacgcccctggggggcagcttcctggtgtacgagtccttcctctaccggcgggagaaggcggctggggagaaggtgtattggacctgccgggaccaggcccgcatgggctgccgcagccgcgccatcacccagggccgacgggtgactgtcatgcgtggtcactgccacccgcccgacctgggaggcctggaggccctgaggcagcgggagaaacgccccaacacggcgcagcgggggagcccaggtacctgggggtgggctgggagctgggccccaggaagcaggcaggagccccacactgcctttccctctccatgctgcggctccccctggcaaacgtcctcttcccttctttgaacatcctagaaggaactatggccctggcctcctactccttggcccccctgatgccgctttcaatgggtctcaccttcctgctcagcccagcctcccccttccagcctgacctgccccacagtagcagcagcagggatagacctccctgccctcctcttcctccgtttgtcttaagagttcatagtagtaatagagggtgttgactgcacatggtcagtctcgttgctatggtggaaggctgtcttaacgtctgagtggttaaggattgaggaggtgatatttacttacatgcagccggtttctcctctcggcccgctgttccatagacacccataatgtcctgaaacgctggcccgaggagggtcccggctgtctccatctttatccacacggtcggccccccgcagtgcctggtgttttgacttcacaaccacagttgcgtaaatgtccccatagcgtctggctgaggagccatttcatcgtggcctcctccactcacctgctcttccttcacgccccaaggcgctggcctctctttccagtggctcttccggatcctgcagcttttgggtcatgtgagttgcctcatggccctaaagttctctcggacttgagagctgtgattgtctttctctttttgttccatctccagagagacagtgctgcgaggtccccgcctcgtcctcacccccgctcctgaccccacaagtaactaagcaattgtttcttagggtcttggctgccctatttcctaaaatgtgcctccactactattaattggtttttccatttccttgtcagctactcagtgcacttcttgcacaggcttttttttttttttttttctttgagacggagtcttgctttatcacccaggctggtgtgcagtggcgtgatcttggctcactgcaacctccgcctcccgggttcaagcaattctcctgcctcagcctcctgagtagctgggattacaggcgcctgccacctc

SEQ ID NO: 15124 - DNA, 2300 bp, Homo sapien
ataatgtcctgaaacgctggcccgaggagggtcccggctgtctccatctttatccacacggtcggccccccgcagtgcctggtgttttgacttcacaaccacagttgcgtaaatgtccccatagcgtctggctgaggagccatttcatcgtggcctcctccactcacctgctcttccttcacgccccaaggcgctggcctctctttccagtggctcttccggatcctgcagcttttgggtcatgtgagttgcctcatggccctaaagttctctcggacttgagagctgtgattgtctttctctttttgttccatctccagagagacagtgctgcgaggtccccgcctcgtcctcacccccgctcctgaccccacaagtaactaagcaattgtttcttagggtcttggctgccctatttcctaaaatgtgcctccactactattaattggtttttccatttccttgtcagctactcagtgcacttcttgcacaggcttttttttttttttttttctttgagacggagtcttgctttatcacccaggctggtgtgcagtggcgtgatcttggctcactgcaacctccgcctcccgggttcaagcaattctcctgcctcagcctcctgagtagctgggattacaggcgcctgccacctcgcccagctatttttgtatatttagcagagacagagttttaccatgttggccaggctggtctcaaactcccaacctcaggtgatctgcctgcctcggcctcccaaagtgctgggattacaggcgtgagccaccatacccggccacgtttggtttcactttagcctagaaacctgctcgcggctgactggggggtgctctgtggtcccatcttcctaacacagctctgtcttctctgtggggtggcagctgctgcgtttgtttgcctgcttttgtgtgtccaggtcgaccccacctggatccgatcatccacaaccgcaggttgctggaacctcccagtgcagcctggcctgggggcagaggccgggcccagctgtccctcggggttcactgtgctgactccctgcttctgggcctgcctttctctttcttggttttctttataattttgtggtttggagaagtcctgcctcccgtcgtttcctgggccggtcccgggaggtagcacgttgaggcctttcatgtctgaaatgtctgtcgcttccctccgccggaggggcagcctggcctccgtggtgtcacaggtgcagagcctgcccttgaacgtccctgccgcttttgcgtgactgatcctctgtgtgccgtcagctttgcttgaggttttagggtctttgctccctcccagctgtacctggctgtgctgggggcctttttaggctttgggcttgtgtccttcatcgtggggtcatcctctcgtgctctttgttaacttccccatcatcatccctttctgttgctcctgttaatcagatgttgatcctcccagatgagggcgtcttttttttttttttgagacagtttcactcttgtcgcccaggctggagtgtagtggcgtggtcttggctcactgcaacctctgtctcccaggttcaagtgattttcctgtctcagccttctgagtagctgggattacaggtgcacaccaccacgcccagctaattttttgtatttttttagtagagatggggtttcaccatgttggccaggctggtcttgaactcctgacctcgtgatccgcctgcctcggcctcccaaagtgctgggattacaggcgtgagccaccgtgcgcagccccttgctggatattttcatccgtgtggaaggggataaagcgtgccccatggtcacaccaccccctcccgtggcctggcgtccccaccttcgtcctgacctcttctgtctcgtggtccccaggctcctgtgctgctgtgcccctcagggtcctcctgcctcccgagcctccctgctccacatggcccctgcccagccctctccatccctcttgaaggtagttccacagccagacaccctcccgccccccgctggcctctcctctagggcttgctacccacccccatcccctgcttccactgccacccgatgtgtccacgatgccccaggccacctccccacctctgtggcccctgagcctgcacggaggaaagggtatcctctgggcaaggcacagccacccgccaggtcctccctctcaccacatccaggacagtggacgctgctccctgcctcttcctcagagtcctggggtcacacctctacctgcgcggctctcgggggccacccctctca

SEQ ID NO: 15125 - DNA, 2300 bp, Homo sapien
tgtgcccagaggtccctgaagaatcagagaccctggaagcgacatggaggcatgaatcagcgcccagcccctggatcagaccaggcggagcttgaagcccagttccaacgcttaatagctggtgacgcccacgagtcacccagttaccacctctgcgccccatctgcagaatggggagatgagcctgtcccctctcgcagggcgtcaggagggcagacatgccgctgcttgcagagccctgagtgccaaatgctggggaagtggtggggggtgggcttcttagttctggaagtttccgtgagtgacctgagactgaagtttgccgcagggatactccaccccactccatctcagtgccccagcctcagcactgagcacccacttcctctcaccccctgccccctctggaggagacaggcctgggccaaccgaaccgggtgtcacagtgccagggacagagggacggttctttcagaccctactctctcaagggaaggggctgattcctccaccagcgtcccaagccggccccctttccgcacagagtccttaattgtccctgtcgccaccttgccccatcctcagatggctgtggctgtgggggtgaagctccccacgcaccgccattgtgcaggcctgcccctaggacatcctctgtggactggagcccgggaggacttcactgagcccccgccaagagaaaccgggcagacaggtggtcccggatgctccctcgtcgggaagcgcagttgggttccagggagcccgtgggtgctggaggccccagctcagggctcagtgagccgggccagcctggcctctgagagggctcccggaggaggcgaccaggaccctggcctagagtctcagcaagtccatctccttcaaatgcccccacctcggctccacgcccctcctccagagcacactcgcgtgaggcgccagctggaagatcctcgcgggtcccagcaccgcagtgggtgcctgggcctgacagaacctccctgaaccccatctttcttctccatcgacaccggggcagagacggtgtgggggctgcagggcggggactggtcggcctgggctcgacagcttggcgagggcctggtgcgggctgggcaggctggactgaggggcaaagaggtctgggcggggcggggccgctctgggcgcccggcccccaccagttccttcccccggcccccgcctccgccctcccacgcacctgcgctggcctccccccaagccctgggggcagcgggcgggtggcgctgggagatcagaggactcggaggagtcgggcccagggggagggggcggggaatttccccccacgcctgcctgggcctgctcccctccccctcccccgccaggtggggggcacggctgggggaattccactgcagtgtgaaggctcgggagagtctgggctgggggtcccagggaagggcggggcagggggaggaggaggggacagactgggacctggggcgcagctgcctttctccccagacaccagctgcccctgcctgtcccggactgagcgtccacgactcccgcctgtctcgtgggcgcgggggcagggagtggagcttcctccgtcaggccagcggcatctggaccaggggcgggaggggcgtgcggatccgaagaaagtgtgcgcgtgagcgcctggcaatgaatgggagagagtgcgagcgcgtgcgtgcactgggaggagggcgcttgtaactcggacattccgggtgtcctggggcgcgtgcgaccacgtgagggggttctgtatctcccattttaagggccttccgtccgcttgccccgcctgtccccctccacaccttcccacttgaaccggcaccgacctgagggagagggggccgggaagcgctggacgcccggggtcgggggaacgggcgtgggaggcgtctggacctgctgcctccgctccagtgctgggcggggcttcccggcctcccatggggggagggagagacccagggggagggacccacggagggatgcgaggcgggcaggagtcagcccgttggagacctgggcgagggagacgccgagagctaggctcagtgggagggggcgggcgtagaggctgaggcaccgcccagagctcgctgagacagagactgagaacgcccccggccagattccccccggagagacccgggtagggacagggacagagagacgcctctaggggcagaggccctgggaggcaaagacccccaggagagatttacccaccccagacggaaagcgcggctcagagtcggacgaggggagac

SEQ ID NO: 15126 - DNA, 2300 bp, Homo sapien
cgccctgcccgctgttcccaccccgctctccccaccccgcctcacgcccctctccgcagggctgcaggacgccgctgaggacccagaggcccccgagggctcggcccagacccccgcggcgcccctcgacggggccaacgtgagctgcagccccaggcctggggctccgccggccgcgattgggggtgaggcgggcgcgcgggacgggagtgagtcagggagccgccccctcgcgcccatcctcaccgcagccgtgtgcccgcagcccgggtcttctcgacggtgacggctgtctcggtgctgctgctgctgctcctggggctgctgcgtccgctgcgccgacggtgcggggcgctggggcagggcctgagggcggaccggtggtggggagctggagccccagaagggaacagagctaggaaggaactcctgggttcttaagggagcgaggctttgggtccacgcacaggatcgcgcgcgggatcgcaggtagagcaggacgctgcagcgggattggaccggctcggctgatgtctgctccctctctaggagctgtctgctggctccgggaaaagggcccccggcgctgggggcttccaggggccccaggagaagctgggctgtgtggtaccaacagccccgaggggtggccttgccctgctcccccggggacccccaggctgagggttctgccgcgggctaccggcctctgagtgcctccagccagagctccctgcgctcgctcatctccgctctctgactctgggccccgagggtccgctgggcccgccgccggcgagatggacacctgagatgctgtgctgcgccctgcctcggccttgcgcctgtgtaggggcagctcggcctctggtcgccttggggagaccaaaagtcggacaggaaacatctggtgctattatctgggacttggcctgaccgtgggggtccagatggtccaggccctctccatggacctgtatgtgggggtggtctctggtttcggaggtctttgaacccctctgggggtggtcctggactgccgtcctcagtgagaggtcacaggtcagcaaaaacagtcaaaaaacccccacagattttgaataaaggatctactttggtacgggcctcgaaagttcttccgtggtgggaggagcatgttaatgaccatacaaacgccgagggttgcgtgtgtccatgcaaatgaagggcgttgcacgcagactttggtggagctgcctggaatgcagagaaggacctagaacacagacagatgggtgggtgggtggagtcctgtagaaggcggggggtggaaggggaggaggatcgtgggcagcgttatgctgaataaggggtgccttcccggtccctgctcagggtggacggggcggaggtcgactttgctcccctggcctccaatctgtttcctgtctatcctcggtagggccccgcaagggtgctccttgtgggcgataactgggagcaagttgggccgggcccacgctccgagaagcctagcgcgaaggatagggcctctcccgacggctgcgggcgcgtgaggcacgccttcagaggcctgggtaccgtggagcgccttgctgcactcgggagtccagcctgcggaaagatcactttggagcgggggcgtaccggatgtaggccggacccgtccggcagcaccttggacagagccccgtctgcagggtagggctaggtggcaggactatgcccccgagggtgggtgcccaaaggtacggagacctgggtgtcacgcggaaagcccggatgcacagttctgagggacgcgaggtgccagggtcactctagcgcagcccgcaggacccagaacgttgggtcgcaagcccacagccaccccatgcaaatgaggctgggagcgcgcacactatgctaggaggcgaggcctgggcggcctcggggcggagcctccccgccggccacgcccattggctctcgctgcgccgacgtcaggagcccggcgcgcgaaacgctggccggccggcgggaactaggagcctgggcggagcctggcgtcccctcccgcgtccggccgcgcccgtcctcctggctgcagagagactaccggccaccgccgccgccgccgccgcgagctgtccctgcggcgcgtctgccttggcggagccgaccgcagtgcgctcaggcgtccggtgcgtccccagcctccgccccggcgcgggggcgacggactcgcgcgtgcgcagcgccggaggggcgcgggctgggaccccctagccagcgcgtgcgccgatcgagcgcagggcgat

SEQ ID NO: 15127 - DNA, 2300 bp, Homo sapien
tcttcccttccttttctttcttttttctttcttgagacagggccttgctatgttgcctagtctagaaaactattatttttatccccattttacacacgcagaaactggggcaggcaggatcgcagccctagtttccctcacaccacgcacttatctgctccatctacttatttccatttacatatatttatattacagcctttcctcacacagtgaaatttacatcggaagcatgtgtttccatgcttttttttttttttttttaattatcattgtgaatcagactttaaaaaatgggcggttggaaggggacctgttggggagatggggctggcagaggtagccctaggcagctggggaggggcctgtgtgtgccccaggcctcctgggggccagtctggagtcatcaacaaggatcctgcctgagtcactggggcacagccgccagagatgcgaaggacaaggaaaggtgcaggcaggtgggctgccgcccccagccaggatcccagcctctcctcccccacactgctgctccatgcacagaacgtttacagagggtgcaggaactgaatgggtgggaagctttgcagtccatgacctgtcagagacttggggaggatggagggtttgggggactggttctggaggccagggctagaaggagcaggtagtcaacaagtaaactcacaaacaaaagatagaacatcggacagagatcagggcaatagcaaaaataaggcggaaggagaggtgagagtgagaaggccagcgtttgggggagggttggccggaagcgtactcctcccacccagttaaacagataaagagcccctcggtgagggaaggaacaatccctagcccgacttgctccgcgagggcccctgctaatcactttaggggatcatcccagcgtcctcagctgtttttttttttccaggagaggagactaatccgaagctcagaaaggctcagtgcattcccaaggtcgttcagccaggagagcgctgaagggatctgagctgagagcaagtctcaaactcagagaatggaggagctgccccggaagtggctgctcgaggctgcagtgaactatgatcctgcggccaatcgcggtggctcacgcctgtaatcccagccttctgggaggccgaggcgggcggatcgcttgaggtcagaagttcgacactagcttggccaacatggtaaaacaccgtctctacaaaaaaatgcaaaaattagttgggtgtggtggcgcgcgcctgtggtcccagctactcaggaggctgaggtgggaggaacgcttgagcgggggaggcggaagttacagtgagtcgagatcgccccactgcactccagcctggacaacagaatgagaccctgtctaaaaataaaatacatgagccgagtgcggtggcgcgcgcctgtgatctcacatactcggcaggctgaggttgggagaaccgcctgaacctggggactgcaccactgcattccagccttggtgacagtgagaccctgtctaaaaaaaaaaaaaaaagtatctgaggcctgttggcagggaagctgcaggcaggcgaggtcaggccaagcagagtcctgcctatctggagagcttcctggaagaggcggctttttctggctcccgaagccgtgcgctaggggttgggggtcgtgcgtctggcctcccaccgcgaccctggttcagaacacggccggagtgagaaggggggtgccgggacccaggaggccgtagggacttcctggtcctacccggagtaaccctggggctacgcctgctccgagcaccgggatggcggtcccttttatggacccaaacactacgccagcccagcgagggcggtgggtgtcgggtgcgaggcctggagggcagtgggcgtcccagggactgggcggctgaagccccgcgcagcgactcagaaccaggccgccacccacgccccgggccagcgcggagaatcctgtgcgcctgcgcagtgagcggcggggcggctcggcggcgcgcacgcagcacgaggggcggagcctcggagcccgggcacccctgacgggctgcactggggagggggaggagcctcgaggccggtttggaatttttggcgcgagcagctccgcgcgcgttcacgggccgttccccctcacgggagtcctccgcccgggcgtccggaacagtcgacggcagactccggcccgctgagccacccgaggggtcccgtggcctccgcggacccggaatctgggccctcgcggacccgcgccccgcccagtcgccccaggtgagc

SEQ ID NO: 15128 - DNA, 2300 bp, Homo sapien
gtggtgtgcctgtgggtgtgagccctggggatggcttcatgtgtgggcagagcagcagtggggcacagcctacgatgtgggtgagaggggaggcagagagggagggggcacagggacctcagtgctgggctggcctatgagtgagggtacctggtggtaattaaccctgtagtctattggcggctggacctggccgcagaggtgtgggctcagtagcctctctcggagaagcccctgctgccccttcctcattatagcccttctgcagacccccagcctagctgggctgactggcttggcaggctggactccttagccagaggtaccaggaggggctggctgggccagggacaggccagcagacagacagggtgtggggccttctggaccagggtgcaggggctaggggttgagtcactgccgtccccagccagcctggtggggtctgcaggctcattggggcgtgatgcctgttgtccagacccccatgcccagtgcctccctgccaggcccccagcacagggccccggctccaagtccatccacccagccccaggcatggagagctgctcgcagccccccacgtcctctcctcagcctctcctgcggtcctgccccccaacactgtgtggtggctcccctagtctgtgacccaaagttagagtcactgctggggcaggagacgaggcagagctggaaggcctccgcggactctcagagaggctgggcacagctggcccgtcctcctgtgtccctgcccctcatggaaggaggagggaggaggaaggggtggctctgaagttgggggctctggcccactctggcaggctgagcctccatgaggacaaagggccccctggtggggtctgtgtggtctcaggactagacgggatgacacctggcttttgttgggaacaccacccgcctgtcagacagggtctgagatgctgtcacccccacccctgctgtctgcaacactccaaagccctggttcccgccctctccccagctgtgtttgggctgggcctagggtgcctgcctgccccttgctggggggacatctgagccctctgggcctggcgccagggcctgagtcgctgacaggggcggagaagtctagggggcctgtcctgctgtcagcgcccatgatggatgaggggccagagctagactcctgccacagggggaggtgggggtgaccccccagggtctgcaggcagagcctctgcctctcacagctggggggcctgggcgagggtccccacccagccaggggtgtttaaaggcccaaagggcgtgggccctcccactctgcctagagtcatgggcgcctgggccttccccgcagcccttttccttctctgcctgacttccgagagcctgcaaggtggtgagggcagcttggggctgggggttggagaatgggcatctgtgactggggctgggggtccaagtggggccctggccagatgctggggttctggagacaaggagggctggggtgtggaaagcctggtctgggcagagaattcagacagtgagggtttttgggggctggaggatagatgcctgggcgctgccccatctcagcctctggggtccccagccttgagtcagcactgtcttgcttccgcagggctgccccttctgcctcctggcctggggaaaggtaggtgggccctctggcactggggtcaggaagagtctcccatctctcctgccctgggggtgtgggagctctctgggactcccgatgcggggcccaggagagctcagggcccttgctgtcttccgggcagggagtctcatcaagtgtccactcaagggtggggagcacagacaccctgcactctcagaagagtctcccggggcagaacatgcagccctgaggacgggcctgggcaggctgagaagggtgggcaggtgtgacaggaggggcggacccaccggcaggccaaagggggccggagggggagaggagggaggggacaaggagaactgagcctgctgaggggcaggaggtggagtgtcatggaagagtctttacttcagggacctggggggtcctaagggtagaaggaggggctgcccctgagccctgatgcatctgagcttcaggagagaaagatggggggcagaggtggtgagaagaagaggaggagatttccatgaagggagaggagcccagtactgagaatggatgggagaggagaggaagagggtggagtgggctctgccccacagtcccccagagccctggctcagacaccttcctccaggcccaggggccctctagcctc

SEQ ID NO: 15129 - DNA, 2300 bp, Homo sapien
cgcccatgatggatgaggggccagagctagactcctgccacagggggaggtgggggtgaccccccagggtctgcaggcagagcctctgcctctcacagctggggggcctgggcgagggtccccacccagccaggggtgtttaaaggcccaaagggcgtgggccctcccactctgcctagagtcatgggcgcctgggccttccccgcagcccttttccttctctgcctgacttccgagagcctgcaaggtggtgagggcagcttggggctgggggttggagaatgggcatctgtgactggggctgggggtccaagtggggccctggccagatgctggggttctggagacaaggagggctggggtgtggaaagcctggtctgggcagagaattcagacagtgagggtttttgggggctggaggatagatgcctgggcgctgccccatctcagcctctggggtccccagccttgagtcagcactgtcttgcttccgcagggctgccccttctgcctcctggcctggggaaaggtaggtgggccctctggcactggggtcaggaagagtctcccatctctcctgccctgggggtgtgggagctctctgggactcccgatgcggggcccaggagagctcagggcccttgctgtcttccgggcagggagtctcatcaagtgtccactcaagggtggggagcacagacaccctgcactctcagaagagtctcccggggcagaacatgcagccctgaggacgggcctgggcaggctgagaagggtgggcaggtgtgacaggaggggcggacccaccggcaggccaaagggggccggagggggagaggagggaggggacaaggagaactgagcctgctgaggggcaggaggtggagtgtcatggaagagtctttacttcagggacctggggggtcctaagggtagaaggaggggctgcccctgagccctgatgcatctgagcttcaggagagaaagatggggggcagaggtggtgagaagaagaggaggagatttccatgaagggagaggagcccagtactgagaatggatgggagaggagaggaagagggtggagtgggctctgccccacagtcccccagagccctggctcagacaccttcctccaggcccaggggccctctagcctccactgccctagccccagactgctcacctcctctgccctctaccctcctgtgacagcagggaaactgagacctggaaagggaggtggcatccagatttgggcccctttgtccccttgtaagttcccctgcttccccctgaaccccacaggcttagggagcccaaatggctacagatctggtaaagctggtggcggggtgcttggggagggtggcacaccggctcccagctgctccagcaccccgggctcaacatctcacttctcccacagtctatggcccccacagtggcctgggagcaggtgaggcctggcatagggaagggaggcgtctgagggcagggcacggggcaggggggaggcaggacaggaacagggaaagctgggcggggggcaggtaaagggggaagcagtcgtctcagaaatacatggggacagagcatagccccagagtgtcccccaggcaccctggctggggagaggggaaggcaggcaggaagaaatggagcggggagggaagaaaggaaagagagcagaaaggaaggagagagggaaggagggagggaaggaggctgatagcacccacctgtgccccacagccctcccccatcatgggaagggactgagttcccacaggcccactgcttggataggctgtgggccaggtgtggggctctggggagatcctgggggaggggtgtccctcacctccctgtctctccaggctatgatgggggcgtgaagccacagaagccaggtgagccctgccccggccccagctctttgtctccccctctttctctcacactcctcacctcacctcatctgtctctccaggattcgtggtcaggcatgggctgggaacccagccaggtgagagccgtggggtcccctccttccctccctcccaggcctcagacggaagaggcaggattggagagattgttggggggaggcgcagagagcctctcaggtttgctggtgtctggcttagtccaagggggggttcaagggtcttgtacccccacctcagctgggaccccaaacctcctcagctcacctctctctctcccacgagcccttccactaagaatggctatggagcaggtagagatgggagtgggggagctggaagccaggattc

SEQ ID NO: 15130 - DNA, 2300 bp, Homo sapien
ccaaccctgtgaaatctgagccccaggggctgggtgagctggacaaacctgccacaagattccctgagtccactgatggccattttccagcctctgtatcacccccccatcttccagactctgtggggccaccaggtcagcccccctcgtaccggaggagcccccctcagtggagaggcccagggggtggtgaagaggaggccaggcttctgtttaccttacagaccagctgattggcgctggcctgtctctgtgtttgcaggggaggatcttaagctgttttgggtcaaggcccctttgcaaatctgaaggaaagtataaatctctcttccaaaagtatcattttttttaagagacagggtctcacctaggatggagtgcggtggcataatcatagctcactgcagactctaactcctaggctcaagagatcctcctacctcagcctcccgagtagctgggactacagacaggaaccacctaactcagctaatttttgtgtatatatatatatatatattttttttttattttagaaatggggtctcactgtgttgcccaggtgggtctcaagctcctggccttaagcaatcctcccaccttggcctcttaagcgctgggattacaggcgtgagcctcagtgcccggacccaaaagatgctaaaaccctttcgcagaagcgatgctcatacccctaggtttgaaccctgaccgctccttgaggttagagccctttatacacaatgtcccacccactaggtgaggggcactgagcaggggtgtgcctggccactggctccccgaaggcaatgccgtgaagtggtgcagccaccagatgtgtgtggtgggcacctccagccctgcccgcactggccagtgggctccagcacaccccagccctcccagcaccaggcaggtgagaggcagtcccaggtgagggcccactctgaggatcctctgtacctccctggaaagtgtatgaatggagacaatgttcctcacatcccttttcctttttttttttttttttttttgagacagagtctcccactgtcacccaggctggaatgcagtggtgcgatctcggctcactgcaacctctgcctccggttcaagcgattcttctgcctcagcctcccaagtagctgggattacaggcacccgccaccacgcccagctaattttttttttttttttttttgaggagtctctctctgtcgccaggctggagtggagtggagtggtacgatcttggctcactgcaacctctacctcccggtttcaagtgattctcttgcctcagcctccagagtggcgagtggctgggactagaggcttgtgccaccacgcccagctaatttttgtatttttagtagagacggggtttcaccatgttggccaggatggtctcgatctcttaaccttccgatttacctgcttcggcctcccaaagtgctgggatatctaattttttgtatttttagtagagacggggtttcaccatgttggccaggctggtctcgaactcctgacctcgtgaatcgcccaccttggcctcccaaagtgttgggattacaggcgtgagccaccgcacctggccgtcacacccctttttcagacaacaatcctcagaggttcttagcacccaggcaggggcttgaaggagttcatgaaccctcccccacaaatgaggggcacatgtttgtgggtgcatgttctgtgagtcccacggggtttctcaagtgggtctttgaccaaaggaggttaaggacctcgaccttccatgacctgtcccaggtaggggtcaggatttgagctttggtcagtgggactcccaggctgtccccatgagtggaatcacaggctctgagggggtttttccggaggtaaggctttcctgcaaactggaaggcaggtcttggggacacttgagtccctggacttaacccccgtgcccacctctggggtgttttggcccgggaggcctgactggccactcactcacccacccatggaacataaccgggtcctgggctgtgccccaccctgggttccagccccagcccgtcccgcctccatcccccttcctgagtgccccccaacctccacaacaggcccctcatcctctggcctctggagatcttaggcagctcagctcagcctcggtttcagcagcaggggtggcaagagcgcacctgagctgaggttgaagtggggggtagttttctaggccgttgccagggcgatgccacctgagctgggcgccaggcacctgtcgtctggggaacagtgcaggcggg

SEQ ID NO: 15131 - DNA, 2300 bp, Homo sapien
ccgccttgaggtccgcttcgggacgccccgccccgcggcgcccgctcagttcagtcattcattcaacaaagtcctggcgcgggagctgccaggaccccgcagggacgcagacccccttccttgcccagccggtgatctagtccagcgtgcgtggtgtggggaaatcaaaaattagacacgagtgctcgcttcggcagcacatatagaaatcagacacgaacggccggacgcggtggctcacgcctttaatcccatcagtttgggagtctgaggcaggcggattacgaggtcaggagttcgagagcagcctgaccaacgtggtgaaacgccgtctctactcgaaatacaaaaattagccgggcgtggtggcgcgcgcctgcaatccgagctactcaggaggctgaggcaggagaatctcttgaacccgggaggcagaagttgcagtgagccgagatcgcgccactacactccagcctgggcgacagagtgagagtccgtctcaaataaataaataaataaataaataaataaataaacaaacaaacaaacaataaaaagaaatcagacacacgaccaatccatgcagagatcactgcagcttccttccccccacctccccttgagattgcgtctcactcttgctcagcctggagtgcagtggtacgatcacggctctctgggctcaggtgagcctcccacctcagcctcccaagtagctgggaccacaggccctgccccaccacgtccggctaatttttgtattttttgtagagaccagggtcttactatgttgcccaggttagcctggccactacagctttgttaagggcccggggggtataacaattaaacctgaggtcaggagctcgagaccagcctggccaacttggtgaacccccgtctttactaaaaataaaaaaaagaaagaagttagccgggcgtggtagtgggcgcctgtaatctcagctactcgggagactgaggcaggagaatttctggaacctgggagacggaggttgcagtcagtcgagatagcgccattgcactccagactgggcgacagagagggcctccatctcaaaaaacaaaacaggccgggcgcggtggctcacgcctgtaatcccagcacattgggaggccgaggcgggcagatcacgaggtcaggaaatcgaggccatcctggctaacacggtgaaaccccgtctctactaaaaatacaaaaaaattagtcgggggtggtggcgggcacctgtagtagtcccagctactctggaggctgaggcaggtgaatggcgtgaacccggaaggcagagcttgcagtgagccaagatcgcgccaccacactccagccttggcgagagagcgagactccatctcaaaaacaaacaacaacaacaacaaaaaaccagcaacataaaaataatattatctggccgggcgcggtggcttaagccggtaatcccagcgcagtgcgaggccaaggcgggcggatcgcttgagtccgggagttcgagacgcctgggcaatataacaagaccctgtctatacaaaacaaaacataaattagctgggcacggtggcgtgtgctgcctgtagtcccagctactcaggaggctgaggcgggaggatcgcttgagcccagaaggtcgagactgcagtgagccgtgatcgcaccactgcactccagcctgggtgacacagtgaaaatatttctctaaaataataccaatagtatgccctttaatttgtaccttaggacgtagttacataataaaatgcagacttgttatctccattttgcagagtaggaaacgaaggctcgggaaggttaggtgagttccccatgtcaccgcgctgcttaagtggtgaagcggagtctcaagctctgttctaccctaagcctggcgccctcaccctgggtgagtctggacgtctgccagcccgaggcgggcccagcgaccccagcctccagcgcccccctctgacaagcctgggattcgcacgcccgctgccgtcagggacagggtctctgcccctcctccggggcggtggtccagtgacgtcaccgcttctttaagacccccgcctccgcccctgtcccgacactcggcctaggaatttcccttatctccttcgcaggtgagtccggggctagtgtgcgtgttggagagacgcctcttggggccgggtgcagggtggtggcggcgtgggtaggggtgcgtgcgaactcgggctgcggccacctggatgggcgagtccctgagggggtcggccggtccgcgcccaagcctccgaggtga

SEQ ID NO: 15132 - DNA, 2300 bp, Homo sapien
gccccggaggaggggcagagaccctgtccctgacggcagcgggcgtgcgaatcccaggcttgtcagaggggggcgctggaggctggggtcgctgggcccgcctcgggctggcagacgtccagactcacccagggtgagggcgccaggcttagggtagaacagagcttgagactccgcttcaccacttaagcagcgcggtgacatggggaactcacctaaccttcccgagccttcgtttcctactctgcaaaatggagataacaagtctgcattttattatgtaactacgtcctaaggtacaaattaaagggcatactattggtattattttagagaaatattttcactgtgtcacccaggctggagtgcagtggtgcgatcacggctcactgcagtctcgaccttctgggctcaagcgatcctcccgcctcagcctcctgagtagctgggactacaggcagcacacgccaccgtgcccagctaatttatgttttgttttgtatagacagggtcttgttatattgcccaggcgtctcgaactcccggactcaagcgatccgcccgccttggcctcgcactgcgctgggattaccggcttaagccaccgcgcccggccagataatattatttttatgttgctggttttttgttgttgttgttgtttgtttttgagatggagtctcgctctctcgccaaggctggagtgtggtggcgcgatcttggctcactgcaagctctgccttccgggttcacgccattcacctgcctcagcctccagagtagctgggactactacaggtgcccgccaccacccccgactaatttttttgtatttttagtagagacggggtttcaccgtgttagccaggatggcctcgatttcctgacctcgtgatctgcccgcctcggcctcccaatgtgctgggattacaggcgtgagccaccgcgcccggcctgttttgttttttgagatggaggccctctctgtcgcccagtctggagtgcaatggcgctatctcgactgactgcaacctccgtctcccaggttccagaaattctcctgcctcagtctcccgagtagctgagattacaggcgcccactaccacgcccggctaacttctttcttttttttatttttagtaaagacgggggttcaccaagttggccaggctggtctcgagctcctgacctcaggtttaattgttataccccccgggcccttaacaaagctgtagtggccaggctaacctgggcaacatagtaagaccctggtctctacaaaaaatacaaaaattagccggacgtggtggggcagggcctgtggtcccagctacttgggaggctgaggtgggaggctcacctgagcccagagagccgtgatcgtaccactgcactccaggctgagcaagagtgagacgcaatctcaaggggaggtggggggaaggaagctgcagtgatctctgcatggattggtcgtgtgtctgatttctttttattgtttgtttgtttgtttatttatttatttatttatttatttatttatttgagacggactctcactctgtcgcccaggctggagtgtagtggcgcgatctcggctcactgcaacttctgcctcccgggttcaagagattctcctgcctcagcctcctgagtagctcggattgcaggcgcgcgccaccacgcccggctaatttttgtatttcgagtagagacggcgtttcaccacgttggtcaggctgctctcgaactcctgacctcgtaatccgcctgcctcagactcccaaactgatgggattaaaggcgtgagccaccgcgtccggccgttcgtgtctgatttctatatgtgctgccgaagcgagcactcgtgtctaatttttgatttccccacaccacgcacgctggactagatcaccggctgggcaaggaagggggtctgcgtccctgcggggtcctggcagctcccgcgccaggactttgttgaatgaatgactgaactgagcgggcgccgcggggcggggcgtcccgaagcggacctcaaggcgggcggaggcgagagctccgccccggaaggcgggggcgggggcggggcggcggccgtgggtccctgccggccggcggcgggcgcagacagcggcgggcgcaggacgtgcactatggctcggggctcgctgcgccggttgctgcggctcctcgtgctggggctctggctggcgttgctgcgctccgtggccggggagcaagcgccaggtacgcgggactccggggtcggggaaccccgggccggggctcgggagcc

SEQ ID NO: 15133 - DNA, 2300 bp, Homo sapien
gggtggggggcggtgaatcacctctgaggcctgggcccagggttcaggggaaccttccaaggtgtctggttgccctgcctctggctccagaacagaaagggagcctcacgctggctcacacaaaacagctgacactgactaaggaactgcagcatttgcacaggggaggggggtgccctccttcctagaggccctgggggccaggctgacttggggggcagacttgacactaggccccactcactcagatgtcctgaaattccaccacgggggtcaccctggggggttagggacctatttttaacactagggggctggcccactaggagggctggccctaagatacagacccccccaactccccaaagcggggaggagatatttattttggggagagtttggaggggagggagaatttattaataaaagaatctttaactttaaatggtttggagaggcagtgatccccgactgactcccctgagctggagggagggagtgagtcagccagccgcgggggcgggggtgaggctctgactcacacattctcaatgcctggaactcagccggcaaggacctggctggccctaacagttttccagggaagatcttgaggagaaaccccagcatcccgcgcctctgccctctccaccatccccaaaagccccaggttccagactgaagccttcctttgctcagcaatctttattcagttcttcttgggggtgggatgcctcccttcccatgctcccacccctcccatcccagaactccgttgggctcagtgtcctctgttgagggaaggtcttggtgcccagatgcctactctgcaggagagggaggaaccttgtccctttgcgggagtcgctggtctcttctgttgtggggaagaaggaaggtgggaggggcactgtccaccagcactcagagctccattatgtccccagctggggttgcagggtaggggggactgggggtgtcccccagcctcagcagacggagggcctcagggatgaggctgccaggatagcgccagagaagcagctcagagcaagggctcctagaagaggaaatgactgtcagggcatggagctgaggctggcctagctgagcacctcccaccaggtccaggtccccaggggctcctgggttcccagcactttccaaagagccaagatgggaaacaacccagaggtcagctagagctaaaaatggcacgatgaggcagggcctgaggtcagctgtgaggaccgcctgtgattctgcagaaggcctggccagtggaggaacctacctgagtgggggcagggctggggagaaggtcatgggggggctgcagtaggggtggtcattgtgcaggctgagttgagagaagtgggtggccatgttctcctcagacagaaactgcttgcgcagaggctccctggggagagatggcagagaggcaggctgggatactgacacaggaggcagcctgttggggaccagaggtgacagagatcttgttgggagtccctccctgcccccaaactcactgctcctcctccaggcgccgcttggtgctcatgggcacagctcctcggagaggggagctgggaaaaaaagagagcctggtgcaccccaccctcttggccccttcccaaggatctgcccgcctaagcctgcagcatcagccaggagccccaagcccattcctgtctcagctggtgccggtccccgctctcctggaccatccagcagggtacctcggaagtctcgaccctcagccgcagccccagtcccatctcagctcacgcctaagccccgccgattcgccccaccccgtattcatcctgcagaccagtcctgagcacccagccaaagctcctgcggcccttggtcaggcccaccctggtcccctacacgcacctggcgtccaggccccaagtcacccccaaggcggcccgcgggaggcgctgggcccctccctgggggcctcgctgcaagggctgctgcaggatcattgggttttggggtcctgcgggtgggatctgggcgacaggggaggagtctctgagggcgtggccaagagaggatgggcgtggctttaggcgggcacagccgcgaggttctgcgcgggcgcggaagacgggcggcgcgtggcggaaggcaggcttgctcctcggggtgggggagggtatccggcttaagggggctgcggtggacaccacttcttaatgtcgggggtcttcgcggcgctcacctcggctcctagggttcgggacggtacgcaccagccaccttcgcgccgaaggcggtag

SEQ ID NO: 15134 - DNA, 2300 bp, Homo sapien
ctcaggcacttccaggctggtcctggggaaggaaaggcaaggtcagtgaggaagtggcttcaccctgatgcaccctctatccacgtggccctgctcacctgtatggaggctgacgacgccacagctccttacagcccttcaaaagagaaaataccaggtgacctcaaaggctctctctgggtccaggcaccccagccctttcccaagctcgactccttaccttcttgagcatctccgcccaaagccaggccttcacctccccatccccagcactaagcagatgtcgatcggtggaaaccatgctatagacgggcccatcatgggctaaagagaaatgcagaactgagtgagccaatcccacccaaagtcctgaagccagactccacaggtatacccaccttggaaagtcaccaccggcttcttactttcctctttggcttctgagctcaaagcagaggacaagctgcagggacagcggaggggacccaggagtcagaaacgggggcatccgtcccatgagggccaagtgccagggctaatgggtggacagcggcagagggtacctgaagatggcaatctgcccgtaattgttgccagccgccagaaacttcccacatggtgagacgctctgggagaagatggtcatatggagccgctgcaaggcctggaacacctctgtctgcagggaaagactggatgaggcctgcctgggacgtatgaaacctcccatccacagattcctccctgcttcccccaaaacctgccaggcctcccactgtcctgacttctcagccttcttttgaggcggccccgccccaagccagcacctgcccatgcagtcccatgggtggctccaagaagacactgaagaaggggagagttgaggtgatgcctcagggacctctgagcaagcacccaggcctctcctgccagcttcctcaactgacaaatggagctcacagaagattccatcacaattagatgagctagtgtatagacaagagctttacatggggctgtcactcagtgcttaagccgggtgtggtggttcatgcctgtaatccagcgctctgggaggccaggagtttgagagcagcctgggcaacatagtgagactctgtctcaaaaaaaatttaaaaatgtggggccgggcgcagtggctcacgcctgtaatcccagcactttggcaggccaaggcaggtggaccacctgaggtcaggagttcaagaccagcctgaccaacatggagaaaccctgtctctgctaaaaatgcaaaattagctgggagtggtggcgcatgcctgtaatctcagctactcaggaggctgaggcaggagaattgcttgaatctgggaggcggaggttgcggtgaacccagatggagccactgcactccagcttgggcaacaagagtgaaattccatctcaaaaaaaaaaaaaaaaaaaaaatttggccgggcgtggtggctcacacctgtaatcctagcactttgagaagccaaggcaggcagattacctgaggtcaggagttcgagaccagcctggtcaacatggtgaaaccctgtctctactaaaaacacgaaaattagctgggcatggtggcacacgcctatagtcccagctacttggagggctgaggcaggagaatcgcttgaacctgggaggcggaggttgcagtgagctgagatcgcgccactgcactctagcctaggtgacagagtgagactctgtctcaaaaaaaaaaaaaaagtgctttgcaagaactagaaaattaaaaaaaaaaaaaaagtacctctactaccccaacatagaaaaacgtactgatttataattcctactctctgacttgcgttaagcccctgaagcacttctgggttactatcccgcccccctggtcagagtctgagtcccacaaatagcccaggcaaaacagggctcagggcacgattccctgcccgccccgtcccagccatgcgtgaactacaaaccccagaaggcaacgcgcaccacgtccgtctcacctgacccagaggcaccgcgagcggcacagctcgctccatctccagaactacaagtcccagagtgctccgcgcgcgacgcaacctcacgaggccttacgtgcctagagcggttcctctccgtggcgccctaccgccttcggcgcgaaggtggctggtgcgtaccgtcccgaaccctaggagccgaggtgagcgccgcgaagacccccgacattaagaagtggtgtccaccgcagcccccttaagccggataccctcccccaccccgaggagcaagcctgc

SEQ ID NO: 15135 - DNA, 2300 bp, Homo sapien
acctggaggcccagatccgaggcctgcgtgaggaggtggagaagggtgagggcagactgcagaccacccacgaggagttgctgctgctgaggcgggagcggcgggagcacagcctggaggtgacctgcagggctgggggactacaactgcctggacccttagcaatggcttcagggctttctgggagatgaggccggagctggatcactgggaggcccagaggctggcccacaagagcatgggcattagcccatgggcaaatgggagccacggaaggctgttgagcaggtgaggcatgctcttagagtgcatcagagcctggcagctggaagagcagggagggggctggtgccagagctcaggccaggaatgacagcccctagaccacggctgcgcaatggagacggagaaaaagaaatgaaaagaggatgcggtgtctgatgttagagatcaaaggagtctgcactttggggtcagcttgccttccttcgcatcccggtgccccttcttacttactactgtgggacaagcagcctcagtagcaccaataaatgctgcatgaaacaattactgaatgaggaggtagactgggcaggggaggagatggggctcttcgaggtgcggccctgctctataggcgaggaaactgtatatatccgctgagggaggtgcacggcccaaggcgcccagcgatccaggaacgggaacagcctgggccgctggggtgcggggctctccgcggcacccccgtgtggacctgccgcgggatgtcggcgttgcgtgcgtcccgctgaccgcccgcgcttccgtctgcgggaccgtccacagctggaacgcgcacggtcagaggctggggaggcgctgagtgcgctgcggaggctgcagcggcgcgtctccgagctggaggaggagtcacgcctccaggacgccgacgtgtcggctgcctcgttgcagtcagaactggcccacagcctcgacgacggcgaccagggccagggcgccgacgcacccggagacaccccggtgagctcgtggggccccagcccccttacctgtgccatcgagagggttgcaggctccgcctttcctcctttccccaataaactccacaccactaacccatttctttggcccacagaccacccggtccccaaagacccgaaaggcgtccagcccccagccttcacccccggaagagatcttagagccccccaagaagcgaacatccctcagtccagcggagatactggaggagaaggaggtggaagtggccaagctgcaagatgaggtggggcagagggcacggtgctggatgcacggcccctccagctgtcagtttctgtctcccatgtccacctcccagcctttgcccactaagctccctatacctggatcggctttcatctcaacaaacttacttcaagagccagcctgtatgccacctcctccaggaagacttcctggacagcacctctgcccttagttccactcccaatgcttctccctgcatccctcctgcagggttataccactccaactaaccctgctccaccccaccccgcaccagcctgaggggctcagagggctcatatcggagtctccagcacagggccacggctgcctggggtgtctgtcgcaggcagaggaggggtggggagagccagagtcggggctgctgggagaagcagggaggcccattggcccatctgccgcacggcccccctcctctgctcacagatctcgctgcagcaggcagagctgcagtccctgcgggaagagctgcagaggcagaaggagctgcgggcgcaggaagaccctggggaggccctgcacagtgccctctcagaccgggacgaggccgtgaacaagtaagcctcaagccattgaccaccgccccagcgccctctgggccctcctgggctcctgattcctcttctgatacgggttataatgatccccactcccacccaggggccccctgacctccttgatctaggtgtttgcagccctcctcccgcccgggtacagaagtcccccgccaccccggctccctgaggccctagcgccctcaaacgcgtcttctgctcctgcccgcctagggccctggagctgtccctgcagctcaaccgcgtctcgctggagcgagactccctgtctcgggagctgctgcgcgccatccgccagaaggtggcgctcacgcaggagctggaggcctggcaggtgaggggcggggcccgtgtgcggggcggggcaaggggcgggaccggcgctgagccgaccacggcctcccgcaggacgac

SEQ ID NO: 15136 - DNA, 2300 bp, Homo sapien
ctcccagaaagccctgaagccattgctaagggtccaggcagttgtagtcccccagccctgcaggtcacctccaggctgtgctcccgccgctcccgcctcagcagcagcaactcctcgtgggtggtctgcagtctgccctcacccttctccacctcctcacgcaggcctcggatctgggcctccaggtcctgccggcggctctgcagcatctggttctggggaaaggcctgagagctggggacaggggcagcccctcccagccctcagcccggcttttttggctcagataatcccccagccccagctgacactcacttccccctgcagactctccagccgcgtcctcagctctgctccagccagtgcctgagcctggcactgtccccgaagggcgtccagttccctctgaagttcctgctcagtctgggaggcctggggaggtggaaagagggacagaggagcctcagcaccaagcccaatgcacctactccccgctggggacccaggcatcctccccaaccttgtccagggccctggggtcagggccatcccacctgagccagctgctggctgagccggaggttctgctcgctgagctcgctgagggcccgtgcccgttctcgcccactgtcctgctgctctgagcgctgctccccaagctgggcccgcagggcctccacgtccccctccagctccacggcccgggcctcccactcggctcctcgggctgccaggcctcgccggagctcatggttctcctgctggagccgctgtgggggccagggcagagggacagaggcagagaggcaccgatgagactgggcaggcacagagagatggcgatggagggacagacacctagggagaaagcctaagggggccttgtgtccaagacagacacaaaagcaagggagagtgagggaggaagcgtgagcaagacccagagatttagagggaaggttccgagcagacaggacgcgtgggcccggggcaagggttggggtggggggatctctgatgaccactcacctccagctgctgccggggcttctggacctgaggtcgcaagcgccgtttttggcgcctgagtctggcagagttcaagccccggcccatggcagcacacacctgctgtgtcccaggggctctggaggcctggactctgcccagccccctccccagctcctcctagccagttccctctaattaaccctggtcagccccgccctggcccaaaaacctgtctgaccagcgggggaatgccctggcacacccagatgcccagcgtggggaggcagatgaatcgggggttaacctctggcccactctctctaggccctcaaagcgggatgggcctggatgaaggtgacaattgccacagctgctgcagcgactcgcaggtaccctgcattagggctctatctgcattgcttcatttcatccactagagggagaatcactaacgtcctgggtttacagatggaacaagctcaagagttgctaagtgccttgcctaaggacacacagtcatttattgttgtttttattttttatttatttatttattttgagacagatctttactctttggcccaggctagagcgcagtggcactatctcagctcacggcaatgtccgcctcccaagttcaagagattctcctgcctcagcctcccaagtagctaagattactggcgtgcgccaccctgcccggcaaatttttttgttttcttaggagagacggggtttcaccatgttggccaggctggtcctgaactcctggccttaagcgatccaccctcctcggcctcccaaagtgctgggattacaggcatgagacaccgtgcccagccgacacacaataacttcacaaagcagggatgccaactcaggcagcagaactcttaaccgaatactgcagaggcaacacagcttcaggattaagctgtcaggttcaaggtcagattgtcctggctgatgctcggctctgctgatgccttgtggcctggacacaatatctctaagtctatccacccacactgctatcaatcctcccacatttcctgagctccacttgttctggggtctgctgtcagtggcacgtgagaccaccaagttcactgcttcaagcagcttagagtccagagggcatggacacatgccggagccaggtagtttcagggagacagtaagggctgtaaagagacccgggaaatgatagagagtaaggagtggggtgggggtggagggtccttcaaggaggacgtcatgtttgagtcgacttctgcaggacaagaaga

SEQ ID NO: 15137 - DNA, 2300 bp, Homo sapien
acagccgggcgaggggggcactttggaacaggtcagagctgggcccagtccccctggcagtgttgcccagtggcaaagaacatgaactctgggtgccgggcacagtacctcacacctgtaatcccagcactttgggaggccaaggcaggaagatcactagcccagtgttggagaacagcctgggcaacgtagtgagactctgtctctacaaaaaataagaaaattagctggatgtggtggtggcacctgtagtctcagctactcaggaggccgaggcagggggatcaattgagcccaggaattttagagtttgaggctgcagtaagctatgattctatgatccactgcactacagcttgagcaacagagtgagatcctgaaaaaaaaaaaaggaaggaaggaaggaaggggaaggaaggaaggaaggaaggaaggaaggaaggagagagaaagaaaagaaaaaaaggaaaggaaaggaaaggaaaaaaggcatgaactctgaggattaagacctggattcaggccaggcatggtggctcacacctgtaatcccagcactttgggaggctgaggtggctggatcacttgaggtcgggacttcaagaccagcctggccaacatggtgaaaccccgtctctactaaaaatacaaaaaaaattagccaggcatgatggggtgtgcctgtagtcccagctaattgggagactgaggcaggagaatcacttgaacctgggaggcagaggttgctatgagccaagatcatgccactgcactccagcctgggtgacagagcgagactgcatctcaaaaaacaaaaacaaactgggttcagaccctcgtccagctgtgtgaccctgggtcagctgctggccctctctggatcttgggtccagctcctcagcagtatagcggaacaccaggcgacagtcatgggtgtccactccttgcctggcactgggctgagtgctttccatgactctccattgattcttgcccagcccaatgaggtaggaacagttccctctgcccaggttctatttttggcccacttcttgctctggggctcacatctggtctcctgaacaccctcctttatctgctgcgtcggccccaaccactgccctgagcctgacctgggtagctaaccctctccaccaggccacctagtgggcatctcaacacaagtggcacttgattccacgcactcgattccatgcccccatcacctgctgtccccatcctcgccttcccaaccttgaggaccagagcctgtgcacctccttggactctttctctattttttttttctttttttggagacagggtctccctctgtcacccaggctatagtgtgcagtggtgcaatcatagctcactggaacctcaacttcacgagctcaagcaatcctcccatctcagcctcctgagtagttgggactacaggcacacatgcaccaccatacctggctaatttttgcattttttgtagagatgaggtctcaccatgttgcccaggctggtctcaaactcctgggctcaaccaaactgcctgcctcagcctcccaaagtgttgggattacaggtgtgagtcaatgcgctcagccaacctttcttgagtgaacaaattccccccaatatccgcaagcccttttgattcttctaaactccaaccacccactggtcggctctgcagcctccaagctgatcacagatcacagcctccatcccttctgccacagacactccagccaccttctcctgagtccccagcttccactcttttattattgttgttatttacatggagtctcgctctgtcgcccaggctggagtgcagtggtgcgatcttggctcactgcagcctctgcttcctgggttcaagtgattctctcacctcagcctcccaagtagctgggattccaggtgtgcgccaccaagcccagctaatttttgtatttttagtagagacggggtttcaccatattggccaggctggtcttgaactcctgacctcaggcgatccacttgcctcagcctcccaaagtgctgggattataggtgtgagccaccgtgcccagcccccagcttccacctttgacccctggagcccgttctctaagggacagcccaggactttcaaaaactgcaaatcagatcatttcactcctcaaccagaatctccccctcacacttagaatgaaaccaaaacccttccccagggcctaaaagtcccagagaactgggctcctccccgacctcatcacagcagcaccacccctttctcccctcctccaagaagg

SEQ ID NO: 15138 - DNA, 2300 bp, Homo sapien
tgggagcctgaggcaggagaaatggttgagcctaggagttcaagaaagccctgagcaacacagggaggccccgtctctaccaaaagaaaagaaaaagaaaaaaaaaaaagaaagaaagaaaaaacatgggcatggtggcttgggccagttgtcccagctacttgacaggctgagacaggaggattgcttgagcctaggagttccaggctgcggtgagctatgatcatgctactgctgcactccagcctgggagacagagcgagaccctggctcaaaacaaacaaacaaacaaaaaaaccaaaaccaaccaaacaaacaaaaaaaacaaaccagagagagaagaagaatttgtatgttaaagccctaacccccagtacctcagaatgtgattatagttagagatagagctgataaaaaagtgactaacttaaaatgaggcttttagggtggccccgatgattgacttcttacaagaggtcaatgaccaggcgcggtggctcacgcctgtaatcccagaactttgggaggccgaggccggcagatcacgaggtcaggagatggagaccatcctggctaacacggtgaaaccccgtctctactaaaatacaaaaaaattagccgggcgtggtggcgggcgcctgtagtcccagctactcgggaggctgaggcaggagaatggcgtgaaccagggaggcggagtttgcagtgagccgagatcgcgccactgcactccagcctgggcgacagagcgagactccgtctcaaaaaaagcaaaacaaaacaaaacaaaacaaaacaaaagaggacgatacttctggggtgtgcaagcgcagggggacggccgtgtggggaaacagcaagaggacgcccatctgcctgcccaggaggaggcatccggagaaactagcccctcaggcaccttgatcttggccttccagtttccagaactgtgagaacgtaaacttctggttgagcctcccagtccttggtgttttgttctggcggccccagcgagcgggcgcgggatcgcagtgtttgcctttgcatctccagctccgcatcctgctcgctgtttattttgtgagcagctccggcggctgcccctgaactgctccgagactgagcagtttaactcacactcgcccacccgccctccccaggaagcctcccgcccgcttcctccagttccttccccacctgtccggcctcctagcccggtgctctcggcgcgggaggaggcggctcgcagacccccaggtctcggcttcccggatctcccccgcctactcactccccggtccccggctcccggcactggcaggcgctgtggcttccgcgcagtggctgcagcatttaaatgtccggcacttagggagaggggtgcagtcgcggagcagccgctgctcccggcatctagaggggcccaaacccccgcgtgcccaggccgagccccgcgcgcagcccacgtgggctgagggactgagtattggccctcgggcagctgcaaccgcgcacagctggagctggcggggcggagggcgggccgggaccccgcggggaaggaggcttccttcccagcctcctgctgcccggaaatccccccggctctcagacaacctgccccacggggtcctggggggaaggagaggggcgggatacagggatggggagggctggctgagccgaaggcccgggccgccctcccccaggccgcgcggcttcgagaaagcagaagcgagccctgccccggggagtcccacaggagcggggatctgggaagagaaacttgcggacgagggagttagagccgtggacccccggcccccgcccgggcgtcctgcgtcggaggagggtctctgggtcgggcaggggccacctcttggcccgccccttgtcgctggacgtccgaagattgggccatttcccttgccgcgcccttaccgcatatcggggtgcgcccggcccggcccggcccgccccacccagccctccgctcgcgcccggagaggaggggccgctggcgcagcgccccgggaccccgagaggccgccgcggcacatccagacctccgccgctcccgcgccctctcaaccatcctgggattcccgggcccacccgacccagcggcgcgaccctggccctccgggaccctccgctgactccaccgcgcacttcccgggacccccacacacatcccagccctccggccgatccctccctactcggtgccgggtgccccccgccctctccaggcccggatctcctcccccaggtccccggggcggccccagccaggcccc

SEQ ID NO: 15139 - DNA, 2300 bp, Homo sapien
gaaacagcaagaggacgcccatctgcctgcccaggaggaggcatccggagaaactagcccctcaggcaccttgatcttggccttccagtttccagaactgtgagaacgtaaacttctggttgagcctcccagtccttggtgttttgttctggcggccccagcgagcgggcgcgggatcgcagtgtttgcctttgcatctccagctccgcatcctgctcgctgtttattttgtgagcagctccggcggctgcccctgaactgctccgagactgagcagtttaactcacactcgcccacccgccctccccaggaagcctcccgcccgcttcctccagttccttccccacctgtccggcctcctagcccggtgctctcggcgcgggaggaggcggctcgcagacccccaggtctcggcttcccggatctcccccgcctactcactccccggtccccggctcccggcactggcaggcgctgtggcttccgcgcagtggctgcagcatttaaatgtccggcacttagggagaggggtgcagtcgcggagcagccgctgctcccggcatctagaggggcccaaacccccgcgtgcccaggccgagccccgcgcgcagcccacgtgggctgagggactgagtattggccctcgggcagctgcaaccgcgcacagctggagctggcggggcggagggcgggccgggaccccgcggggaaggaggcttccttcccagcctcctgctgcccggaaatccccccggctctcagacaacctgccccacggggtcctggggggaaggagaggggcgggatacagggatggggagggctggctgagccgaaggcccgggccgccctcccccaggccgcgcggcttcgagaaagcagaagcgagccctgccccggggagtcccacaggagcggggatctgggaagagaaacttgcggacgagggagttagagccgtggacccccggcccccgcccgggcgtcctgcgtcggaggagggtctctgggtcgggcaggggccacctcttggcccgccccttgtcgctggacgtccgaagattgggccatttcccttgccgcgcccttaccgcatatcggggtgcgcccggcccggcccggcccgccccacccagccctccgctcgcgcccggagaggaggggccgctggcgcagcgccccgggaccccgagaggccgccgcggcacatccagacctccgccgctcccgcgccctctcaaccatcctgggattcccgggcccacccgacccagcggcgcgaccctggccctccgggaccctccgctgactccaccgcgcacttcccgggacccccacacacatcccagccctccggccgatccctccctactcggtgccgggtgccccccgccctctccaggcccggatctcctcccccaggtccccggggcggccccagccaggcccccttcgaaccccgccggcggcccgggctggggcgcaccatgcggctgcggctccggcttctggcgctgctgcttctgctgctggcaccgcccgcgcgcgccccgaagccctcggcgcaggacgtgagcctgggcgtggtgagcgcggggtccgcaggctcctggggtctgcagagagattgggagagggaagccgggcccggactcctgggtccggaggaggcaggggccagattccaatatccaaagagtgactgaggatggggtctgtgctcccggcttcttgggtctgtcgggaagtttggggctgggatttggagctctggaaaggagctgaggtgcggagctgaagtccagacaagactggcaaacccgggactgaagcggggacctatggaggggagcaggcaggcatccggggctggggccctgggctctgggtgcctgggaggggcagggctgccaggatggtggtgggcagagagagcccatacttttcacccagcccgcttcacctgccccctccgatgccctaggactggctgactcgctatggttacctgccgccaccccaccctgcccaggcccagctgcagagccctgagaagttgcgcgatgccatcaaagtcatgcagaggttcgcggggctgccggagaccggccgcatgggtaggtggcccccacccctccccagccctgcctctgcacccagcctgtccaccgcccaacagcctttagacctcagtgtgctcctggaacacggagctgtgaagatgctgatctcaggccccaaacccagagggcctcaggcgttcatctttccataagcatttatcaagaacctggtggctc

SEQ ID NO: 15140 - DNA, 2300 bp, Homo sapien
ccagcacattgggaggctgacaccggagaatcacctgagccaggagattgagcccagcctgggcaatatagtgagactccatctctacaaaataataaaataaattactagcaaggcgtggtggcatgtgcctgtggtcccagctaccagggaggctgaggtgggaggatcgcttgagcccagtattttgaggctgcagtgagccatgatcacaccactgcactgcggcccaggcaacaaagcaagaccctgtctcaaagaagaaaaaagttccgcttccagggtaagcccacagccccagtgggtcactggaagtgggcaggaaaccaacatatatgaggccaagtgaaatgactcacctttgaagaagaaagtttcccctcggatgttggcgatggcgtcaaaattgccctcacatcgatcagggatggggaaggatgggctggggaggaaaggagaggtgagtagagaggggggtttgttttctccaaggcagggacccccaccatccccatctcagaggacactgaggctgggcagctggtcacccaaggtctccgagttggtgggggactcacctgtgtgtgggcgaggccgggggctggggcggaggagccaggggtttccttgtgggcttgtcatatggggtttggggcgccttccctgtgaggaaagagtcaggcaggtgtgcgtcccctggccctgctgcagaggacactggatggggcaatgatggtttcgcggcaggtccctctccccctaccatagagttgctgcaggccatcgcggtcatcctgagacaggcggtacttgtcagggtcgcccaccggaccctggtagaagggcctcataatggagttgggggctgaggagtggcccaggcccagggcgtggccaaactcatggacagccacggcaaacaggtcggtcccctcgccgtctgcaggagaaagtgggtgagagctgcggccgcccctgcttggggaaaggggccacaggaaggccctgcgagtgcagctggggccaacaggaacagcaggacaccctccagaggtggccccagcctcctctgcccagcccttcctgaactctccatcatccctgtctccagtcactcagtcagcatggctgtgatggacactggaccacagggctgaaaagatccagagaacacacagaggaataggccaccttacacaccgatggggcccctcctctgggaagggagcactttgtgcacagaagtttgagggggaggagctgggtgtggtggctcatgcctgtaaacccagcacttttggagtcccaggtgggaggatcgcttgagcccaagagttcaagactggcctggacaacataaggagatccccatctctacaaaaaaattttaaaaattggccaggagtggtggcgcatgcctgtggtcccagctactcaggtcccaggctgaggcagggaggcaggagaatcgctggagcccgggaggtggaggctgcagtgacgcatgaccatgtcattgcactccagcctggaggacagaataaggccccgtctcaaaaaaagtaaaaagaaaaaaaaagaaaaagaaaataaaagaaacttaagagggcggtggggtgagggcaggagcctacaaggtgcgtgccattctcttcaggcagccccagccctgggagcatcccctcctcccagctacagtctatagtcagcgacccccacccgtctcccccttgccacccccatctgctggggatgtaggtccatgtccttgacccaagaccttccctcattcctgcccccatccctcctcaagccatatcccttacatcccttgagtcctccatcccccctcccccatctccctgttcacagcctctgcccctcctctccctaccctgtaccacccccaccccaggtcttcctccatctccttgggaacacagagctcctctagcaggcactctcagaacacagcctgccggccccagcacccggccttgctcccagcctcttccctctgtattcagctcaggcgctcaggactgccaggacccagaggattcacacgccagccccggctgaagcccagctcctcatcaaccggtgagccgcctgccagctcctgctccagctgctgagaggcctgaagagaccaagacagagacacagccccgcagcaccacagggaggccccagttaccccatgcggatgagtttcatggccatctctaactaaggtcagcactgttcagggcaggttcataggtaacgacctggtgaactgaaaagcaaatttctct

SEQ ID NO: 15141 - DNA, 2300 bp, Homo sapien
ttccaactttctggatgatgtcctttgaagcacaaaagttttacattttgattatgagaccatgccatttttaaacgataccacttaaaaaataaaaataatcactttgacatgacatttttgtgtagcagtcataaaattttaaaggctctggaagtctacatggagccatgaggcagtctcaattccacagtggccgtccgtcctccgggtgccccataaccaacttttcgattcctctctacttcgtcctcccactcttctttcttcttattattattatttttatttttatttttgagacggagtctcgctcttttggccaggctggagtgcaatcgtgagatcttggctcactgcaacctccctctcccgggttcaagtgattatcctgtcccagcctccttagcagctgggataacagacatgcaccaccatgcctggctaattttttttctatttttagtggagatgggatttcagtgttggccaggctggtctcaaattcctgacctcaaatgatccgtctgcctgggcctcgcaaaatgctgggattaaggcatgagccaccacgcccgggcccactcttccttcttagattccccatcaaccatggattccttctgcgaagcagggagattcaggtcagtccagttcctgccaccacacttctccccaggtccatcaatgctcagaagaatggaagggctttttgtacattcgtttttattgtcctgagtgggatgaataagtttctaatatacaaatttccccctcctcatacatggaaaagaaactgacagaggcccaaatcgtttcctggcagcccagaattcccaggtaactgaccaaagtctcctgccttctgtcctcatgctgatctgtttgtatgagcaactggggcaacccctcgcatggttgctgggacagccgcccacagcctcagctccaggaagcactagggggtcactgaggctggacagcaacttaggaagtggcccctaagtgactctacccatggggttcaggccatcggtgtggcctgaacatattggtcctggggtggaggaacactgcagagccacagaaatgccacgaaacagccagctactgccccccacaatccccgcgactagttaaaatgcagattcctgaccccaccctgagtgaggattcagggtgagtgtgggatctgcaaacttaaatttcccagtgattctgatgtgggatagtctagaagaatagttccagaggcaatcatttagatcctaaaactgtggggagtggggacagggtgaacgaggtgcccccaggttccacccacccctcactctagagctaaggcctcccaggagggagtgctgaggaggcaatgaccaggcctgagccagggttcggtccctgtctttccaccagcgttgagttgatgggagtcaagctgttctctccagggtgcaagcagggaaggggttcttggggatagaagggttccccattgaatggaaggcagttctgggcccagggaggtgcccaagttgggtggcctggggaggaggaggtgggtggcgggggagcaacggaaaaggttaacagcctggagagcaagggtcgtccctccagccactgattccaccacccaggacgtggcgcatgggtcctcaggggtgatatctgggctggttccgggtctgggtcccaggtccccaccagtgtggcagtgactgtaggggggccttgtgggagcagaacggggtgagaaactgcgggtgggagaggggcaaggcacagcttcgcagtcaggcctgtcctctaacgacccaggaatgccagacgcagtggccaggcggggcggggctgcggagagtcccaggactgcgctccgagaaaagctggctcttcctggaaaaggaaggtcctgcggggccagcgcgcgaccggggctgccgtccctccgggtgaggccgcgggcccgccccttgtcctccccgcccctccccgggctcgggaggcggggtccgaccgccccctggcggcagccgggagggaacgacgggggcgacgaccgacgcatggtcccagcgcgcgtgcgcccctgaaggcgggttccggtggcagcgccggggtctcagaccctgaggagactgagcccagcgccaggcgaccggtccccgccgccgccgcccctgcgcgggagatcccccctgcttagtccgcgcccgagcccccgtccgtgggaacagacaaggggcctccgcagcgcctcacaacccccgaccaggtccagcggcgggggactcggc

SEQ ID NO: 15142 - DNA, 2300 bp, Homo sapien
caagaatagcatgttcagtgaaagaagctagacacagaagatcacctagtgtataattctacttataggaaatgtctgggagagaggcatccattgagagagaaagtagatgaggccagacacagtggctcatgcctgtaatcccagcactttgggaggccaaggcgggcagatcacttgaggtcaggagttcgagactccttcatcaacatggtgaaaccccgtctctactaaaaatacaaaaattagctgggtgtggtggcacgtgcctgtaatcccagctactcgggaggctgagtcaggagaattgcttgaacccaggaggcagaggttgcagtgagccgagatcgtgccactgcccttcagcctagacaacagagcgagactctaagaaaaaaaaagaaaaagaaaaagtagatgagtggttatccagggaaatgaggactggcagtgatgtctcagaagggcagaatttctcttagaggtgataaaaatgttctaaaatgggttgtggtgatagctgcacagttctgtgctttgaattgtacagctcaatgagtgaattgcattgcctgtaaattgcatcaccataaagctataaaaacagggtacatacagtctgggtggatcccaagatgtcttcagatggtggcctttgagagtcatgaggggctagggttggagctgaagcctaaagcatgacttttagctggtgcaggagtggcttccttctgtctcccactacaattcagaggatactcagggaaagatctggacatcctgtatgtggaaaggcggttgcgcacagtggaatggactcctaagtggcaggcaggtgacaaccgttgtctacttcacccaagggaagatttctccatggagcgtgttttataggttctgtctctccgagtcccctttgagaatataatgggatacattgcatccatgctgaattcctaagccccaggacctcagaatatgcccttatttggaaacagggtctttatggaggtacttaaggtacaatgaggtcactggggtggatcctacttcttttttttttttttccgaggggaattttcattgttgtcccccagactggagtgcagtggcaccatctcagctcactgcaacattcgcctcccgggttcaagtgattctcctgcctcagcctcccgagtagctgggaatacaggtgccggccaccacgcaaggctaatttttgtatttttagtagagacaaggtttcaccatgttggccaggctggtctagaactcctgaccttaggtgatctgcccgcctcggcctcccaaagtgttgggattacaggcgtgacccactgcgcccggcctagggtggaccctatttcaatatgactggtgtcctttggaaaggggaaagggggacagtcacacccaggcagaacgtgatgaagatgaagatggccatctacaagggcaggagaaacctgaacagaatcccagctccgggccctcagaaggaccccacgctgcccacattgaccttggacctccagcctgcagatcgtgagggaagagacgtcttcgacttagggccccttgtcgtggtacttccttagtttggccccaggaaaccatcccaaaggcaagggcgtggttgtgctcagctgggggaagggggctgggggccgtgaggaggaggtgggaggcccagccaggctggagggtcagaacccgtggagctagaagagcccgtaggggagccccaagattgctgagaccagtgaccttcggccccagatggccttgccttggcccagaagggtcagaaggacctggtcagccaagctcagacagccggcaggatgccttccaccctgcagagggtcctatcttgtcccacaggtagatctacatcaccactagccacccctccaacgtgcacaggcccctgccctcacggcgcccctcttaggtccggcagttcctgcctccttctgatccagaagtttctctggcctctggagccggggcacacctcatgcaaggacagggtccaaattcctttgtccttggatcccacttggctgacgtcaccttcctgtactcagggagtttccccagccagctgtcccgagtctggactttccctctgcccctccccactctcaggctggtggggtggggaaagcagcccattcctgggctcagagactcccaccccagctcagagggagcaggggcccagccagggacggaccctcattcctcccagggaccccagacctctgtctctctcgggtaagtctccatctctg

SEQ ID NO: 15143 - DNA, 2300 bp, Homo sapien
tccctacccttctgcaccccctacttattattttgaagaaaaagggcggcctgaccctccagatctttcttttccggaggatactgggcgaaaagtagttgctccagtgactgagcagcacctcgagcgacctctcttagttctattcaggcaggaattcagcaagctagacgagggggtgatttagaggcttgacagttccctgttagaatacaccccccagatcaacagggaaatattatagctacatttgagcctttcccttttaaattactcaaagaatttaaacaagatattcatactaaaaaagaatgtagaaaatatcaaagaaaactgctgagcctgaaatatgtccaaaatgtaaaaaaggaaaacattgggctaatcagtgtcactctaagtttgataaagctggaaacccaatttcgggaaatgccatgaggtgcccgtcccgggcccggttctaaatcagggcatttccagctgaggcccttccctcacccccgtacaatgtctgtcccccgccgcagccggtagtgccgcagtagattgatgctgcacgaaagccgtgagctttctgccaggggaacacccgcgaaaggtctcaacaggagtctgtggacccgtgccagcggggcaataggattacttttaggaaggtctagtttaagtttaaaaggggacaaatacatacaggagtcattgattcggatcacgatggggaaattcaaactgttatatctacttctgttccctggaaagcagagccaggagaatgtgtatcacagctcctgattgtgccgtatgtgggaatggggaaaagtggaactaaaggaacaggaggatttggaagcacaaataaacaaggcaaagtggcttattgggtcaatcaaattgctgataaacgtcctacctgtgaaataactattcagggaaagaaatgtaaaggtttggtagatacaggagcagacatttcaatcatttctctacagcactggccatccgcatggccaagtcaacccgctcaatttaacatagttggagttggtaaagcccctgaagtatatcaaagtagttatattttgcattgtgaggggcccgatggacaacctgggaatattcaaccaattataacttctgtgcctataaatttatggagaagagatttattacaacaatggggagcacaagttctaactccagaacaattatatagccctcaaagtcaacatatcatgcatgaaatggggcatgtccctggtaggtgactagaaaaaaaatttgcaaggtttgaaagaaccacttcaattggaaagacaagttcccgccaaggcttaggatatcatttttgatggtggccactgttaagcctccagaacctacacctttaaaacggttaacagaaaagccaatttggatagaaaaatggccgctaagtaaatagaaactggaggctttagagaaattagttactgaacaattagaaaatgggcacatagcgccaacattttccccttggaattctccagttttcataatttaaaaaaaaatcaggtaaatagaaaatgttaaccgacttaagagccattaattcagttacacaacctatgggagcattacagccaggattgccttctcctgctataattccaaaaagttggcctttaatagtcatagatttaaaagactgtttctttactatccccttagctaagcaagactgtgaatggtttgcatttaccattcctgcagtcaacaacctgcagcctgctaagtgttttcattgttttacagatgggtttagtaatggtaaagcttcttattctggctcaaaaagtagttttccagatgccttataaaaagcaaagtttgtagctgtaattgaggtattgactgcttttgatagcctattaatgtgatttctgattcttcatatgtggttcattccacacagttaattaaaaatgctcagttactatttcatacagataaacaactgatgacaaaaacaaaaaagggggagagatagggattatgggacagtccatacacaattgaatctagcattattaactttagattttttgaacctgcccaaaggccagatgtcatcagcagctgaacagcattccagaaaccagctgcaaagacagaagcagaacaactggtttggtggagagatctgataacaaaaagttgggaaacaggtaaaataataacttggggtagaagttatgcttgtgtttctccaggccaaaatcaacagctgatctggataccatcaagacacctgaaatctt

SEQ ID NO: 15144 - DNA, 2300 bp, Homo sapien
ttacaagactagactttcatctcagaaatgggtagtcatactgttatcatctagtatccccaccatactcaccattttccgactggccccaggatgtcttttaaagcctttaagaaaaatgaatgaggatccaatctaggttcacccacttagttgtgaggactctttgggctcctgtccaccagcgcctcctacaggcacttactttttatgacactgagtaactcaggccaatttctttgagagatggtctgacttgttccatattccctgcaaggccctaaacattggaagttggatctaaaggccaccattaggtcgggcggggtggttcatgcctgtaatcccagtactttgggagaccgaagcgggcggatcacctgaggttaagagtttgagagcagcctggccaacatggtgaaaccccatctctactaaaaatacaaaattagcggcatgcggtggcgcgtgcttgtaatcccagctactcacgaagctgacggacgagaatcaccggaacccgcgaggcggaggttgcggtgagccgagatcttgccattgcactccatcctgggcaacaagagtgaaactccatctcaaataaataaataaataaaggctggttggattgagattaggtatttttgggctaggcacagtggctcacgcctgtaattccagcactttgagaggctgaggcaggtggatcacttgagcccaggagtttgagaccagcctgggcaacataatgagaactcgtgtctacaaaaaataaataaaattaacccagcatggtgatatgcacctgtagtcccagctactcgggaggctgacgcgggaggatcacttgagcccagcagatcaaggctgcagtgagccgtgattgcgccactgcactgcagcctgcgtgacagagtgagaccctgtctcaaaaaaataaataaattacttaattaaattaaaaatttaaaaaacaggcttggtgcagtggttcacgccttaatctcagcaatttgggagactgaggtgggctgatcacttgaggtcaggagttcaagaccagcccagccaacatggtgaaactcttgtgtctactaaaaatgcaaaaattagctgggcgtgctgccacaggcctgtaatcccagctactgtaaacccaggctgaggaatgagaatcgcttgaacctgggaggtggaggctgcagagagctgagatcatgccactgcactccagtctgggtgatatagcaagactccatctcaaaaaaaaaaagaaaaaaaaaagctttaaaaaacaaacttttttggccaggatccatcttgatggtgccatgtgctcccagtggctacatcaggaagaagggaagggcagggtgtttctctttcagggatggtcactttaatcacttgggaaaagtgatgcaaatttcttttttttttttttttgatctgagtctcgctctgtcacccaggctggagtgcagtggcgcgatctcggctcactgtaagctccgcctcccaggttcacaccattctcatgcctcagcctccccagcagctgggactaaattagcctggctaattgttttgtatttttagtagagacgggatttcaccgcgttagccaggatggtctcgatatcctgacctcgtgatccacccgcctcggcctcccaaagtgctcggattacaggtgtgagccactgtgcccggccaagtgatgtaaatctctaaatgctttaaggagggatgataatacagaactgtcagttttctctggcctttgctttgttggtaaccctgagaccgggggctgtcctgccctcgtgagccattacccagtgagaaaagcgattcctctgggtctgcgtattgggtgtcttttaacatggatgacccaggtatggggccagcttcctcgcagcagatcctaacccagggtgttcaccttcgcaggtgtgggaggagaggagagagacccaagagcggggctggcgttagggaggcatccccgcagtgaaggatgcttggagaatcagtcccagctgccgtggagcaggagcagctgggggaagtcaagctggaggaggaggaggctgtcagcccagaggaccccaggcgaccagagtccaggctgaggcccgaggtggctcaccagctgttcagatgcttccagtatcaggaggacatggggccacgggcgtccctgagccggctccgggagctctgcggccactggctgcggccggctctgcacaccaagaaacagatcctggagctgctggtgctggagcagttcc

SEQ ID NO: 15145 - DNA, 2300 bp, Homo sapien
aggaggcagtgatggttttcaaatgaaaagtgacttcgccaaggacacatgcagctgggctgtggagggcctagtctgtctcctttttccatccctcgtttatttccagagctgttcctacacctgaaaagcgccactccccctgcacaccctggcagacaaccggattcgatggccctggcagcccgaacgccaacaaacacccagtgtctttctgaagcgaccataagccattcgaggaaacacgcacggggtcctgcttgtcctggccttgtccccaatgcccagggcagtgagagcagctctacacggaggccagtccctgaggcttcctcggtggcctcagacctcggagtacacacgtgcagtccttacctcccaaagataaacctaacctctcactctgctcttcacctacttcagactgctgtcccatatatggtcaccagagacatatgagaaccactagagatagccccaaactgaaaactgcccacgggctacccatagcagaatgaataactgatgtaatgaggaaaatcattcagcaacgagagggaaagaacgctcgatggcatggagtcccagctgtagtcccagctccttggtagaccgagatgggaggatcactttaacccaggagtttgagtccagcctgggagatatggcaagaccttgtctctaataaaataaaataagtggaattgggaaaattacaattttaaaagaaacaaaaatttttagtagagatggggtttcaccatgttgtccaggctagtcttgaactcctgacctcaggtgattaaagaggctgagtgcggtggctcatgcctgtaatcccagcactttgggaggccaaggcaggtggatcacctgagttcaggagttcaagactagcctggccaaaatgatgaaaccccatctctacaaaaaaaaaaaaaaaaaaaaaaatgaaccgggcatgatgagacaggccccacgcctctcgcttccgagactgtaatggctgcctggtcccgccaaggccacacccgctccggcgctacagcaccccgccccgccccggacacgccccctccgtccctacagaaccccgccccgccccttggccttcaggcccacttccctgggggcggggttttctggccccgcccctgaacaaactatggagtgggaggagcccgcgactgggagagcgaggcgcgggacgcggggaatgcagagcagaccaaggagaaagaccgtcgtacgaagggagcactagacaactgaagtaggaacaggatgagctcaggtgttaagtgcaggaaaacaaagacccgtcagatgagccagtcaggagggtcctggccccaacggaccgaggggtctaggccgggggaacggccaacacctgagaggtggtcctggctccccgggggctcagaacgctcaggaaggcaccagctgcagccaagggcacaacccaagaaggcaccttaagcacagggatggaattagtttggggccaaacgctgttggttaggtcacttccctcccggggagcccttgcttcgtcatcggtaaagttgggacaaaagccacctggcaggacttgggaggactttaggtgaccgtgtagatggagcaaactctgccccatcacatcctcctcttccattttttcctagcaccgtcgctgctcctttgccctagaatgtaagcccctgagagcagggcctcattccttcagtttctctctgtgtccttagcccctgctttgtaacagtgcctggcacacaggaggccattgcaaagagtagtcacgtgaatgaaaagcctagcaaagaagccagcacactgtgggcatttaaaaatggcagctcttagcccaaaggaaagacgggcagacctgcaaggggcaccaggccagtcttgatttgggaggtggttacactctcacacaggctgggattgaaatctggatttctcactttgtcttcatgtcactggccccgccctcttcccatcccgctcccaaactgggagcttaagggttaactctaggaagcccctcatcacctggatgggatgggactggggcaaggaacttcctgttccattttcccagagcccttccccaggctggcggaggctggctttggccctggagtcctcagaaaaccccccagcatctctgcctgtgtagtggggactccgagtggtgagttggagggaggtcggggtgcaggctgccaggacgggtgctaggagctcgcagcagcttggagagagcaggggaggctccaggccttggtgct

SEQ ID NO: 15146 - DNA, 2300 bp, Homo sapien
cagaatcccaggactcctaaaacatgtttaactccaaaagcagagttgcaaactcaaatgctacaggggccaagcaggcactgtggccacctagaaagtggaccctgaaggtggggaaggtgggtccagcatcggtaaatgttctaattttttttaaagaatcaattttataggctgggcgcggtggctcacgcctgtaatcccagcattttaggaggctgaggtgggcggatcacctgaggtcaggagttccagaccagcctgaccgacatggagaaaccccatctctactaaaaacacaaaattagccaggtgtggtggcacatgcctgtaatcccaggtaatcaggaggctgaggcaggagaatcgcttgaacccaggaggcggaggttggggtgagctgagattgcgccattgcactccagcatgggaagaagagcgaaactccgtctaaaaaaataaaagaatcagttttatgagtgtcaattttttaatgttagaaactaagttaaaaaaaaaacaaaattagctgggcgcggtggctcacgcctgtaatcccagcactttgggaggccaaggcaggtggatcactcaaggtcaggagttcgagaccagactagccaacacggtgaaaccccgtctctactgaaaatacaaaaattagcccggcatggtgatgggcacctgtaatctcaaatacttgggaagctgaggcaggagaatcacttgaaccagggaggtggaggttgcagtgagccaagaccacgccattgcactccagtctgggccacagagtgagacttcatttcaaaaaaaaaaaaaaaaaaattaaaccctctgggcatgatggctcacacctgtaatcccagcactttgggaggtgggaggattgcttgagatcaggagttcaagaccatcctgggtaacaaagcaagacccccatctctacaaaaaaatttaaaaaattagccaggcatggtggcatgcgcctgtggccccagctacttgggaggttgaggtgaattgcttgagtccaggaggttgagggtacagtgagctatgatcgtgccactgcacttcagcctgggtaacagagcaagaccctgtctcaaataagtaaataaataaacaaacaaacccttaaaagcccacacaacatagcacgagctggtacagaggcagctgggcccatcttactgtgtgaagctgtgcacctcaggggattctggtgagccaaagacagtggcatggggacgtttcctagggaaacttcctggaatctgattccaggactgggcccctggcccttttcctgacacccagcccccatgcctgcccaagagaaatggttccttcccccagaaagtaaagcacagtctctgtcctctctatttgaggccttacttctcagggtctaaagggaaatggtgcctgagaggcagaatctgcagctgccaggcgtgtttgagaacttagaaccccatttatagctggatcacaccctctatccccaagctgaaatgggcctggaagaatcggattaaccaacttcttcccaaggtgtggggcatccggattggggggagttcccagcctgtttcccaagttcactcttagggagagagttctgtgccagtcttggggggacccagagggcccttgactaggagtccctaaatgaattcagggtccctcaggagacaataaccttcagaaaccccgagtgctaaaataaatggtcctgccctctccaccctgcaaaatgcccttctttctacctgtgaggacaactgcagtgctcgctttgaaatttcaaataacacaatctttccacaaaatgcatcttccatttttctgttttggtggctctgccttgctggcatcatgaacgcgtcctgggtaaagccatcctcatgagctggcattgcggctctgggagtcacctcccggccaagagcaggtgcaacccaggctcgagactccacacccggaaccctcaaaaccgggaacgctgtagggctgcggctgcatggggaatgggatctgggagggacttcctgtcttccctactcccagtctccacccaactcccccgcccgccccgtgcaggctgtggagactcccttcccgggggagggggcccccactgccgcaggtgccccctctgcctccaccccggtgagaagggggtgctggggagggcatctggatcccgagaccggcgcagatgatcagcttgcaggaggggatggggtcaaaggtggaaggcttcaagctggcaggagagaagggggccagga

SEQ ID NO: 15147 - DNA, 2300 bp, Homo sapien
tcaaaagctttgggaaagtcagggagggccctggtggggcctcatccacagcacaggaactggccggacttctgctggggtctcacactccttcctccacgccctgtctgtgtttgggtcttgaagggaaagaacctcaggccaggaatcagagtgcctgggtgccagacccagcgacacccctccccaatcaggcagccttcaggacgcagctgctctgcccctgcacagaatggtcatgaggttcacgcagataatgatggagaaggagctgccagctcaggaaagtcctggataaacacagggtggcgctggtcattaatcccccccgccgtgcgcaccagacagaagccagtgccagcagagaatgccaacatgtggggctctactgacatgcccaaggtgttcaaggcacacgggaagtggatgggaaactgaaccatgctaacaattctttgtgcttctatggcatgaaaaccatagatgatggcgtctcatgcctattatccttagagcctcccagtgaccctgcgagacaggtggaaatggcaggcatgtggtctgcattttacagatgacacatctggttcccagaggccagggactggcccctggcctgtcgctgactcatactcctccaactccaagcccggagacccaggtcccccacaaatagtaattacacacacacactcaaccacgcacgcacacacacacgggtagcaggtacaggaaggagaaaggaccgggagctcagacccacagagatgagaagctgtggttccaggtggagaagcacggggaaggagaacaggtttccctgtgtgctctgagcgctgctcagaaagaaaacctcactgataggacctccacccagacctcttccatctcctgtggccactggctagagaattcaccagcaaagcaaaactgttatgctgtaaattccagacagagggtactacccagcatgccaccttctctttgatctccccaccccagtgagtctaactcttccaggggtccagactctgtgccttgaaaatctcctccgcaccagcctcttctaccgcacacctccctcagccagccccatctgtacctccgggggtgtctccttgtcctgggtgtcctggatgcctccgccgtctgcagacattttctatttcagagctagaaagaacagctgagttgtttctccctctttttggccaagccccctccagcttctggccaggagcctagaagagcagacagaaaccagccctcgcttcctggacacccccaaagagccctgaaaatccccacgagtaccagcgctccctggtcccaatcggaaagaaagtctcccagatcctatccgatggtcccactctctgtgatgttttctgggtcctatttttgaaagaatgctattttgtattgtcccctttattgctgaagcaagagcctcgcatctcagtgtaaccggctcagggaaagccgaggctaaattggaatcgctatttcctgtcatcaggagcagaaagttctgcagagatcctgcagaacaggtgctggtggggccccgcccgtcaaggccagggtaatccaggacctgctgtcccccgaccccaggacatacaccgtgtgtccctacctgactcccatgcccaccaggaattcagaaatcaacctgcccgctctcagcagcccccctgcagctgcaaccacctgccccaggcctgggatgcccatcctgctctcggtcctggcagacaatgtccttctccttcccaaacccggtcctggcccccttctctcctgccagcttgaagccttccacctttgaccccatcccctcctgcaagctgatcatctgcgccggtctcgggatccagatgccctccccagcacccccttctcaccggggtggaggcagagggggcacctgcggcagtgggggccccctcccccgggaagggagtctccacagcctgcacggggcgggcgggggagttgggtggagactgggagtagggaagacaggaagtccctcccagatcccattccccatgcagccgcagccctacagcgttcccggttttgagggttccgggtgtggagtctcgagcctgggttgcacctgctcttggccgggaggtgactcccagagccgcaatgccagctcatgaggatggctttacccaggacgcgttcatgatgccagcaaggcagagccaccaaaacagaaaaatggaagatgcattttgtggaaagattgtgttatttgaaatttcaaagcgagcactgcagttgtc

SEQ ID NO: 15148 - DNA, 2300 bp, Homo sapien
ggaggatgacttgagcccaggagctcaagaccaacctgggcaacatagcgagatcccatttctaccaaaaaaagaaaaaaagaaaaaaatagctgggcatggtggtacctgtagccccagctactcaggaggctgtggcaggaggatcacttgaacccaggaagtcgaggctgcatgagtcgtgatggtgccactgcactccagcctgggtgacagagcaaggctgtgtttcaaaaaaaaaaaaaaaaaaaaaaaagctctgggacttaaatacttaacatccaagaaacaaagggaaccaagacccctcggagacaagcacctgctcctcaaagcagatgggacacccaagggtctgcggggcctggggagttcagttcatgccatctctctccagggcaagcagccctcgggccccgaagccaagcttgctgctcagacacctctgaagttggggcttggaaaggaagatggagctataggagtgagccctgcggatgaacccaggaaaagcggacttcctggggcagcgtccagtacagtagctgctagccatatgcggctatttaaactctcatttgagctgattaaaaccaagtaaaattggccgggcgcggtggctcacgcctgtaatcccagcactttgggaggccaaggcaggtggatcacgagttcaggagatcgagaccatcctggctaacacggtgaaaccccatctctactaaaaatacaaaaaattagccgggcgtggtggtgggcacctgtagtcccagctacttgggaggctgaggcaggagaatggcatgaacccgggaggcggagcttgcagtgagccgagatcgtgccactgtgttccagcctgggtgacagagcgagactccgtctcaaaacaaaacaaaacaaaaccaagtaaaattaaaaactcaagggctctactcacatttcaagtgctcagtagccacacatggcttgtggctcccgtcctagcacacacagaacatttccatcattacagaagtttccatagaacagtgctgtctcaagggacaaggagaagggtgggagagagagggagggaagggaggaaagaggagacggcagagcaggacctctccctaacaccccagtcccccctccaggcgagtgcttacccagtgacagcccatttttcttctgcaggacatccctgtagaagttctgctgcgtgtggtccagccgtccccactcctcccgggagaggtacaaggccacatcctcgaaagtcactggcatctgaaacaatgtgaaacatccactctccaggacatgacgtggacacggtggagggacaccatggcatgagatgtgtggtgagaccccggactcccaacccactgtgtcgagtgaggcctgccacttccatctgatcgggaagcaggtgagccacccaaggccttctggggagttgagaaagaacaaagaccaagaggtattttcagggatcacagttaagacttaggatgtccatgcagcccccagcctcagctgagacctcggaggacggttcccaacggctaccagcgagaggccctgtgtctctaattcctgctgcttctcctccagctttggcccaggcctgaccatgggccttgagcctggacaattccagcaacactagcaagagccccaggcttcaggcttggctgcaagtggggccagcggggtcctggctttcacacagaaccagcagatgcaggaagggctgagtaccatgcaggggccggggaagggccactcacctgggaccaggcagtgaggagcgctgcagccatctgccggtctctggtcctcccctctcgggaaagcacggggatccggggggaggggagggctgtgggaggagagaggtcctcacggtgatcagctcatcctgctggacctgctgctacttcagctgcctcaaactccacccctggcccgacccaaggacagggtcggatggctctgacgctgccagggggctgtgggccatggggggatagcgtcccctgctggcatagagaccctcagccccacctggacctgggccaaacctccacctccccacagctgcctccctgggaaagcgcctcttccccgtccctctcctacctccgccaggcaggaagagagctttctccttagagccgtgacttaggggtgcccagccccaggcaccttgagccccatcctcctgcgatgccccctcggagtgtggctcttcgggctccatcttaatgtgcagtgactcctgagtgtcccctgaaggtaccgcctccccc

SEQ ID NO: 15149 - DNA, 2300 bp, Homo sapien
tttctcgtgatagccacaaggcttgctccctcattctgctcatatgtcaccccctcaaggaggccttccccagctctgtaaacaacctgtgctcggcgttaacttttctccctaatgtttatcactacctgacatatacgtgtttcccacgactcaacgataagtgttcatgagggcagacactttttaatgccctatgacaagcacctagaattgtgcctggcacatggtagatgcttagtaaatatttgtttaatgaatgaaggtaaaaaacatttctaatacgaccatccaggaataagtactattcatgttttagtgtgttcttacagttttactgttcagacagttatatgcctgtgaatatatattatatatgtgtgtatatatatatatatatatatatatatattttttttttttttttgagacagagtctcgctctgtcacccaggctggactgcagtggcgcgatcttggctcactgcaacctccgcctcctggattcaagcgattcttctgcctcagcctcccgagtagctaggattacaggcatgtgtcaccacgcccggctaattttgtatttttagtagagacggggtttctccgtgttggtcaggctggtctcgaactcctgacctcaggtgatctgcccgcctcggcctcccaaagtgctgagattacagacgtgagccaccgtgcctggcggaattttcatattttaagtcccccacccttggacatttagattttttccatctttctgtatttgcagatatgcttctacgtacacctttattcatttgcttgaacatttccctgagaaaaactagaaatggaattgccagattactttgtgtacatgtttccaaactgtcctccagaaagaatgtaatgctttgaacttccacttgagaatcaaatgtttaccttcctctgttcctccagatttggacatttacagtgttcagccgttgttgtggcattccaattcaattgggaaacagcttgatgtagcgtccccataaggtccacagtaattaaattttttttttttttttttggtgcggtagtgcaatttcatggctcactgcaacctccacctcccaggttcaagcgatcctcccatctcagcctccctagtagctgggattacaggtgcacgccaccacaccaggctaatttttgtatttttagtagagatggggtttcaccaggttagccaggctggtcttgaactccagacctcaagggatccgcctgcctcagctttccaaagtgctgggattacaggtgagaaccactgcacccatcctattaaacttttaaatcatgatagttaccatgtatagagtgtttatatgccaggcattgagctaagtcttttacgtcttgcgctcattctgtgcaacagcccaatgggagaaattccatgaatatagttaccatttccttgatttctagagaagctggatatgttttctttttttccagtattatttctatttatccttttgtgaattgtctgttgttattttcattggaatattctctttttttgacagagtctcactctgttgcccaggctggagtgcaatggcacgatctcggctcattgcaaacctctgcctcctgggttcaagcaattctcctgcctcagcctcccaagtagctgggattacaggcacccgccaccacgcccagctaattttttgtatttttagtagagacggggttttgccatgttggccaggctggtctcgaactcctgacctcaggtgatccacccatttcggcctcccaaagtactgggattacaggcgtgagcacctgtgcccggccacaccattattttgaagagaaaatttgataaaaataattggtcagttgtaaagatggttaactacccaactggtaagagagatttctaagagttacagaatagcaactgcaggaaggaacttgtgcccttaggactgaggaagtaaaaaggagggaaacttggaaacacgaaagagcccttcccctttcaattcaaggtggagactggacctcagaagagggagtgggtgccccgagaactcacagctagcggacagtggaaagggcaggagccggaccaaggtgaggacagtggaactgaaggccgctggttacctctcctgccctccgctggccacagtggagaagacagcccctccctcctgctctgacctgacagtgttcatccatcgccctgtattagcgaagaacaacatcaagctggctagcaaggaactgtatacagggtccagctgggt

SEQ ID NO: 15150 - DNA, 2300 bp, Homo sapien
taataggatgggtgcagtggttctcacctgtaatcccagcactttggaaagctgaggcaggcggatcccttgaggtctggagttcaagaccagcctggctaacctggtgaaaccccatctctactaaaaatacaaaaattagcctggtgtggtggcgtgcacctgtaatcccagctactagggaggctgagatgggaggatcgcttgaacctgggaggtggaggttgcagtgagccatgaaattgcactaccgcaccaaaaaaaaaaaaaaaaaatttaattactgtggaccttatggggacgctacatcaagctgtttcccaattgaattggaatgccacaacaacggctgaacactgtaaatgtccaaatctggaggaacagaggaaggtaaacatttgattctcaagtggaagttcaaagcattacattctttctggaggacagtttggaaacatgtacacaaagtaatctggcaattccatttctagtttttctcagggaaatgttcaagcaaatgaataaaggtgtacgtagaagcatatctgcaaatacagaaagatggaaaaaatctaaatgtccaagggtgggggacttaaaatatgaaaattccgccaggcacggtggctcacgtctgtaatctcagcactttgggaggccgaggcgggcagatcacctgaggtcaggagttcgagaccagcctgaccaacacggagaaaccccgtctctactaaaaatacaaaattagccgggcgtggtgacacatgcctgtaatcctagctactcgggaggctgaggcagaagaatcgcttgaatccaggaggcggaggttgcagtgagccaagatcgcgccactgcagtccagcctgggtgacagagcgagactctgtctcaaaaaaaaaaaaaaaatatatatatatatatatatatatatatacacacatatataatatatattcacaggcatataactgtctgaacagtaaaactgtaagaacacactaaaacatgaatagtacttattcctggatggtcgtattagaaatgttttttaccttcattcattaaacaaatatttactaagcatctaccatgtgccaggcacaattctaggtgcttgtcatagggcattaaaaagtgtctgccctcatgaacacttatcgttgagtcgtgggaaacacgtatatgtcaggtagtgataaacattagggagaaaagttaacgccgagcacaggttgtttacagagctggggaaggcctccttgagggggtgacatatgagcagaatgagggagcaagccttgtggctatcacgagaaagctatctttatggttttccaattaattttctaaattttctcttccaagcatgcaacacctacataattaagacaaaacaaaccaaaaaaactctttccatttatgaaagagatctggagcctgaaatcatctccgggtcgaggcgtggagagagtgggagaggatccgagggtatggaaaggaccccgagcccccctgctctagatccctccgggccgtgggacccctgacgcccagcagcaactcgtggacaaagcagctggtgagagaacgcgggactccggccaggtcagtgtcccgcttgccgcgtcctgctaaggcgacccgaagacagaggatcgccgcaggaggctccgcgccccttacccgagggcacttcccagcaagctcgacgcctctccagggaattgggaggagcgggacccaagaggctagaaaagagtctccccggcccgagctccacggcccgcggcctttcggccctcacctactagttggcaaagaaagaccgtggcagaaggaagaggccgctccagcgcatcccttcgggcggagcagaagctccacttgtggctaggccatgtgccctctccgttcctcgggccagccttggcttcccctttttgtcgctcaagggccagggtcgcaaggaaatgtgaaaaaaaagcggagacaaaagagaacgaggtaaatctagatgcagagcctcgcctttcctcccgggtgcaggtgtatgacgcgtatggagtttctgtcttctaataggcagcctgagaattcttcctgttcattggccatcggtcatggagaaggcgggctcagtggacgaacggctttctgggagctggggaatgcttgcgtagcgtagtttcccagcgagccccgcgaggacttccggcgccgggagctcgcggcggaagtgggatctcctgggccgtagtgggcgttgtgtgtttcgggggcgggggcgggggcggggg

SEQ ID NO: 15151 - DNA, 2300 bp, Homo sapien
caaagccagaaatccaaaacccgggtgtttcataactctttgacagcaaaacccaatgtcattcatttggcagcaccacctgacctgatataagcatatttataatctcaatttattccactaaatgtaaatgttcaaaattatggtggaaatattaataacatatatcttcagtttataaaatttcattgagctatacccactcgtgtgtttttctgtattgcacattatacatcaattaaatatcttttttttttttttttactgagagagagtctcactctgtcgcccaggctggagtgcagtggcgcaatctcagttcactgcaacctctgcctgccaggttcaagcgattctcctgcttcagcctcccaagtagctgggactacaggcaccagctaccacgtccagctaattttttgtatttttagtagagacgaggtttcaccatgttggccaggatggtctcaaactcctgaccttgtgatccacccgcctcggcctcctaaagtgctgggattacaggcgtgagccactgcgcccggcctaattaaaaaattttaactgatatgtttcattatttagtgttgccccagatccctctggagatgtgcttgatatatcgtctgtgcactatattatctttctcaaatttgaaaacctctgaattccaaaacacatctggccctgaggtgtcacagaagggcttacagacaccatccaaagccatttatccacaggtacatataaatgtatgacacatttataccttacattgttactctctactgaaaagtgtattatgcaattttcagtaatcgattttttgtttcaacaataaaaatacaaactggccgggcttggtggcttatgcctgtaatcccagcattttgggagacagacacaggatgattgcttgaggccaggggttcaagacccctttgggaagacaatgtgagacgccatctgtaccaaaaaacaaaaaaagccaggtggggctcctgtagtcccagctactggggaggctgaggaggaaagattgcttgagtccaggagtttgaggttgcaatgagctatgatcgcaccactgtactccagcctgggcaacagagtgagaccatctcaaaaaaaaaaaaaaaagaaagaaaagaaaagtaaaaagaaaatgaaaaaaatacaaaccatcttaataaaaaagggaagattcaaacaatatagaaatctgtaaaactctcccttcctcaataccattgtaccccccgacttaacagtctgacaaatgacgtcccagaccttttcctgtgcttttactaaaaaagtcatccatagcggggagaaaaggtgcttgatgtgtttctacataaatgagaccttactgcacagacattagcggcactatgagcttccgcggtatggatatgctctagtttcttaatcaatactcgagtgatgcattcgggttgtttccaattctttagtccatcctaagcactttatttattctgctcctcacaagacccctgaaaggtgcgcgcaccattctcatcctctggtgacttcgaagaagactttcctcgaagagggccaggactcaccagggtcgctcagcaggacacggcaggcgggaaggcgagccagccggagccccgcgctgtccaccgcagcctcgcccgcggggcgagcggcgatcgtacaggggcgtctgccgggggaccaagctggcagagcggcgcgggggaccagcacttcctagcagtgcgcgcgccctccggcctctgcctcggggcgctgatcccggccactcggagcccggtgcttgatgttggagccaggcggccagaggccccgtccccgccccggcccccgcccccgcccccgcccccgaaacacacaacgcccactacggcccaggagatcccacttccgccgcgagctcccggcgccggaagtcctcgcggggctcgctgggaaactacgctacgcaagcattccccagctcccagaaagccgttcgtccactgagcccgccttctccatgaccgatggccaatgaacaggaagaattctcaggctgcctattagaagacagaaactccatacgcgtcatacacctgcacccgggaggaaaggcgaggctctgcatctagatttacctcgttctcttttgtctccgcttttttttcacatttccttgcgaccctggcccttgagcgacaaaaaggggaagccaaggctggcccgaggaacggagagggcacatggcctagccacaagtggagcttctgctccgcccgaaggga

SEQ ID NO: 15152 - DNA, 2300 bp, Homo sapien
agcagaataaataaagtgcttaggatggactaaagaattggaaacaacccgaatgcatcactcgagtattgattaagaaactagagcatatccataccgcggaagctcatagtgccgctaatgtctgtgcagtaaggtctcatttatgtagaaacacatcaagcaccttttctccccgctatggatgacttttttagtaaaagcacaggaaaaggtctgggacgtcatttgtcagactgttaagtcggggggtacaatggtattgaggaagggagagttttacagatttctatattgtttgaatcttcccttttttattaagatggtttgtatttttttcattttctttttacttttcttttctttcttttttttttttttttgagatggtctcactctgttgcccaggctggagtacagtggtgcgatcatagctcattgcaacctcaaactcctggactcaagcaatctttcctcctcagcctccccagtagctgggactacaggagccccacctggctttttttgttttttggtacagatggcgtctcacattgtcttcccaaaggggtcttgaacccctggcctcaagcaatcatcctgtgtctgtctcccaaaatgctgggattacaggcataagccaccaagcccggccagtttgtatttttattgttgaaacaaaaaatcgattactgaaaattgcataatacacttttcagtagagagtaacaatgtaaggtataaatgtgtcatacatttatatgtacctgtggataaatggctttggatggtgtctgtaagcccttctgtgacacctcagggccagatgtgttttggaattcagaggttttcaaatttgagaaagataatatagtgcacagacgatatatcaagcacatctccagagggatctggggcaacactaaataatgaaacatatcagttaaaattttttaattaggccgggcgcagtggctcacgcctgtaatcccagcactttaggaggccgaggcgggtggatcacaaggtcaggagtttgagaccatcctggccaacatggtgaaacctcgtctctactaaaaatacaaaaaattagctggacgtggtagctggtgcctgtagtcccagctacttgggaggctgaagcaggagaatcgcttgaacctggcaggcagaggttgcagtgaactgagattgcgccactgcactccagcctgggcgacagagtgagactctctctcagtaaaaaaaaaaaaaaaagatatttaattgatgtataatgtgcaatacagaaaaacacacgagtgggtatagctcaatgaaattttataaactgaagatatatgttattaatatttccaccataattttgaacatttacatttagtggaataaattgagattataaatatgcttatatcaggtcaggtggtgctgccaaatgaatgacattgggttttgctgtcaaagagttatgaaacacccgggttttggatttctggctttgggatgagagcttgtgggcctgtgttaataggagagacagtcacatgagcaaggcattacagtaaagcctagaaaaggcttcagggccatgaaaggatggggactggatggctcttcagcctggggtttgctcgtgtattccacatccttcctcctcagtcctgccattttgctctttccccaggagtacacatccagatgccagcccagctaccacaggggatccctctgggagactgaaagtacaggttctggggcccaggttgaagccgaccaaccctgagcctcaggccaggggaatggcagcccccttggaggcccaggaccaggcccctggggagggagaagggcttctgattgtgaaagtggaagattcctcctgggaacaggaatctgcccagcatgaggatggcagggattccgaagcctgccgccagcgcttccggcaattctgctacggggatgtgcatgggcctcatgaggccttcagccagctctgggagctctgctgccgctggctgcggcccgagctgcgtaccaaggagcagatcctggagctgctggtgctggagcagttcctgacagtgctgccaggggagatccagggctgggtgcgtgagcagcacccgggaagcggtgaggaggctgtcgccttggtggaggacctacagaagcagccagtgaaagcctggcgacaggtgaggggcccttccacatccaggggcacctggatggtatctgagctcgagagaagtgggtaacctgcagagataagtctcccagaggctcacagg

SEQ ID NO: 15153 - DNA, 2300 bp, Homo sapien
tcagcactagcactccatcagcactagcacctcactccatcagcactagcacctcactccatcggccccggcaccctgctccatcggcactggcgccctgctccatcggcactaatgctccactcggcgccccactccatcggccccgctccatcggcactaatgccccactcggcgccccactccatcagcactaatgctccactccattggcactaacgccccaactccagcggcactaatgacccgctcctttgacattggtgccccactccatcagcactaacgccctgctccatcggcactggtgtcccactccattgtcactaacgtccggctccatcggcactaccaccccgctccatcatcactatgtccagctccgtcggcactaccaccctgctccatcatcactacgtccagctccaacggcactggtgccccattccatcggcactaacgccccgctccaccggcaccagtgcctcgctccattggcaccaacgcccagctccaccggtactggctccctgctccatcggcactaacgccctgcttcattggcactttgctgctgcctcctgagcactgccttccatgaacagggacagaccagaggccctgcaaggactccccctcagacctccaaagggcaacagaagagtattaataaacgtgaaaacttacctccaggctgttctgttctttcggtagctggagggtggggatacctggaatatatgccccttgccctggccttgtgtcctggtggcacatgctgctgcaccgtgaccaggcggagctgcgtccttggcgtccaggtcggctgggccccaatgggcagccgtgtcccctgggactcttgtccccctgtgtcagctagtgcctgccctgctctgggagcaccgtcggtgctccagcagaacggggagctgagcaggactcagggtcttcaccaggccactcctctcccacaactgtgaaaggaagaagggcccatagacgctgcttggtcagtggtgggaccctcttgctgcgtgttggggatctggaactcaaggctgccccaggctgagtcccttggaggaggggctgacagcgggcttgcccttcccaccagcccctgacatccaacttctccctaccaggagccccaggccgggacccaccaagggctggtgggtgcgtggtcaaaactagtgatcatccaggcacgacccctccttccacccatgctggttccttctctttcacctgctagtggcctcagggcccctggctgaggggaggcgggggccggtggacaagacgctctggtcccttggtaacaggtgtgcatgtgccagccctctctgcccctaggcctttcttagccaaccttccatgcacacatcatcctgcggtcactgtcatggtctccgtttcccgtaagaagcaagcaaggtctcgctgtggacaaggctgattccagttggtgatttttacctctgggggcctggtgctgtgtgcatgcgtgtggcgggtggccgggatggtacaaggacttcttggtggcggtggctggctccaaatggagacactcgggtgtaacgagatcagataagcacgtaggccaggagctaagaataggattgagcacaggttcctggctcgggtaggggcatgtcagtgccagcaaagaagtcaccagcaggagccagagaatgaagcccaggctgggagagcggggccaggacccagggttccagggatggggcagagtccagctcagctcataagcagagctgatagtactcgttagggtagagggcaagggttaggacccagggcactgagagcccagggccaggaggtgagctccgagcttggtgcttggaggaagccccgtctcgccctatggccttcctggtggctgggaccctgcggctggccacgcagatggcagacactcgagacagcctggggagaaaggtagcaggaggcaccgcctagcccagctgctcctgcctccctgctgagccccagcccagcccagcccagcccagctctggccttgcctccccaggggaagtatgacgtccagggtccaagggcagccctgatgctcagcagccctggggtggcggccgctgtagtcactgccctggaggacgtgttccaggccctgggctttgagagctgcgagaggagggaggtcccggtccaggtgagcctctgcctcttacatccaccctcaggcccagcaccgaccccttccccactctcccctgacccagaatctcctccccacccaaaacctc

SEQ ID NO: 15154 - DNA, 2300 bp, Homo sapien
gttattaataaataaacattggtagagggaagtttcatgtgccctgtggctgctagtctggaaggatgtgaatttggagccactgttggacatcttgctgccacatgaggagaggtaatctgcagaatgaagctgagcagaagccaatgcagtagtgagatagagaaatacagggtcttgatgttatcattcagctccctgaatttggtctggcctgaaacacaaaggctttgcaagaagacaccttggattttgtaatgacattaacctgtcatttctccctaggctgatatgagttggttttctatcgcttgcaaataatgtctttgctaattcagtgtccattctcctcctcctccccagatctttcgtaattagctttatgggttgtttgttgttcttgttgtttgtttgtttttaagacgaattctcgctctgttgcccagcctggtgggcatggtagtgcacgcctgtagtaccttgcctgggcaacaagaatgaaattccatctcaaaataataataataataataataataataataataataataataataacaatttaatatcttcagccttcacctagtggacatggtcttagcccagtgcattgatgaggttaagagtcacgagatatttaacataaattacctagtttagttattacaaccctacaaggtgaatattatttctccactctatagatgatgggagctggtgattcagtggaggttactagcttttctaaggctatacaactggtaatggtggatctggaaattgagtgctggtctgtgaaaatccaaaggttatcttcttaatcccagtacagcttcacaggtatctcccaacaagatcagcatcccagctgggtgggggataaaatacagggtcgtgagtttcctctagcagaaggattgttgccaatgattaccccttagattgcatcactttcagtgttgccaagtgctgaggcaggaattatgtatgacaaagctttatcgtcagtgtcggacacaaaagagccaaggaggggaagggacaattactctctgcttttctcaatgaggctctcagggaatatgaccctagtggccatggaggctcctgtgaagagcttgccctgtgattcttccaaacatccttcctgcatcaagggctgagtctgtgcagcccagctcctgattcatgagatactcagcctcaaagctccagtgacgagtcaccctccctcagaccaataacctctggccaggtctgaaaaagggaagccaacccaggacttcaggagacagtgaggactgctgctctttctgggtaagagtcagatcattggccaggtgtggtggctcacgcctgtaatcccagcaccttgggaggccaaggcgggcggatcacgaggtcaagagatagagaccatcatggccaacatggtgaaaccccgtctctactaaaaatacaaaaattagctgggcgtggtggcacgtgcctataatcccagctacttgggaggctgaagcaggagaatcacttgaactagggagctgaaggttgcagcgagccaagatctcgccactgcactctagcctggcgacagagcgagactccgtttaaaaaaagaaataaaaagagtcacatcagtgggacttcactgataactgcttgtcaggacttaaagcctcagagggaccctccttcctttcaattatgtggagccagaaaaacagtcctgagctcagcagcagtcccttgcaatcacccagtcaggaccagcctctgtcccgtctgtctgacatcctgaactgtggggaacacaaactgactgagtttctgcccagacctctgggttgttccattttaattttacaaattggactcagggtgctccgtggatatagccaagaaggcctggctcagacttctgtaaacctgagccctgaacatagcagtagcagccccagcagggttgacaatattatcatttacatcctgcaagcaaaattctactgccattcctgtgccccatcttaaccagcattttccaagcttttgcatttcgtcttctttgtctgcctctgtgtccaggatcccaggcccatgagcgggacaaaccagtcgagtgtctccgagttcctcctcctgggactctccaggcagccccagcagcagcatctcctctttgtgttcttcctcagcatgtacctggccactgtcctggggaacctgctcatcatcctgtccgtaagcatagactcctgcctgcacacccccatgtacttcttcctcagcaacctgtc

SEQ ID NO: 15155 - DNA, 2300 bp, Homo sapien
cgagaccattatggccaacaatgtgaaaccctgtctctactaaaaatacaaaaattagctgggcatggtggtacgtgcctgtagtcccagctactcgggaggctgaggcaggagaatctcttgaacccgggaggtggaggttgcagtgagttgagatcaaaccactgaactccagcctgatgacagagtgaaactccatctcaaaaaaaaaaaaaaaaaaaaaaagagaatgggacagagagaaggtgattggatttatacattgtagccaagcatgtagtgatagctttgctcaatcctggttccaaatactctggttcaaccagctatggtgaaggggaggtggtagaaacacgactcctggggctccaccacattgtgcctatgcagattaggaagctctatcccaagaaaagggcaaaccatgtgagttgcagggacatccccaaagatgtccatcctaggggtctagagttcataaatcacggcatcctggattctcctggagaaaacctcccttacaatcagactacccttcatctcaaacattttctttttccttttttttttttttttgagacagagtcttgctctattgcccaggctggagtgcagtggcacgatctcggttcactgcaacatccacctcctgggttcaagtaattattgtgcctcaccctcccaagtagctaggactacaggcacatgccaccatgcctggctaatttttgtatttttagtagagactgggtttcaccatgatggccaggctggtctcgaacccctgaccttaggtgatctgcccaccttggcttcccaaacttttgggttacaggcgtgagccactgtgcctgaccccaaacattttcacgaattaagcccatctcagtaatgtgctcgtaacattccctcctgtaaaatggaaaacacgaagcatcactaatgtcttaagatgaccaggcagaggaaagcaagggctacacagaaaacacggaagagccccatatctcaacaaaggaagtgatactgcaaaggatttcatgacagaatttccacacctgtgggcacaggagcagatcacaaggtgaggaggtttgtggttccaaggaatcttgtctgcgatttatctgtatcaggatggcttcatttctaatatctacaagttttggtccaagagttttatctaaacgttagataatattgaatgtcgtcgttgtttggtccaaaggggccaaaattaggtgggacaattatgttcttcttgtccctaatgaggctctcagggaatctggtcccagtggccaaaggaggttcctacaaatgcctgctctgtgattgccccaaacatttacttacacagaggactaagaccatgagcccctactcctcacacactcaggacccgcctgtgtttccaagacattccaactcccacagtaagtagaagcattgaccagttatgtagaaatgaggaacaactgagagtgacagcaccaaccttctccaggaaaggtcgcagaggtgaacaattaagtatgtgttggctcagatgtgaagttcttttaggaatcttctttgctacatcatccagatacaggaagtaatgagtaatgtacagagaagtgaagtacaggagtcctgaatccatcagttgtcacttgagattaacccagtaatcatcagtcattcctccagtctctttatgagctgctaactagttgggtggggaactgaatgtaccagagacacacacattctcagagtcaggctatgtgtacgtgtctgtgtgttttgttttcttttcttttttaatagagatggggtcttggtatgttgtccaggctggtcttgaactcctggcctcaagccatcttccctctttggccttccaaagttctaggattacaggcatgagccaccatgcccagcctgtctgtgttttcaacgttaaatatgcaaaataagaatcagtgagtcgtctaggaaaagcatcgtaactgagtgttggaaattggacgtatgggtgaggagaccacatcctgtttttgcaagtttgtgaattgatttgcaaacgtggttcttcctggagcctcatcacatcttaaccacccatgtgtatgtttctgaattcactgtcttctatgcagctgggtccagacatatgagagggacaaaccagtgagtgtctccgagttcctcctcttgggactctccaggcagccccagcagcagcatctcctctttgtgttcttcctcagcatgtacctggccactgtcctggggaacctgctcatcatcct

SEQ ID NO: 15156 - DNA, 2300 bp, Homo sapien
tgcttcagcctcctcccaagtagatgagattacaggcacccgccaccacgcccggctaatttttgtatttttagtacagatggggtttccccatgttggccaggctggtcttgaactcctaacctccagtgatcagcccacctctggcttcccaaagtgctgggattacaggcatgagccactgcgcctggccatcccatgagtaaccattttaataatctattgtgtatccctcaacacaaacatacacaaggtgttttgtttgttccaaaaatataattatgcataatatatgtagctctgaaactttttcatgtaatattttatggccatccctccaggtgtacatatagttccaatccattctttttcatagctgggtaatttccagagtatgaatgcaccaatttactcctttccttacgtatgaacatgcatgtcatttctagtttttgtcactacaaagaattctacaagaaatttgtagacatcagattcacagatgagattgtgaaggtcaaagggtacatacttgtacttttaattttaatatatattacaagatgacttcacacaccacactaccagcgaaaggagtgcctatttctccaccttcattgtttgataggtgaaaaatgtggttccctttaaaagtgataatcttgactagtagtgtggttaagcatctttttaaatgttaatgaccaattagttttcctcctctcgggaagagctcctcattgcctttgctttttgtcagttggcaggggttcattttgtcttaggaatgtataatcttttgtgtagctaatctttacaattatcttccagtctatttcttgtttgttaacagagtcaagaaaaagttcttaaaaaatacaatcacacaggtttatattttacttcaagacatctcagttatctgttttgcctcataattcaaaccataatgctttgattaacggaggctttttagtaaattttgatctgaaaaggcagatattccttatttttctagaatgtcttggtgccacacagttttcatactcgtttctttgtaacatattttaagccatcgtcagccattagtcaggtataattaactttaagaagaggcattcatttatatttttacttttgtcaactttctggaggctggtattacatcgagaaataaggccatccctgcccacaagttgtccgaaccctgatcagtgcgtcactggggaacgaaccgagtgtggatacaacgcacaaacacaaaactctgttcggcctccgtaggaagctgaaattgagaaaggaaaccgagacagtaggagaagggcaattaagatgtctttaaaaacaagacggccggtgcggacagcagtgtagaagttagcaagctggagtgggcaatgtcggtgccccatctctaacctatgggagtcaccagagcgggggcggagtcccatggcggccacaccctgtccgcctccgcagtctttttactggagaaccgcagtaaaaggcggaaaccgcggaggcgtcttgattttccggtcggagagatagcttgcttcctttaagcctcggggtaggggggtggggagggtaggggggtggggagggtaggggggtggggagggtaggggggtgggggggtggggagggtagggggtgggggggtggggagagtaggggggtggggagagtaggggggtggggagagtagggggtgggggggtggggagagtaggggggtggggagagtagggggtggggagagtaggggggtggggagagtaggggggtggggagagtaggggggtgggggttggggggtggcgccgtggggggtggcggggtggggggtggggggtggggagagtaggggggtggggggtggggagagtagggcggtgggggagtggcggggtaggggggtggcggggtggggggtggggggagcgcgggcgctgggtgggcggggggtggggcggtgggggggcctgccccgccccaaccgccgcgcctgacggtcgtccattggttgtttgcattcgaactacatttcccagcaggccctggggttagactggccgcagctggagaggtgccagcccgtcgtggatgactagagccaaccacctgccttccgtcttccaggcagaaccacagagaggctacagccgtcctggcctccctccggccctgagagctcctctggcctgtctcaagtcttaacgtctcaagcgcagactgccggctccgaacggggagaccaggcttctgcaccggaaacaaggcaccggttg

SEQ ID NO: 15157 - DNA, 2300 bp, Homo sapien
tcccaagggctgggattgcaggtgtgagccactacacccagcccaattcaccctttttttagggaagatgttgggtttgggctcagaaagatctagcaaactgcatgtttgttgtcagctatgaaaacaatgcaaaaacaccaaatactctgtgaaataggaaacaggtggaccagctggacagtaagttaaattcaaccaaccagaactcatcaaagccttgaatcccaggctgggcacacacagaggagctcacacccagagctgggtgttcagctaggcgtcgcaatgttgtgactgacctgtggaagtgacccatcctggacctcagtggtcagctggaaatgtgacatccatgggtagtcattaacagtaaaatcacaaattattgtcatgcaggagacgatgttgtgaagtggtttgacgtttggatcttggctctaggcaagtcactaagctacagattcttggctgcacagggggatgataaacgcagccctgcagggtgctgcagagattctaggaggaagtgtttataaagctagtggtggctggtgccgatgaagtgctggtgaagggtaaattgcattattaacaaaacttctggccgggcgcagtggctcacacctgtaatcccagcactttgggaggccaaagcgagtggatcgcttgagatcaggagttcaagaccagcctgcgcaacatagtgagaccctgtctctataaaaaatacaaaaattggccagatgtggtggaatgcacctgtagtctcagctacttgggaggctgaggttggagggttgctcaagcccaggaggcagaagttgcagtgagccaagatcccactactgcactccagcctgagtgactgagcaagaccctatctaaaaataaaaaaattagggtatgcaacggtcagaagtaggtaagtgaggagtcagttcaccctacatgtaatttttcatttatttattttttttgagacaaagtcccgctctgtcgcccaaggtggagtacaatggcgcaacctcggctcactgcaacatctgcctcccatgttcaagtgattctcctgcctcagcctcctgagtagctgggagtacaggtgcgtgccaccatgcctggctaatttttgtatttttagtagagatggggttttactgtgttggccaggctggtcttgtactcccaacctgaggtgatccacccacctcggcctcccaaagtgctgggattacaggcgttagccactgtgccctgcccccaacatgtaacttctgttagcttcaaagccacctctggggccctgcaccacatatgagctgaaggacacccgtgccttttcacccgtgtagctccagcatcttggcacactgtctagaatgttcaatgaatgtgcacggaagagcattctggctccagggagcgaggactgagtcagctctgggaacagatgagtcaggctggtggtccaggcattgcttttcaagtccttcatgtggctggaagaaccagtcaactggaaccggatcaacaggggtgatggcatggcaagagttatctcctggcagtgcccttctggcctcacttgccttcttgggccaggaaaggcaaagctcacaggactgtattcagtgcccaccccttcccccgtcctgtgccattggctctggaaggtccctgaaaccccgagtctggaggagaacagttgaccagcagggcgggccctcagcatagtcctctctgttcccactcacccgctctgccagccccagatcctggcaggaaggaagattggagggggtgtctggaatccaatcccagaccttcccttgcagacttgcccatctgtctgtggtctagtgtggaggcgaggtccagggtttgggaggggtgtgggggcacatgtctgccaaggcatggagccctcccagctggaaaatcctctgaacctgtaagaagagaacacagccggcatggacacacccttacccttagtctcagttcccaccaagacacagagcatttcctgtgccttttccgctatttcacaacctgccttttcttgctcaccaaggacagaggcttcttttcctaccagaagccagacagctggctcgagcctctcctgctcagcaccatggctaagacccctagtgaccatctgctgtccaccctggaggagctggtgccctatgacttcgagaagttcaagttcaagctgcagaacaccagtgtgcagaaggagcactccaggatcccccggagccagatccagagagccaggccggtgaagatgg

SEQ ID NO: 15158 - DNA, 2300 bp, Homo sapien
ggattacaggctcacaccaccatgccaggctaatttttgtatttttagtaaagacggggtttcaccatgttggccaggccagtctcaaacaactgacctcaagtgatccaaccgccttggcctcccaaagtgctgtgattacaggcatgagccaccgtgccccctggtttcatattttaatagggcacttgaagaaggcttttgtgcttgaacagagacccaaaggaagaggagtaagccaggtattcattttgaggatgagcagtctttgcctatttacagagtgcaaaaggggtaactttgtgcttagtgtttgaggaagagtggtggctggagcagaggcacggaggaggagtggatggaggggttagagagggagctggagtcccctatcaagtagcagggctcccaggacacagcaaggacttggctcttactctgagatgaggggacactggaaagtttgagcagagcagtgacataattggagttacgctttaaaagaaacattctgggccgggcgcggtggctcacacatataatccagcactttgggaagccaaggaaggtggatcacctgaggtcagaagttcgagataagcctggccaacatggtgaaagcccgtctctactgaaaatacaaaaatttgctgagtgtggtggtgatgtgcgcgtagtcccagctactctggaggctgaggtgaatcacctgaacctgggaggcggaggttgcagtgacctgtgatcgcaccactgtactctggcctgggtgaaagagtgagactgtttcaaaaaaagaaagaaaagaaaagagaacactctggcttccataagagacaagagatgagaaaggtggaaacagagaggagaaagcaatctattgtcacaatgcaggaaagcgactgcagggccctgaaccactgtggaggcagaagggtcagattctgggtgattctgaaagcagggctgacatgataagggtagactggatactggcgggtgtgaagatgcatctaagatacctgtttctggccagattttacaaagggcccttgttgctaccttaaggagttagtgttgaatcctgcagcagctaagagcttctgcaggatctccctctcaacttggaccaacccacctgccgatcccagcccagatcaatgagatctgctgcccagtcccctacgcagataacactaattgtaactgatctttctgagggcacctcctgagcagcttggaaacggagggagaggagaggaagccagcttcccaaagtggggtgtggcaggtggccttaaccctgctgaagggctgcagtcatggggctctgaatagatccccacaccactcaccaatgagcttcatttggaaggcggtaacgttaaacaagagggtttgtaaaaaataaaggcctacacacataattttttctgattattaaatctaggtggagagtacgtgagtattcatgttactctctcaactttcttgtgcttaaaaatcttaaaataaaaactttaatacgctctgtcctaccaatatttataggaacctgactagcagccaggctttggacacgcaatccccggccaccaaagggctgacaggctagtgaaaggggcagaaaaataacaaaactgtgtctggaaggcagctactccctttttttgtttgtttgttttttgagacgcagtctcactctgtcgcccatgctggagtgcagtggcgcgatcttagctcactacatgtgcctccggggttcaagcgattctcctgcctcagcctcctgagtagctgggactacaggcgcgcgccaccacgcccggctaatttttgtattttttagtagagacagggtttcaccatattggtcaggctggtctcgaactcctgacctcgcgatccgaccgcctcggcctcccaaagtggtgggattacaggcgtgagccaccgcgcccggccctttgttttcttaccaactaagcagcagcactgacactgtttcctttgaggttccgtttgctgaatcctgccctctaaggtgctccgcccttccactccccgccccgtgctgctgtcattcccacgcctcaccctgttttgcaacttcttgtttatgagcctggaagccacgaagtggtgggaaatacgagattcaaatatctggtggccgtgtgacgtgagtaaattactcgatttttctcagtttccatttcctatcaaatgggttgttctgggaattcggggaagtaacagtgccgggaaccgcgggaggaaccgccagctgcgtcctcgga

SEQ ID NO: 15159 - DNA, 2300 bp, Homo sapien
cttttttgagataaggcacacattcaggaacttgctgtgcatgcgtaacagctactatttatcggattcatactatgtgccaggtactgttctaagcatcctgtgtagctccgctcatttcatcctaacccagtgatatgaggtgaggtgcgtatagtagtccctcaaaacaaatgaggaaactgaagtttggggtttagtgagattacataagttgcctgagattacatagtaaatgtcagagaaaagtggttttgaggctagagtcttctgcaattggttatgagtctagaatctatgtctcttgaaataggaatgtccaatgatcgtgccattgcacttcagcctgggcgacagagcaagaccctatctcaaaaacaaaagaacaggaatgcctaaaaccaccagaatggtcctagggagcaaacaaggctttccaaactggaccttgagtgctatggggtcgctggctctgcatctgccacgacagcctgtggatctgtcatcttccctggaataaaatttttaaaaaaggccaggcgtggtggctcacgcctgtaatcccagcacagtgggaggctaaggcgggcagatcactcgaggtgaggaatttgagaccagcctggccaacatggtgaaaccccgtctctactaaaaatacaaaaattagccgggcgtggtggtgggcgcttgtaatcccggctactcaggaggctgaggcaggagaatcgcttgaacccgggagggggaggtttcagtgagccgagactgcgccattgcactccagcctgggcaacaagagcgaaactccgtctcggaaaaaaaaaaaaaagaaaaaaactaaaatatcagtactcttttcacttagtcatcacaaacccctttaatcccatattaccctctactatcatggtagcctcacctttgacgacagactagctgtgtgacccaagtaaatgacttcagtgccaccacctgtaggaaggggctgctaatagcatctgcttcatactaacgtgttttcaggatcgatctgcatataaacgctcaatacacggtaactgattgtcacattctatcccaggacgcttccatttgcggatctcatggcccggaggacctgggccgcctcacaactgggcagccccgctcaccgacacaaagcccacaaccgcgcccaatagggaatcggccctgcggccctcctgccactcgcccccaactatcacagtccacggcggagctggaggcagatcccgcccttgcagggctgggtaagagactgaaacttggagaatgaactgcaggcgctgcacatctcgggcagatttaaaattcggtctaaaatcggaagcaggtgccgcgaacccagacccgagcgctcctctgggacgtccagccgcagaagcgagcccaaagcccagcagggttctccgcgggactcggggtttcagaaccgccgggctcttgggcgctcgcccagggcgcacgcgcagtcgcgaggccgcgccgcggactgcatctcccagcaggccccgcgcagcaggccacgcggcgccactgactgggcgggcggctagctccctggcctccccgacatgccgaggagcccctggcttccggagccgacgaggccgcaggggccaatgggaccatcttcagccagcccagagtagccgaagcgggtggggcctggcttgggaaaggattcatccggggaagctgattaacaattcagatttccgggtctcaccccgacactgacgcactggagagcgcgtggccctgggatctgcgttttcccaagcgctccggagtaattctaacccaggttgcccgccagtcacaacgacctcaggcttgttttcttcgcttggatccagctgccctgcccccagtcactcccagaatttcagggcgcgccccgtggccccgcctctcgtctccaattggtccctcgctcatccagtccccgtaggccaatcttcccttctcattggtaggcggtgagtgtgtggagaaacctgacctaatgggcgctggagttcgcaaaacgtgacccggaaattggtcacgagcaggcgccgtgggcttgtggacgcctaacttgcgcgctgagatttccggcgtgggagcagaggtctgagtcttgcgtgggtcctctatatagggtgagaagcgtggcgctcggttcctgcctcggggaagtcctggcgcagatgggccacggggccggcgtggcggcgcctgggaccgactgaggcctaggcgccggagccggccgcgcctgggctggagcg

SEQ ID NO: 15160 - DNA, 2300 bp, Homo sapien
atgaaaactgcacttacaatttgaaaggagagaaaagtaatgtaaattctttccaattttacttaaattaggaataaattcgcagagggagttggtgtctggaggaggcttgaataaattttatgctgaagttgacttaagatagtaagaatagcttgtatattttcaaacatggaaagtgggcatttgcttttcattaaaattcacaggccgggcgcagtggctcacacccgtaatcgcagcactttgggaggctgaggcaggcggatcacgaggtcaggagttcaagaccaacctgagaaacatggtgaaacctcgtctctactaaaaatacaagtcaggtgtggtggcacgcgcctgtaatcccagctactcaggaggctgaggcagaattgcttgaacctgggaggtggaggttgcagcgagccaagatcgtgccactgcactccagcttgggtgatacagcgagactccatctcaaaaaaaaaaaaaaaaagagaaattcatattagccagtaatgaaaatggcaaggtactagagcaagagtggaccccagtagttctgtatttagtcactaattttatactataattgcctagtattcaccagtgtaacagaatacccatctcagaaacagattcttttttttttttttttttttttttttgagacggagtctcgctctgtcgcccaggctggagtgcagtggcgcgatctcggctcactgcaagctccgcctcccaggttcacgccattttcctgtctcagcctcccgagtagctgggactacaggcgcctgccactgcgcccggctaattttttgtatttttagtagaaacggggtttcaccatgttagccaagatggtctcgatctcctgacctcgtgatctgccctcctcggcctcccaaagtgctgggattacagccgtgagccaccgcgcccggccagaaacagattcttgaagataatatatgagaaaggaaacactgaaagccaataagagctaattatccaaacaaagcttgttatttgcaaatatcaactcacctgacaccttatattaaatagggaacaaccataaagataccattcttttggttacaaaattagcaaaaactaagagcttaacaatattcaatgttgggattggtgcattgggagaagtactttcaaaataatggtgggaatgtgaaagcaatttaacagcgtgtatcgcagctttttcaaaagttcattctatttgacctggtagttcaactgatacgttacatcccctggtggagtattaaaaaaccatcaaatgtgaggttaagagattttaatgacctaagggaaactctcagaaatagtgccgtatgatggttaaaagcctgagctttggcattaaacagaatttaagtctcacctctgctgtttaccagtttatgtgacctttgtcgagttacttaatctctctaaatctgtttccttatgtatttgaaaagggaagtcattattatgaagactaacatatatatacgatcctatatactcaataaatgctaacgtattagtaacaaaccataaaatatgttaagacagtaagagataaggttttatttacaatgtaatctgcctatttaaaaaatatatggtatacaccgaagtgttgaggttatcattagtcaatagaattgagtgctttttatctttttttatatattccctataatcagcatgttactttcacagtaagaggaaaacaaacactaaataggtagtaacagagttaagaaagcagagtgtgttttaccattaaattgaaaacctaatttatccttatcttaaagctaactagaactagtcagcacagtttctttgttatacgatatgattacaaactaatgcttttcgcaaaggcattccaccttagataatctgggacaatacttcattattcagatccttgtgtaaaatttaaaaaaatgaatttatgaaacacaaatttaaataaatttaaagaaacacaaatgtattattttcaaactgtaaattttataaccattatataaatgggcactgatatacaaaataatgtcagttgctaaaacaagacaattcacagctggcctacatcatataatggcagaaatctttaaacacaaaatctaatgattagaaccagaagttgaaggcccactgaaggagtccttaatattatgaggcctaggtttcaaaaagctaccaattctagaatggattttactctggaactgtttcttgactatttcttgttgcatctctttcagtgtgaagtg

SEQ ID NO: 15161 - DNA, 2300 bp, Homo sapien
ccagtggacagtagcgccatcagcattaagattctcatcacctggcccaatgctgaatatataattagaatttattaagttgaataagtgaagttctgctagcagtgctaagcagtgcccttggatatcattgacaggcctgattcataacacaggaagttggttaaagggaaaagggattcatgggaaaaagaggcagcaaggcacaaattgtgaatagtgaataagaggcactggtgattttcattgtgtgaggtttgctgccatagtggcttatcctttgaagcccacaaacattccttgagcctttccttttggtttcacctccccttgcttgggcactgttttagaaatgatgactgtggctgggcgcagtggcttacacctgtaatcccagcactttgggaggcctaggtgggtggatcacttgaggtcaggagttcgagaccagcctggccaacatggcaaaaccttgtctgtactaaaaatataaaaattagcggggcatggtggtgcgtgcctgtaatcccagctacttaggaggctgaggcacgagaatggcctgaaccctggaggcagaggttgcagtgagccgagattgtgtcactgcactccagcctgggcgacagaaccagaccccatctcaaaaaaaaaaaaaaaaaaaaaagacgacggcacagctgagaagcattgaaagcaaatacattaattctgagacacctacacaactgtcatagtggcctgaatatttttgctaggtgactagcttgagttaatggtgctgctattggctagcaaatacttttttatttttctatttataagtgaaagagataaaccaagatttatgtctgagttatcacttactaactgccttaattatagttgcctcatttagaaagttgcttgatcgtagcctgccattggctccaccccctaattactaccatattctcttgtaatcttctccatgctctataactcatagttggcatttcttgcaatgaatgttacaggaaaaccagtggtctgactcttctgggtttttagatgagagacctaagagaattctatgggccaggtgtggtggctcacgcctgtaatcccagcactttgggaggctgaggcgggcggatcatgagttcagaagttcgagaccagcctggccaacatagtgaaatcctctttaccaaaaaaatacaaaaattagccgggtgtggtggcacacacctgtagtcccagctactcaggaagctgaggcaggagaattgcttgaacccgggaggcagaggttgtagtgagccgagatggcggcatcgcactccagcctgggtgacagagcaagactctgtctcaaaaaaaaaaagagagagaattctatgtagttgaggaatgaatgggccagtcagattctgccctaaagaagaggaagaataactgagataccagccatttcccttatttctctgacatacttttctttcttcgtagcacctggaatggataaaagtggcagtttttgtttcttcccatgaggttgtgtatctggactgagaaccaggaaattaatctagactaagacatttctaaggacctggaatggctttggggagcaccaggaggacccgaaaagagtatttgagggcctagagggacagaagagtttgccagtaggatttatgagaaacaattgatcagaaacagcagcagagaaaccttttagatttcttctgtggaaaagttgagtcttggttcaaattaagtaaaataaacactgaagagaaatcaaaatctcaaatataaaaagtatgttacttatagtgtaaatttaggaaaacaaatgaaaggacagatctttaaaaatttttaactatggtgaaatatttgtaaaacttttgggctcatctctgagaattgctgtgattctgaaacttgataatatctcaaatagagaacagtttcagtgaaaaatagcacttgagaataaatcagatgttcccaagaaagaagatctgagaatggtaaagtgccactgacaaataaattatttacatacttacatattaccttggcaaacacaagagacattcaagttaaagcacggtgcttgacaatactatattgaatgcaataaaagttggatttcattcatatgtacaacaaactactttcttcttcacttcaagattcggtacaactgttcctgaattccaactctccatacatcccaatgtcagggtccctgtagctcggagcccttatccaggtagatgaactgctgcccagtgaacactatgtac

SEQ ID NO: 15162 - DNA, 2300 bp, Homo sapien
ctgcttagcactgctagcagaacttcacttattcaacttaataaattctaattatatattcagcattgggccaggtgatgagaatcttaatgctgatggcgctactgtccactggttctgatagactgagaatatttactgctgaagaaatgaagtcccaacctggctgagattttaaggaaatgaacctacttagacacaaattcaagtgacttaggcagatgctcattattaaatctgtttatctttctctctcacttaaaaaggatcaagatctatgcctaagaggagttacataccatcccatccaaaagcaaaaatagcataatggcctggtaatggcctctcatcttcattctcaccttaaacttaccttagatgaactgccatagaaagcagctcagtccaaaacgctcaaatggtgctccaggatttacttttttgtattgttttgttttgttttttgcgacggagtctcgctctgtcgcccaggctggaatgcagtggcgtgaactcggctcactgcaagctccgcctcccgggttcacgccattctcctgcctcagcctcccgagtagctgggactacaggcgcccaccaccacgcccggctaatttttttttgtattttttagtagagacggggtttcaccatgttagccaggatggtctcgatctcctgacctcatgatccgcccgcctcggcctcccaaagtgctgggattacaggcgtaagccaccgcgcccggccaggatttactttcttaaatgcactcttttcattcccattcaaaggactccagtataagtgccacataaactcgttttctaacttttaaaactcttcctctaaatgcagcccaactcagtaaaaacgtacctaagatctcacagtctaatgtttccagcttttaaagcctttactcctacccttccctctgcctggaaagtgtctccattccctgctgtggacaaaatccctcaaggtcttttataatttcccccaaccccaaatcaacttggattttcttggagttctcacagcattcagtttatgtcctattcttacccttgtgttactgatattcacgaaattgctcagtcctttcaagagattgcttaaggacaaagacttcttactcaactctgcaatattggctacacatagctgacttaataaatagtcccttgactggtataagctgacgttacaaaaactggtaattccgaaaccactcatactggacttattaaataatccctcaactggtacagactgacattacaaaaacggattaattcagagatcactgaacacccaaaacactcagattcttataactatgattcagtaaatatgtgtggaatgcctatcttaccaggtgactatgttaggcgctgcatgagatataagatgaaaacaaggttcccattttccagggaagaatactggagtggaaaacgcagaggataccacaacaggagagctatttccgattagcggccgccactgctgagctatgtgaccctgagcaagtcacttcttaggtctccgtttctctgtcaaggagagatagaaaaagaacctatttcacaggttcaaacctacctcaagaaaaaatagttgtggggaatgcgtcacgagacctagaaaacggtacaaaaccctcggggggccgctgtttctgacctagcgagtggcccgacccggacaaaatgcctcttcctcgaggaggcggcgacgagcccagcaacagctcgagcacggccggccgggccgcgggaagcccgagaacgcggcgcgcgcagctgggaggcgacccttacccggcgaggctcccgggaccaaacgccgcccgacagccacgcagaacagacgcggcagtgcgacgcctcccccactggggacacgagacagcgacagccacgcggtgagccggtacaaggccctctaggcttcagcgggtctggatactcggtggcattaacccttccctaccgccggggaagacagcagtttctctggcgaggaagtaggccgggctcaggcgccttagccagagggcgggcctgcgccaccctcggaaagcgtcacttccacttccggccggcgctctggctctgtacctggacagggctgcggtaggccagcggtgggctggcggttgcgctcctcagatcggcggcctttcgggcggtggcttgcgtttgagcctcagaaagcgaggagcggcctccacggaagccaagctggccgaggtaaccgagaagcggcttcccctatggcttcgaccctggagc

SEQ ID NO: 15163 - DNA, 2300 bp, Homo sapien
aagggctgtggtttatgatcttcagaaaagttgagatcctggccaaggaaaggggatggtgattggcccattattaacaagagctgatttttttgttcatgagatgggttttttgtttgtttgtttgtttttcttttcttttcttttttttttttttttttgagacagagtctagctctgttgcccaggctgaagtgtagtagtgcaatctcaactcactgcaacttccgcctccctgtttcaagtgtttctgctgcctcagcctcctgagtagctggggctgcaggcgcccgccaccatgcccgacaaattttttgtattattagtagagacggggtttcaccatgttggccaggctgatctcaaactcttggcctcaagtgatctgcccactttgacctcccaaagtgttgggattacaggcgtgagccactgtacccggtctcatgagatgttaagaattatttgatgatttagacgtggacacagtagttatatacctcaaaagagggatctcctctgtaaatcttctaatttcccttactaattatgaatacccattaactattttaacccctttttgtgtaacctctgtttatatcttttgccttttccacctaaacttatttaagcttaagtgaagttttgtttgctctacattgacctcctcttaaattgtacattcccagcttctgtatttggagcataagtctgtatctactctttccattatttctgtgactttatagattcatcatgttattcctcaaacatcatctttctagatccagcactgaggtaaaactcagaggggagggatgtagaagagagcagaggaaatttaacagaaaattctggggagcttttccaaatacaatgtgtctgcttccccccttccctgagcgtatcagaatcttggctggggaaatgtgttgttgctgttgttttcaagagatagggtctccctctgtcactcaggcattggagtacaggggctcactgctgccttgaacactggggctcaagagatcctcccacctcagcctcttaaaatgctgggattacaggtgtgagccaccatgcctgactgaaatttcagtctgactgaaagtttttgagaactttcacatctaattctaatggtcaactctctctatcccgtcatagccattgttctgaactgaagggctcttcagttcttggggtcttttggttttgtcatcatgaggcacttccttcatttccgtgttagctcatacctgacattctgatggaatcaacttttccattcggtgtgtaaccaacagtagatggggattacaacagaagtttgaaatctaggccacgcacggtggctcacacctgtaatcccagctttttgagaggctgaggctggcatatcacgaggtcaggagttcgagaccagcctggccaacatggtgaaaccccgtctctactaaaacaaaaattagccaggcatggtggtgcatgcctgtagtcccagctactcgtgaggctgaggcaggagaattgcttgcacctgggaggcggaagttgcaatgagccgagattgcaccactgcactccagcctgggtgacagagcgagactctgtctcaaaaaaaaaaaaaaagcttgcaatcttaaaaagtaagttggagtccaggtgcagtggttcatgcctgtaatcccagcactttgggaggctgaggcagatggatcacttgagcccaagagttggagacaaccctgggcaacatggcaaaaccccatctctacaaaaaatacaaaagttatttggatgtggtggcacacacctgtggtcacagttacttgggaggctgagacaagaggattgcttgagccagggagaaggaggttgcagtgagctgagattgtgccactgcactccaacctgggtgacagtgagagactctgtctcaaaaaacaaacaaaaaataggttgttacttaactatggatcccagagaactattagaccgttcctgatgcaaatccacctcatccaacagctttttcttgacttttcttccagcagcttgcgctaaatgaattcatcaagtgactgaagacaaccagtgatggacggggtgaatgatagctccttgcagggctttgttctgatgggcatatcagaccatccccagctggagatgatcttttttatagccatcctcttctcctatttgctgaccctacttgggaactcaaccatcatcttgctttcccgcctggaggcccggctccatacacccatgtacttcttcctcagcaacctctc

SEQ ID NO: 15164 - DNA, 2300 bp, Homo sapien
cggcccacctcagcctcccaaagtgctgggatgacaggtgtgagccaccacccctggccctgttcactgctttatatttggctccagtacctcatatattataggcaatcacatgtttccggaataaatgaatggattctcccaacccttacctgtctacttcaggtcatctagagtggctgacaggcatggattggagactctaacggtacttgttttcatttttctgcccagcagactagaggacaaagcagcctggagggcagaggcaacctaaacatgcaaggagttcaacagttgtacccccatttacctggccacggtaggcccaggaatgggaggagcctactagtgaggccccgaagtgtctcactttccttatctcttccgttgacttgcactggctctcctcatttatccagccaccttctctgagctgataatccaaagcccatcagtaactagtccactcctgtctcctcttctccaccatgaatcaccaatgaagtcatggtgtcccaaataggtcacattccagcccacctctttgtcgaggccctttgaagatgtttttttctgagttgagcagaggctgtgaaatatgtgactttcggagctgtcctgcagagcttctccttaggggcatggtcgaggacagcaaatgcagagagaagcagtggcccaggcagagctcaataaagaaacaaaagtatattctcctcttctgcctttgcttctccttcgtccccttaaattctttttcttctggatttgaggtagaaagcacattctcctttgctcatatttaacttttctcacttagaaaaaaagtgaagctcgctgccagcactcatttaatttcatataaacatgctctctgagggtgaagcaaatgtgactgattttcaatgtgaaaataaaatataaaaactgttcttggagttatttctaaacagaaataacattagaattgcctgaatcatcagaattgtctttcagaaaaatcagattcatcaaatagatctttggcttacaactgttagagaatgatgttatcatatgtaagaatgctatgttttctaggatttgacattttcagcgattgagaattactgtattttgtaaaaggaaataccactactaaatgctgtaaatagaatgatgtcttttgtttccaaagttgatatactagagcaatgcgaaaataataaaagagagatggccaggagcagtggctcacacctgtaatcccaacactttgggatgctgaggcaggaggatcacttgaggccagttcaagaccagcctggtcaacatggcaaaaccctgttagttgggcatggtggtgcaggcctgtagtcacagctacttgggaggctgaggcacgagaattgctttaacctggaatgcagaggttgcagtgacctgagatcgcaccactgcactccagtctgggcgacagagagagaccctgtctcaaaaaataataaaagcaagctattttgtagcaaagttatctcagggtaaacactgcagctgccagtgctgctggcaagtattcttggggcaaatgcttaacttttcaaaaagctcaagagaccatgatgcttgttttgcaccataccttagaaaacgtcctactaccttgtgtgcaccagccaacaaccatagacaaatgtacctatcttctaccactttttatccatggcaatttcataaaagtttaactatctgtgactcatcacagatgaattttaagtttagttcctagtgtttctcatatccatccttcctttcacctaccattctcatctactaaactcttcaggagtcagaatctcttgatgaaccttgtttttcccttgtttctgtgatcttccctctcatgatggcacaaacccttcccaatccaattaattccctcttccccatttcctacccctattccttctctgcatgtcctactgccctgaagcaggctctacacttacatacatcattttcaggaccctgcaggcttctgcacgagtatagtttctgatggagaaaattacaaccaaaggccaaggaagtggagggagaaacaactttattttcatcagaaattagtaatgtttataaatttgtttatagtagtttgtaaattattatcagaaatagtaatgtctataaaccacttactttaagagacaatcaggaactatgatgagggcaataataaaaggagaaatcttacaaaaaattaacctggatgttgtgcttgctctaaggttaagtcacttagggaaacagattcagta

SEQ ID NO: 15165 - DNA, 2300 bp, Homo sapien
acccgggaggcggaggttgcagtgagctgtgatcacgccattgcactccagcctgggcaacaagagcgagactgtctcaaaaaaagaaaaagtccctctcattggttctggtggggatattaattacaatacccacttccccagaagtgggcatatgacacacagctaggcctatcaaaattcttttctcagattttacatgagaggtagggaaagctcttcattttctaggaattggtaaattgggcaaatgtaagatcagagttgtctccaactatgtcccactctctactccactcttccatcacaggagtgagcctgtttacaagaggacaatatactcaagtcttgacaacatgtttggatctccaaggccagtttatgtaaggcaatatttttttaagagttaattttaaaaatagttttatataatttaaaattaataaataacttttaaaaataattttatttgtttttttatctttagagatggagtctcactctgttgcccaggctggtctcaaactcctgaactcaagcaatcctcccacctcaacctcccaaagtgttaggattacaagtataagccaccatgcccgaccttaaaaataattttaaatagaagctaacttttgtattttttgtagaggtggagtttcactatgttgcccaggctggtctcaaactcctgtgctcaagtgatcctcccaccttggcctcccaaagtgctgggattacaggtgtgagccactgcacccgcgaaggcagtcttttttaatgagtttgtgttggtttttatctacttaaaacacagattaaagcagatcgtaatttacattttctccaggggctgatacaccctcaccatgtggtattaaaatggatccagcatgcacaacaagatgaatatactcaggactactgagctgtacacttaaaaatggttatgatggtaaatgttttttaaaaattaaagaaatttttttatattttaaaaatggatttgggttcccttttctcaaggaacttgaactgccttcacttaaattctctttacatttcagtgcttctagagatagagaaatcaagggcattattattgttagcactgctttctagccaaaaagaaactgagagcgatgaagtatcttgcctaaagcatcacacagcacagctcctaggcagcaaggccaggactagaaccagcaccccttgccttcattatgttcatcctgtgccttacctggctgaagaagaatttaataaaagctcttctaacttcatgcagaaggcggaacctgcacccttcttgaccccttttgaccccttacctcccactcatcgttaaattttaaaatgctgttctctgaaaattttacttcactctagcgatggcccaaacactcggaaaaaaatgtagcatgaggatggggagccaggttgataggtttttcacttagttaactatttattgagtactcagaacgcactcggtgccagggctaggcactgtggatgagtagggagtgggcgagacagggacgagatgagcagggtcaaggccagggggtcccggggcgccggcgctcaggctcggggtgatccgcacggtgggagcggggcacggtgatcgcggcgcgtctggggacgcccggcctgagggaggctgcctgtcccaaggagacgcccatcggggccggacccgaacgcctcggagaagactcccagcggggaggggctcctcggccgtcgcagggcccagcggctaatcccgccggccgcaaggaagcggagaactcaccggacaccagcactcgcgactccacaaactccctcagcctccgggccggaagtcagcggcgcgattcgctccgcccattacgcacgcccctgcgcaggcccgcaagccgaattgccggactgcagctcccgggatgcactgcgacggtattgacaggcgcagcaaccaatagacggtagagaatgcccttggcaggaggcgggccctgtcagtagttgtcctcagcagctagtgggcgtctccgcagcgagtggcatcggccccgcccccagcccgtgctcgccggtgtcgggtcctaagtccctcggtcttgggttcccggagaggtgagtcggctgcaggtgggtgcggggcgccgggctgttcggggtaccggtgtcgcagtcgccagtccgagctcacaccgggcgtggagttcagctgcgcatcgggttgcggcagcttcgccaggcctggggctggctgggccgcggggccgccctggaggccggagccactg

SEQ ID NO: 15166 - DNA, 2300 bp, Homo sapien
caataagctagaacttccaatgaaatgaagttccccaaagtccaactgctacccaacagggtgaccctatctgctaagaattctgctagtaggaaaactaagttgggtgggggaagagctgacagaagggatttaagaaccttacaattacttctggtgacacaaggtgcataaaggaatggtaagaaccttggtcctctgttgcctcactgggtatcagtagttggattttctaaaaacctgttaataactcaggataggttcccagatagaggctggaagcaacttctgaagccatccagtccacttctgagacttaaatagggagagatccagataccaaacattacccagatgaaaaagaaatcggccgggcacggtggctcacacctgtagtcccagcactttgggaggccgaggcgggcggatcacgaggtcaggagatcgagaccatcctggctaacacggtgaaaccctgtctctactaaaaatacaaaaaattagccgggcgcggtggcgggcgcctgtagtcccagctactcgggaggctgaggcaggagaatggcgtgaacccgggaggcggagcttgcagtgagccgagatagcgccactgcactcgggcctgggcgaaagagcaagattccgtctcaaaaaaagaaaaaaaaaaaaaaagaaaagaaaaagaaatccccaggatgatgggagaggaccctccttacccactgctttggtttcttggatgctctgtgaaaatcttccacgagggtcacaatctccttgctgctcattggacatcgatgcctgacccgagcctggatctccgggggcaggatggtcaggaactgctccatcaccagaagctccaaaatctgctccttggtgtgcagctcgggttgcaaccactgacggcagagctgtcggagctgggagagagcctcttggggtccagacacctcttgataacaaaagcgtctgaagctctggcggcagagctcaggatctgggcagtttttttgcagaggagggccccgtttctcttctagtttggctattatgtgtctctcttgcttggaggaagcttcagtgttggagcttaaagttatctccattttagctgccattttgggcgtcaggagacaactctctccttgtaaacgggttaagcctttgggatcatgaccctggagaagtctctgaatactagaaagattctagaaacgaaggttctctgaggatgttagggggaacgggatgcagagacaaagcctcacttgctagcctttactagccaaactcaagacaacgcggtccctgggagtgggaagagttttgtcttcttgtcagttttttgcagtcttgcaaaggagaaaagtcataacgtcctaaaaggactctggggaaaaaatacttcttttatttcagtagcaagcacacaggtctcggatttaatgagcaatacgctctaaccggcgggtggagcggaatccctaggaaaagttcaagctgtcgcaggtagcttgccccaactctcccgcatcctggcggaaaccgaccgggtgcatgtcgccgggtgctaaacggtagagctaagcgaggccacagcgccagccgggggtgtgaggtagcgaacagcctcctgcacgcgagcaaagcggctgctcgctgccgaggcgccgcaggcccagtggctccggcctccagggcggccccgcggcccagccagccccaggcctggcgaagctgccgcaacccgatgcgcagctgaactccacgcccggtgtgagctcggactggcgactgcgacaccggtaccccgaacagcccggcgccccgcacccacctgcagccgactcacctctccgggaacccaagaccgagggacttaggacccgacaccggcgagcacgggctgggggcggggccgatgccactcgctgcggagacgcccactagctgctgaggacaactactgacagggcccgcctcctgccaagggcattctctaccgtctattggttgctgcgcctgtcaataccgtcgcagtgcatcccgggagctgcagtccggcaattcggcttgcgggcctgcgcaggggcgtgcgtaatgggcggagcgaatcgcgccgctgacttccggcccggaggctgagggagtttgtggagtcgcgagtgctggtgtccggtgagttctccgcttccttgcggccggcgggattagccgctgggccctgcgacggccgaggagcccctccccgctgggagtcttctccgaggcgttcgggtccggccccgatgggcgtc

SEQ ID NO: 15167 - DNA, 2300 bp, Homo sapien
gagattgcaccattgcactccagcctgggcaacaagagtaaaactccgtctcaagcagagcttgcagtgagctgagatcgtgccactgcactccagcctgggcaacagagcgacactccatctcaaaaacaaaaacaaaaacaaaacaacaacaaaaaaaactctgtctcaaaaaataaattaaaataaaatgaaattagccagatgtggtggcatgcgcctgtagtcccagctacttgggaggctgggccaggagaatcgtttgaatccaggaggcagagattgcagtgagccgagatcgcgccattgcactccagcctaggcgtcgcagcgagactgtctcaaaaaaaaaaaaaaaaagaaaagaaaaggagaaagttgggcagcccaggaagaatcataaagagataaaggttacaggattctcccaacatccttccctttgctatttcctctcgtccccatgacactcattgctaagctcactccagcacttcatccaggcctaccccaccttctctaacggtgtgataaattaatcacttgggatttattattactcaacgagtgtggagtctagaaatgtgcttaatttaaaaattcattcaaattggagaagtaccaaatctgtaattttgggaaccattccagaaagtcacttttaatcctagcactttggggagccgaggtgggaggatagctgaaggccaggagttccttggcaaagcagcaagactccatctccataaagaagttttaggccgggcgcagtggctcacacctgtaattccagcactttgggagaccgaggcgggcggatcacaaggtcaggagattgagaccatcctggctaacacggtgaaaccccgtctctactaaaaatacaaaaaattagcagggcgtggcggcaggcgcctgtagtcccatctactcgggaggctgaggcaggagaatggcatgaacccgggaggcggagcttgcagtgagccgagatcgcgccactgcactccagcctgggcgacagagcgagactctgtatcaaaaaaaaaaaaaaaagaacttttaaaagtagccagacactgtggtatgcgcgcctctcagatactcgagaggctgaggcgtaaggattccctgagttccagacggagctatgatatcagcactgcactccagccagacaagcaacactccagcgacaaggccagaccctatctccaaacaaaacaaaacaaacagataagacattgagaaactctctcagagattcctccacaggtccctgctcccagttggtagttctgaaagaaggaagttggtaaaccattatgtgtgtggtcttggaacgaagaacacttggtcaaagggctatttggggctcaggagcactcctaccacaacaggcatgcccaactctcctccaaaggagggggtcaggcagagaccgaaagcagcaataaacttggacgaaaaaggtacctcgactcacctgggcctcgggcgtcgggggcatggacgccatttggcgggtggggaatgccttcttcaagacgccacagggacttcgtgacaaagctgcggggggagagaacagttcttaaagggaccaattccgctgccaagttcctccactacccctagcctccctcgattccctccgaacccccccttaaaaacctacgccgactgctcctcctcttggcccggcctcgaaaggggcccacttaccgctccgcggttaataacaggcctcgcgctccctgacaggagctgcagaaagcgacgcccgaccgagacgcgacgaagaacgccacggccactgcaaaactcccacgctctcatgctcctttacgcaggagctgcgggaaaagccgccggaagcgacccgccctcagccctctccgccatcctgccctttgattggtcgaagttctcccgaaggggaagtccttcttttgtgttgaccaattgaacaccttaaccgaggacctgtagccactgggcagctgcgagaggtagttttcctccttttctctaagcaaccatttccgcttccgctggcggggtctcctccgtgagctccgggcctgtttgcctgctgaagtagagtcttagggtgaccccagggggacgtaatgtttccgagaagaaggacagaaagaagactgggagacaccggaactcgaaagaaaatcggtaacaaaatgtgggttcggccaacagtgccctgtaggcctgaaatttcggtctggccagagcaaggtgattgagagggcgggggttcgggcctagcctgggcttga

SEQ ID NO: 15168 - DNA, 2300 bp, Homo sapien
gtgctgatgtaagaatagcattaaataggcggggcgcggtggctcacgcttgtaatcccagcactttgggaagccgaggtggatcatgaggtcacgagatcgagaccatcctggccaacatgatgaaaccccatctctactaaaaatacaaaaaaaaaaaattagccggacgtggtggcgggcacctgtagtcccagctactcaggaggcttaggcaggagaatcatttgaaccccggaggcagaggttgcagtgagtcaggattgtgccactgcaccccagtctggctacagagtgagactgtctcaaaaaaaaaaaaaaaaaagagataagcacaaaccaagaagggaaagatgactacgtgaacaccacagtgactcaaccatgaacatctcctttacttacaccttcatatacaggctattagctcttcttcaacatatatgctttggactggtctagcctgtaggcaagtttgttcttaccattcttccacctgtcctggaagcacctttactgggacttcacagctacctcttttgtgatccatccccacaaggtctagctcttagttagctgtcaagagatatcatttgtggcagatactgctagtttcttatctaacttattttccacatctctttttttcatttgtaacaaagccctaattttgtgcaggtagattatcaagggaggctaggtccttcccctagtgacaggggctgaagcatgatgggccccaaacaattatttattcttggtaataactagtttaggatgggtacatgacacaatacatgtctgtatattttacctggattctattgtcaacgttaccaacatgcttagggtggcagagaagcactgggaccttgatgttgtcactgggccaccgaattaaccaacctgtaactgctctttgaacatcctttcggtgggttttctgttacttgtagctgaaactatcctatcagatattccacaaaatcacattacctaagttgtcaaatctcctaatattgttttaataaccatgcagccattcattaagcttttagatacaggaatgtgcctggcactggaataaggaaatatgttgagacttttcaggcttttctatcaaggtacctatcattttcgtctttttttttccccaaacacctttataaactggcaatttctttcacttacattatcttataatctttgaaattaccctctgagttagcccagagaggcactctgagctgtttgcagctgaggaaagcaaagttgtaaactggccaagattaccaaccaatcagtggcagagcttggggaggagctcaattttccaattccaaatgcctacaccagggcactccctcctcccccagcacacaataggaaatgactggctctagggtaggctgcatgtgaggtatccgggggcgaacaacgtcctgcgacgctaacctatggctctattctcgcgtgggatcctgtgactaggaagctgaagcagctcgcttaggctgcagctgcgggtacaatacgtaatgcctctataacactttgagtcagagtccagcaacctggcctacaccgatgtgaacgttgtgaacgtacacaaagatactccttcatgttccacggccccaccatccgctcaagacacaaaggacagctcaagcccaggctaggcccgaacccccgccctctcaatcaccttgctctggccagaccgaaatttcaggcctacagggcactgttggccgaacccacattttgttaccgattttctttcgagttccggtgtctcccagtcttctttctgtccttcttctcggaaacattacgtccccctggggtcaccctaagactctacttcagcaggcaaacaggcccggagctcacggaggagaccccgccagcggaagcggaaatggttgcttagagaaaaggaggaaaactacctctcgcagctgcccagtggctacaggtcctcggttaaggtgttcaattggtcaacacaaaagaaggacttccccttcgggagaacttcgaccaatcaaagggcaggatggcggagagggctgagggcgggtcgcttccggcggcttttcccgcagctcctgcgtaaaggagcatgagagcgtgggagttttgcagtggccgtggcgttcttcgtcgcgtctcggtcgggcgtcgctttctgcagctcctgtcagggagcgcgaggcctgttattaaccgcggagcggtaagtgggcccctttcgaggccgggccaagaggaggagcagtcggcgtaggttttta

SEQ ID NO: 15169 - DNA, 2300 bp, Homo sapien
gacggggtttcaccatgttggccaggatggtctcgatatcttgacctcatggttcacccgacttgacctcccaaagtgctgggattacaggcatgagccaccgcgccctgcccaaaaaaagagtaaagtttgaagggatgtacatgctgttctgtttgccagttcatcttaacggtgctgtatttagaaccctggaaacagccgggcacggtctcaaaacaaacacacaccccgtggaaacaatagaatgttgttactctgttgttacttagggagtgttttttcaaactgtactgtgcttgttactcacatgggggtcttgttgaatgcagattctgaattaagtgcccattctgactcagtccaactgagtcctgaggttctgcatttttagcaagctcccaggtgatgccgctgctcctggaccgcagactgcactgagtagcaggcacctgagttttgcctgtttttatgattgattgggctccccacggcatccatcttctagccagtgggaaaggggagaggaagtacagagcgagcaatttcctttttttttttaaccccatcttttattttgaaaatttcaaacctcctcaatttttgaaagaataatgcgcttcaccagttgttaacaatttagcaatattcttttaagcacatgacacagaagttgccaacattgtgctctctcttgttcactggtgaaacttttggcacatagcctgatcctgctgcaggagaggctgagaaataaaagcctagcttgacagtgatctgcctgctgaagggggtgggattctgttactactagatgatgataaagcagttattttttaaaaggagaagatggcagagtaggacaatggatactaggggacagtttgacacgcagactcaaatctttttttttttagatggagttttgcttttgtcgcgcaggctggagtgcagtggcgcaatctcggctcactgcagcctccacctccagggttcaaacgattctcctgcctcagcctcccaggtaggtgggattatgggcacatgccaccacgcctggctaatttttttgtatttttagtagagacagggtttcatcatgttggccaggctggtctggaactcctgacctcaggtgatccacccacctcggcctccggaagtgctagaattataggcgtgagccaccacacccagccaagactcgaatcttataaccagttctcttcaaattggattctggaaagctcggagttgaaatatacagcccaggttggtcgtggtggctcacgtcagtaatcccagtattttaagaggcccaggcgggcagatcacttgaggccaggggttcaagaccagcctgggcaacataatgacattcccatccctacaaaaaaacaaaaaacccaaaaaacctgttttttaattagccaggcatggtggttcacacctgtagtctcggctacttgggagactgaggcggaggccaggagttggaggctgcagtgagccgagattgcgccccaggctgggagacagagaccctgtctcaacaacaaaaacttcgcgttagatcttgcattatagaacccctacaaccggagggcagcttaagttgcctgttttactcagggacagccctaaactgcctttcgccagaatcggacggctgagaatccagtgtcgtcgcggggtggtgctgccagctggctccgggtggtcggccaggagccagccttgtgcacctgctttcagttgttggccagccccggcgctgcaggccctcgcgagcttaggatgcgcctgccagggcctgtgcgggggggccactcggtagagccgcgggacctcggcccggaaaccgcgccaccggcgtccgcacacgctaggccggggagcccagaggtctggccggccatgtctcggcgacctcccggagcgagggacagggaaggagccggccctcaccagtgccccgcatacgggatcctgggcctggcttcgcacggagcctgcccgctcccaacctgcccgctcccaacatggcggcagcgccggcctcagggggcggggccacgtgggggcggcggccaatgggcttccgggctgcgctgccggcagggagcgggaggcggaagtgccgcgggctgccgcctccgtcccggctgcggcccctgccggttacataactcgttgcgggctccgcgcggtcccacttcccggctcccttcgcctccaggatgcgctgagccctacaacacccccagcggccgccggctcccccacgaggtgaggtggcg

SEQ ID NO: 15170 - DNA, 2300 bp, Homo sapien
gtttagagaggcttctccctataaagctgagcatgaactacttggcacacctgacgttgaaccaggagctgagaaccacacaagttaggagtcagagcagagctgctcaggacgtcagtgctggccctgtcccaggtcaaggggataccccgggaagtggctggactgagccaagtatcagctagtagtgggtgctcaaggctggtgtagaggggcaccgcctccctgccagcactgtcctgacacttggaccccatcagctcgttccagcagagaaccaccctggggaggggcctagctatctccactccgcagagaaggctccaggaatctgattaactaaggctgagccagcagagagaccagattcagcgtctaaattcctccccttgtcaggaaagggaaggttgtgcagaaacctggacagtggacgccgcgggcacttcccacccatggcagcaggagggcgggagctcagagaggctgggctcgccctgccagtggagtggggactgccagataaaagacgaggtctttcctgggcagtgagtgagtcctgggggcccaggggcttgcctccacaccttgcacctgcccccagcagctttcagctgcggatttcacggcctttcctgattgttgtttgactccgtcatttctgttggtgattccaaaatggtgactttctaattcagtcattatttctacttttattagctggcattcttctgtaaagaactttcctcaacgctgagatgaactacgcagttcctcctaaaaaaggaggatgaatgcagcatcttttcccatttatttatgggtttgtttatttatttatttttagagacagggtcttgctatgttgcccaggctgatctcaaactcctgggttcaggcgatcctcccacctcagccttccaaagtgctgggattacaggcatgagccaccacacccagccttccatcctttccttttttttttttttgagatggagtctcactctgttgcccaggctggagtgcagtggcgcagtcttggctcactgcagcctccacctcccgggttcaagcgattctcctgcctcagcctccacagtaactgggattacagttgcccgccaccaagcctggttaatttttgtattttttgtagagacagggttttgccatgttggccaggctggtcctgaactcctgacctcaggcagtccacccaccttggcctcgcaaagtgctgggattacaggcgtgagccatcacaccaggccccatcctttccttttaacgactaatttccaacttaaagaaccaaggcttctgttttccccttctcggtgcccagcacttggccggccagccttcctccctccattcctctcttcctttctatacaaacttccttgttaaataaaacaggggggctgctcctcccgcccctggattggatgcactttcctgatttaaaggagtccttggccactcgtgaccccgacttgaactgtggtgtcccccaaagtctctttctttccgcccaggagtgttcacttgctgggcggggaggagaaattggggtgtgacccactcagcacaaacccacgccctggtcataaagccgcaccatttcccctgcaaatccagccgttcactgccccggccaccgggctgctttgaagggggatgaggcatgggggctgctgaacccacaactgtcactggcagccactggctggagttgagagaagtcaggctggctggggccgttgaccctcggaaggaccactgtcataagatgtgagaccagtcaggggcagctcagatggggagagaggctggccagggcttccttcagctggggctgagcagtggagggcctggttccccatcctgcctgccctcctgggcctgggtcttcccagcgatgggggcgactgcagcgcctcttgggagggcgatcgtgagaggcagaggcctctgagtgctggctgaggggtgtccacccgtgggacatgctccgtgctcttctgtctcgcctgcctcacaagctgagcatgaggaagaccaggctgtgaggtgacgcgtcccccccacccttccccacaggtgtgaatgacagaggtggtgccatccagcgcgctcagcgaggtcagcctgcgcctcctctgccacgatgacatagacactgtgaagcacctgtgtggcgactggttccccatcgagtaagtggagcggattgcagggttggggagagcccgtgagcctcaggtgcagaagctgggcggcgggggtgggggcctcttggg

SEQ ID NO: 15171 - DNA, 2300 bp, Homo sapien
tgcccagcctgatctctcttgttaatgggacacgtggtcccccccttcccccaatgactcattcccctgaaccccatccccctccgggtggctttcctgagtgccccctggtgactgtgtgcctgcccccaggtggcggctgggtctcttcctcctctggaatgtgtttgtgttccctcgaggccgacatggggaccctttggctcatgttcccggctctcagtagagggccctctggcctgcacgctggcactcattcatctggccccttcctctcaggcttagtgagttcaaggtcagggcaaagtagaccctgttaagagatgtcagctggggaacagacacccttcctgcaggcctggagtaacaagagtgataaggacgccttcctccctggactgacatatctgggtgaactgtggcttgaagagggctgggagagcagggagcctggacaggctgaccccagcccagcacgtgggagcagaaaggccttcttgttctttacgagttggaagatgataagagcctcatgctgatcagattcatgactcccacccggaattccatctctagaaccaagagatggtgggtggctttacgcaggtgtggcggtgtcctctgcctgtgggggcagcagaaggggttggacggccgcccaagtctcactcctccaagatcacctggggcagcgtgcgattctttaactgaacctctaaaactttgcatttgtccactgtcctgcatccaggcctaccaggtgacatgcgtgcattcccatgaggcccgcgtggtgctgtgtagttgctgccttcatgccataactttaccttgtgctggcatcagagcctcattcccgtccttggctaggcctcccacacacccctaggagaagctccttttgtgtgtgttcttcttttcagctgtttttcaccagaagggcataaacgctctcatttccttggggagtgggggcccctctccagtacctcttgattctgcccctcccagtcggtgtccctctggctgtcgtgggaagtcggtgcggagcccgcctgggccgggctgtgcagtgagccgtgcaccagacgtgtgagcctgactttctctctgactcttcctctaggatggagatattctagcatccaacttctctgttgacacacaagtcgcgtacatcctaagtctgggcgtcgtgaaagagttcaggaagcacggcataggtaagggcagccgggcccgcggcttggcgcccaccccacccccttgccctaccccacccccatcccatctgcacccagtctcttccctggccccaacaactctggctcgtgaacatccctcagtctcatcttccatcctcgttcccgtcttgggccagaccttcatcatccctcccctgccagcacacccaccaccttcagccatcctctttccacatgcccccaggcctttctgctgcagcctcgctcagcccccaggatggagctgaggaaactggcacctctcacttctgctgccgccacacgcacaactcgtgtattcactgctcacgattcagagtagaaagcgtgaacacgcacgaggaagcaacactcaccgtttctccgatgtcccaccccactcggccacacggccagtgagcggcagagtcttaattaattttaaacccaggcccatctagtccatgttttcctgggctcacatttaccctgtttgttgtctgaaagggagtctccatgcgggcccagcccatgggagggcgctaccaggccacctctgcagtccctcccagcagtctgtagctaccaggctccatctggccatgagattttagggactttgacagtggtggtgaagaaaggctggtctctgatacggtgggccgagacatctccgagagactcatgcaaagcccccatcctagcccagtcatccttccttcctaactgctctgcctgcattacctttacctcttctccccaaggttccctcttacttgaaagtttaaaggatcacatatcaaccaccgcccaggaccactgcaaagccatttacctgcatgtcctcaccaccaacaacacagcaataaacttctatgaaaacagagacttcaagcagcaccactatctcccctattactactccattcgaggggtcctcaaagatggcttcacctatgtcctctacatcaacggcggccaccctccctggacgattttatatccttaacttctgggggagagggactgtggcttcctgtccataaggtggcagagccagtgagcaagttggagctg

SEQ ID NO: 15172 - DNA, 2300 bp, Homo sapien
agaggcccagtgagggcaggcccctcccagtgaatgcagccacactgggtcagccctggggacggtgcatgcgcaggggggcagggccagggcagcaggcagaggtttccagaagcagggaggggagctgaagagcctgtgggaaagagaagagcagggcagggtgaaggcccggcggagacactctgcccaccccacaccctgcctatgggccacacagctgggcctgggtgctccaggagcatgagcccttctccaggccatggtgtctgcctgcagccactaggcgcctctcggtccccacacaaataaaggcactgatggatccaaagtcgggtgcacagcccagttgccatggagcctgctgtgttagcttggcacaagtcaccaaacctctgggctgtgctggtgcataaggtggtggactctgcagtccccacggccccttccggctctgccgttctctgtgcccatccagggccttccacttttgtggctggaggcaccaagctcccatacctttgtgtctgctgtggcgtacctgccacggatgggcatgctctgcgcatgcccacgatgttctgttcccgagcccgtgtagcaccgggcctgcagctggggcaggccgacgagcccagttagatggctggcagctccttgcagaaaacagaaggggtcagatggacaggaaggcgggctctgcgggcggccgaagggtggggcctggtggcggctgcccagccgacatcacatggtccggctgtactcgatgccactcttggaagagatgcccgaccatggcaggaagctgcagagcaggctgtgggcctggcggtagactctgtgcggaatggagcaggggctcaggctggctagtgcagagcccaggtgctggatgtagtccgtggggctctgttaaggaagattccgacttgccctgaccacgctcgccagggcacagtcatcaggggcccgcgcagtggcctgtgggactgtgtgcagatggcaagccaggcttcggaggctgagagcccgctaagcctctgcagagctggaaaggctcatgagacgaagtggcctctgctgtgcaaaacaacagagggtggggtctggggacagaagggccttctgagtgaggcagcaggcatgtggacaccacacccagggatgcacggggggtggggaaggggcctggcagaagggcaggtgcttctggttctccctagattctcaacctttgtggcagcaagagggacagagccctgtccatatgacaaggagggggtcaacagtgctgaccccctggatgcctgtcttcacataagctagacggcctgtggagtgtggggtcacccctctctttcctgcttattattctatgtaatgaataaatcctagactcatgaatttgaaaacacacacacacacgcacagcatttttttgggccacattctgactattataaagtttcctggcttccctctgacctgtcaggggccagtgaaagttaaggaggaagaagcagggaagggcatacctttgggtcatgcatcctataaggaaggtttgaacccaagtattcaaaaaaagtaaaaatctcttctctccgcacttgtttcccctctgctagcacaggctctgggaggacaggggatcctgtccgttttgtgcactgctgatccccagtgcaagtggagcaggaggctctccagctgggtgcagggctcatgcctataatcccagtaatttgggaggctgcggcaggcggatcatttgagcttaggagttcgagaccagcctgggcaacatggtaatatgtgcaactcgatttacccaaatgtgtgtcaggtttacccacaacacgatcaggtaagggagagaagcatccataagcttggccacctgaacatcatctgagggggaccacagctccaacttgctcactggctctgccaccttatggacaggaagccacagtccctctcccccagaagttaaggatataaaatcgtccagggagggtggccgccgttgatgtagaggacataggtgaagccatctttgaggacccctcgaatggagtagtaataggggagatagtggtgctgcttgaagtctctgttttcatagaagtttattgctgtgttgttggtggtgaggacatgcaggtaaatggctttgcagtggtcctgggcggtggttgatatgtgatcctttaaactttcaagtaagagggaaccttggggagaagaggtaaaggtaatgcaggcagagcagttaggaaggaaggatgactggg

SEQ ID NO: 15173 - DNA, 2300 bp, Homo sapien
aaaacaaacaaacaaacaaacaaacaacaacaacaaaaaaaagtgaaaagacaacctatgaaatggaagaaaatattggcaaatcatatatctgataagggtctcataggcagaatatataaagaacacttacaattcaaaaacaaaaggatgttcaacccaattttgaaatgggcaaagaaaatgaatagacatttttccaatggaaatatacaaatggtcatcaaacacgtaaaaagatgttcaacatctttaatcatcagggaaatgcaggccgcgtgcggtgactcacgccaacatggcgaaactccgtctctacccaaaatacaaaaattagctgggcgcggtggcgcgcgtctgtaatcccagctcctccggaggctgaggcaggaaaatcgcttgaaccctggaggcggaggtttcagtgagccgagattgtgccactgcactccagcctgggcaacaagagcaagagtccatctcaaaaaaaaaagttcaagttgatcaacatcctttcaagcccttggcattgtcaagagttttttgttgttttagccattttatctagatttaatttttaggtttttaacgtgttacctgatattttagccagtttaataacttcatagtgatatctcattgtggttttaatatgcacttctctaataatagccttgatcatctcttcatttgcatattagccatccatatatcttcttttgtgaagtagcttttaaaatgttttctccattctctaattagactgtttctcattattgagtgttgagagttcttgatacattctggatacacgtctctttatcagatatgtgttttgtgcatattttcttctagactgtggcttatcttttgtttttcttaataacacgtgaagcaacatttatgggaggccattgttttggagcgagctcctgcacaaggtaccaacggaccagaccaaaccagaatggaatcgctagtgcaaggtgccacgtaatcaatgcgaacttagagacaggccagtctgccaaaacacagaagattcactgcaaccaacaaaaggggccctgtccacctaggctggcataaggaagccccctctgctttaacccaaagaaatgcatctgaaataacctgatgccaaccaatcgctttgtgcactacgctgtttccttgttcctgctcaagctaccttacaaaacccggctgctgtgccacgcctggcggggcatctccccatttcacacgtggaggccgccccttcctgccgtctcctcgcgcccccatgcagaggctagggctgccgggacccgcgcggcgcgagcggctcagggcccctttccggcctgttgtgcagcccgagccgtctgcgcgtgcgcgagaccgaggcctggcctgcctctgggcgcccacagtgatcccgtcctccgctcggcaaccagattccgacgaggagcgcgctgtgcctcggacgggggaaggcgggcttcctgagtatagtgcattttttttttttttttttttttgagacagagtctcgctctgtcgccaggccgaagggcagtggcgcgatctcggctcactgcaacctctgcctgccgggttcaagtaattcttctgcctcagcctcccgagtagctgggattacaggtgtgcgccaccacgcttggcaaatttttgtattttttggtagagacggggtttcgccatgttggccaggctggtctcgaactcctgacctcaagtgatccgcccgcctcggcatcccaaagtgctgggattgtaggcgtgagcccccgcgcccagccaagcatcgtgcattctttatagaaatgagggggaaataagcaatatggaaagcgcctagcgcaatatcaagcacgtagtaggtactcagaacctgtcacccagcgcgaaacgtccgcaaagcgtgtaaacagacgcccagaagctgggaagcttgcagccctcatagacgccggtatcgccacgccctctgccctcggcgtctcaggagcgctctctgccggcccgctctccccgtgcgtatgcacgtgccgccgcgtcttcgcttcgctttttgtttgtccctgaccgtgcgccgtccaagggtccattggttgccatagagatcgtcgagcgctgggcctgtgatcgctgaggggcgagcagttgcgaccctgggctcctggggacctgagcgttatgtctttccgcgacctccgcagtaaggcagccccgcgcccctgtgacctgcgggtcttccagagattcagggctcccgcccgccgggtcccctg

SEQ ID NO: 15174 - DNA, 2300 bp, Homo sapien
acaagatgtttagcatcttgctttacttaatggtatattttagagaactttccaaatacatatagaatttcctcattctgtttacgcctgagtggtattgcttgcatggatttgccataatttatgtaatttatataggtaggcttttaggttgtctgaagctttgctctttggaacagtgctgtaacaaataacctgtacatctcattttgtttgtgtttgagtgtgtccctagaataagttcttagatttgggattgctgggtcaaaagatatgtgcatttgtaattttgatgtcttttaccaaattgctctccatcaagattgtcccagtttatacaaccactcacaatgtttgagtcacttgaatgctttgcttttattaggttatatcccagttgtcagcagaggcattttcaactcacctacatgggatttagtttagacattacatggaaagggccttcaactttttttttttttggtctaaaaataggccaccaaggcacatataaaactcaacactaagaagctttatcaagcagatgggtatgcggtaaaagagctgctgaagatcacatctgtcctttataatgctatgaagaccaaggggatggagggctctgaaatagtagaggaagatgtcaacaagttcaagtttgatcttggctcaaaggtaaggacaacaaaagccttgtagtgggcgatggagcgttgatttcttgagctctgaagtggaaggagtctgctacagctccgctgcttttcttcctcctcagctgagggcagtttgtcagttttgtgctcatcagcatttggataaagtcaaagtcacaatccactaattcaactatttattaaaagcttagtatttgtcaggtagcattcaagcgctgaggatacagttgtgaacaaaaaggacaaaaatcgtgtgtttattctcttcagttaggggagtcagactgtgaacaataagaggtgtggaaggccagatgcagtgcaggctgtggagaataataagctgggatggggatggatgctgcccagagtgatcttaaatcgggtgatcaggaaggcctcatggattggatggtgtttccagcagagatccaagggagggaaagagtgagttgtgcgggtggcgggtggcgtcagggtgtctcaggatgataatttgttttgggctgggtgcagtgactcactcctgtaagccaaacactttgggaggccgaggtgggaggatcctttgatgccaagagttccagaccaacctgggcaacatagtgagacgccatttttaccaaaaaaaagaaaaaaattagctaggcgtggtggtacacacctgtggtcccagctgcccaggaggctgaggtgggaagatctcttgagcccaggcagtcaagccatgttcatggcactgcgctcccgcctaggcaacagaacgagaccttgtctggggggaagaaaaaaaatgtgttttgtgtgtttgaggaaaagcaaggaggccgtgtgatgagggttgggattgacagaccctctggcgcctgggaagcccctggaaagcctttgtctttgcctctaaggtgggaatcgttgggatccaagcggaaccttctgtgcttatttcccgtccaaagggttgctctggctgctgagccgccatcagaccgaagcaggcggcagggctggaagcagcgagcctgtttggagagtgaggggtgaccgtggctttgagcagagtgctggtgggacaggtgccgtcaggtgtcagggagcgaccacagcagcaagccagaaataaaggttaagccgttactctgaggcccaaggcctcagagcaggagacctaggaatgaaggccccggggctgggagtgcacctaagagtgtggccacgcagggtacgtgaaaccacagtgcactggctgagctccaagtctgctgcagggaagaaagcttcccctgtgaggcctgctaggtgaggccttgtcatggtctatagttgggcttgaaaagccacacacagcttttttgttttgtttttgttttgttttgagacggagtttcagtctgtggcccaggctggagtgcaatggcacgatcttggctcgctgcgcctctgcctcccaggttcaagagattcttctgcctcagcctcctaagtagctgggattacaggtacacaccaccatgcccagctaattttttttttttttttttgagatggagtttcactcttgttgcccaggctggagtgcaatggcacaatctcagctcactgcaacctctgcctcccaggttc

SEQ ID NO: 15175 - DNA, 2300 bp, Homo sapien
agggggcatttcagactgagggaggctgtggagatgtgataactggacacataggcagctcctatctgctgttggggacttcactgggacaagtggggacagtggagtggggctggagttagacggtggtagtgtgttagtgctggcttcctgttttgatgattgtattgtggggatgtaggagaaagtccttatttgtaggaaatacacgctaaagtattcagggtattggaacgtctggtcagcaacttactgtcacctaggttgggaaaaacgctttgtgttgtacaacaggttttccgtaaatttttgattgtttctaaatttaaaaattaaaaaaaaattattatacctcttatccttgccagtgttctaactgaatcaggtgaacacggcatgaatgtgcccttagcactaatatgttaaaagtagaacacccaagagaggacagggttcatttcttggtagacatctcttaagactcctttcattgttagaaaatatctgtgatgtttgatcattctaaaaacaaccaaaacaacatgggtacttaaaagggtttggggagtacaggccatttatttcagaaaccagggaaaattgcttgtgtttacacagctgttttgcattgtggatctttcttgtttgaggaacagatatgtttaaggtgggataaatttactaggttttaatctgactttggttcgaggaaacagttgccattaactgaagttgtttagaaaggagacccacctttcttcctgtgagggtgaactcgcatttctcctgggggctctaaggcacttgcagcaaatcgatgataagggtctgattattttcatgaaagtatcttagaagtggctagtgtacttagaccaaaaaaattagaccataaacgcattgtcagtaacagtggctggttccaaaacacaccatgcctgagagttgtggagagtgtctgggcttcgtaggccatttctctgtggagcccatagcttttcagagacttgcaggaaaacagagtaaccccttcgtgggatgctacacataggcaaagagctggaggggaagccccaccttggccaccaggaacttaatgcagggctggaaagccagaaccctggggggcagttccacgctcagctgggtggcagtccagattcctcataaagagattggagcctgaaccccaggcatgtgatccagccagccaccggacaagacgcatgtgaagacggcgcactaccagtgactctacctgcttcaaatgaaccttctcttaggatagggagacttgtgtcaccgtcagtgggcccgtgtcccccttcccttctttactcagcctctgttgcccaagggcctctgtccaactgttgccctggaccccttccagagctggtgcacaccagtgtggccattgccactgtgggaactgctttcgtactgtcttcagagtggtttctcctcgtttttagtctgtagtcaagcttctgttgccagggagagggaagaggaccttctctcaatcccagcaggcagtgggttagggctgggaccagctgtttctttctctcccctcctagtagagcagtacttggtgtgtgtgggtattctgtaagtcgggtgtttgtaactaggggcatggcccgaatgataaaaaggcagactgaccgtccagagtgatgtgcaccttgttctaaccgagtgagccagagaaaagactgcaggcctctccaccttgaccaggacactcttctttgcatcttcacttctttccctgggtagaaatgcctgcttttcatggggaaaaaaaaagagatacctttttctggacctgtgtgacattctccctggaactagtgggttaagtgagtcattgcttggggaagtgtctatttgtttgcttttgtgtttgttgagcataatgttgctatgcctgaagagttgcaaaattcttctaagaattaggatggctgtttttattgccaccttgtctcattatttcccattaaatatagacacaggttcagaagactaaagacctgctcaataatgtggcctctgatgaagctaatttagaagccaaaatcgaaaagagaaaattagaactggaaagaaatcggaagcgactagagactctgcagagtgtcaggtagatatgaacacttggagaatgagtagaaagatgtcctggaaagttcaaacaaactgggcgtggtggctcatgtctgaaatctcagctactcatgaagctggggcggggggttctcttgagcccaggagtttgagaccagcctggg

SEQ ID NO: 15176 - DNA, 2300 bp, Homo sapien
tgccctcagtcacctatctggtaagtggcagggccggggtacaagctcagggccccagttatcatccactgggcccctgcattcgtgtgatcattgctaccacccaggaacaaatggcccttccagtccattctcagaggccaggccagtgggccacccaaaggctgaggaaagaggaagaggggatccctgaccccgttcctggggacttgctcacctgtcccaggctgctggatggggggcacggcaggcagcaggttcaggccctctcttcacagctcctggaggtgatccccgactccatgaggaagcaagaggtgcggacgggcagggaggccggccagggccacggtacgggctccccagccgagcaggtgaaagccctcatggatctgctggctgggaagggcagtcaaggctcccaggccccgcaggccctggataggacaccggatgccccgctggggccctgcagcaatggtaggaccggcttgggaggcagacgcggggtggggaacacctgggctgattgtgcccactcttcccttaccagacctccccactggcctctgtcccgcagactcaaggatacagaggcaccgcaaggccctgctgagcaaggtgggaggtggcccggagctgggcggaccctggcacaggctggcctccctcctgctggtggagggcctgacggacctgcagctgagggaacacgacttcacacaggtggaggccacccgcgggggcgggcaccccgccaggaccgtcgccctggaccggctcttcctgcctctctcccgggtgtctgtcccaccccgggtctccatcactatcggggtggccggcatgggcaagaccaccctggtgaggcacttcgtccgcctctgggcccatgggcaggtcggcaaggacttctcgctggtgctgcctctgaccttccgggatctcaacacccacgagaagctgtgtgccgaccgactcatctgctcggtcttcccgcacgtcggggagcccagcctggcggtggcagtcccagccagggccctcctgatcctggacggcttggatgagtgcaggacgcctctggacttctccaacaccgtggcctgcacggacccaaagaaggagatcccggtggaccacctgatcaccaacatcatccgtggcaacctctttccggaagtttccatctggatcacctcccgtcccagtgcatctggccagatcccagggggcctggtggaccggatgacggagatccggggctttaacgaggaggagatcaaggtgtgtttggagcagatgttccccgaggaccaggcccttctgggctggatgctgagccaagtgcaggctgacagggccctgtacctgatgtgcaccgtcccagccttctgcaggctcacggggatggcgctaggccacctgtggcgcagcaggacggggccccaggatgcagagctgtggcccccgaggaccctgtgcgagctctactcatggtactttaggatggccctcagcggggaggggcaggagaagggcaaggcaagccctcgcatcgagcaggtggcccatggtggccgcaagatggtggggacattgggccgtctggccttccatgggctgctcaagaagaaatacgtgttttacgagcaagacatgaaggcgtttggtgtagacctcgctctgctgcagggcgccccgtgcagctgcttcctgcagagagaggagacgttggcatcgtcagtggcctactgcttcacccacctgtccctgcaggagtttgtggcagccgcgtattactatggcgcatccaggagggccatcttcgacctcttcactgagagcggcgtatcctggcccaggctgggcttcctcacgcatttcaggagcgcagcccagcgggccatgcaggcagaggacgggaggctggacgtgttcctgcgcttcctctccggcctcttgtctccgagggtcaatgccctcctggccggctccctgctggcccaaggcgagcaccaggcctaccggacccaggtggctgagctcctgcagggctgcctgcgccccgatgccgcagtctgtgcacgggccatcaacgtgttgcactgcctgcatgagctgcagcacaccgagctggcccgcagcgtggaggaggccatggagagcggggccctggccaggctgactggtcccgcgcaccgcgctgccctggcctacctcctgcaggtgtccgacgcctgtgcccaggaggccaacctgtccctgagcctcagccagggcgtccttcagagcctgct

SEQ ID NO: 15177 - DNA, 2300 bp, Homo sapien
caccccagcctgggcccaggcaagggcacttacaaagaaagagcctgcaggcaggggccttgcgctgttgctgagttaggaagggctgaggtcgcttcctgtctggctgaccccagctctgggtggacagaaagccccagagtgagaacagttagggagcccccagcccagcacccccacctccaccaggagccaggaggacggcccacctggttctcagcagagcgggcagagtggggaatgggaccagccctgtgtggactgatggacattcctgcgagggggaggaacgggcggggcggggcggggcggggctgggctgggctgggttgggctgctccccaagatcccgtggatgaggctgtgtcctctcaggctccgcatccatccccctgagccacaaagggaggcagtgtgagcctctggccccttttatgtgacggatacccaccgggccctgtggtttccaacatcctgtgggcggcctggtttcaggcgcctttgttgctccccacagccgaggctgcagctgctgggtctgcactctgcctgcctggagcctcgggcagccttctcgagggtccatcgtgtcctcccagcacccagcaggttcctgggtgctcagaaagcattgttgggagggagggagaggaaggagggacaaaagaaggtaggcaggcaggggaatgtgcaggagcacttctggtctgctgcctcagttccctcccccccatcacccacacaggctctggggaaccagctaaccctcctacctcccctgagccacaagctgctctatgagtccagacccactactctcctgctctacaaccattgctggctcccacttgcttgctgaggaaaattcagaccccaggacccctgtcccttggctcccaccttgtcacctccttccctcagtggccccatgttgcttgctccctgtccccagcggatgtcccatactttattgtaatttttctcatgtggcttgctctgggccatgtccttccccctcacgcccttccctgtcagggcaggccacccactgaggtccacttccaggggccgagtgcgatctcctgccgcggacggcaacattctgctgtttcctcttagggtacaggtgacctgcctctggggagccctttgctcacaggaagatgttatggggcacagctgagtcagaggtgcctactgggtgacagagagaaaagaaagcaagaggtgttaaaagagggagcacagtggctcacacctgttatctccgtgttttgggaggccaaggcaggaggatcacttgagccccaggaggtagaggctacagtgagccgagatcacaccactgcactccagtctgggtgacagagcaagatcctgtctcaaaaaataaataggctgggcgcagtggctcacgcctgtaatcccacccctttgggaagccaaggtgggtggatcacctgaggtcaggcgttcaagaccagcctggccaacatggcaaagcccctcctctgctaaaaatacaaaaattagcggggcatggtggcgcatgcccgtaatcccagctactcaggaggctgaggcaggagaatctcttgaacctgggagggggaggttgcagtgagccgagatcgtgccattgcactccagcctgggcaacagagcgagactctgtctcaaataaataaattaaataaataaataaggagagccacaggggtggcctggaggtggcagggcacagtccagtcctgctggggtcaccctctagttgcgtgacctcaggctgctcacttgatttcctgaccacccgcctgaaaacaagcatttgttgatggcggggcagcttcctttgtggcgggatggaggtgatgtgtcaacagccttggcaccagccactttatcctgagcatgccacctgcagggacacttaatcccagagtcaagacccccagcatcgcccccgcacttaacttgcacgggggcggtgaccaagccagggtgccccggctcctcgatgtgtctgcgaggctgttggctgttgaaatcagacaggaaggaagaatgaggtggagcccagcacaggaagaggtgaggacccggagccacagggacagccggtgggctcggtggggctgcagaaggtcggggctgcactgctctcggcccccacacggttggttggttggcgtggtaagtgccctgatccctggtcctgagaactcaggctggcacagggattcccagggcatctaccaccacgcagctggagcagggctgagcccaggagcatggagatg

SEQ ID NO: 15178 - DNA, 2300 bp, Homo sapien
cagagggacaagtgttgtgcctctggacagggcctgggccgctgatccgagcctgcgtcctccctccgctgctttcttaggaaaggaacagctcagcctctggagttggaaatatactgacgggccacagagccttcaagcaggtggctggctggcttgcccgttggcctgggctgactcaaggacttggtgtgctgtggattgtgtctgatgccatgtcttttcatttattttttattttttggagagacggagtgtcgctgtgttgcccaggctgttcttgaactcctgacctcaagcaatcctcctgcctccgcctcccaaagtgctgggattatgggcatgagccaccatgcatgaccttttttatccttttagagacagagtctcttgctgttgcccaggctggatggcagtggcatgatcacagctcactgtagccttgaactcctaggctaatttttacatttttttgtagagatggagactttctatgttgtccaggctgatctcaaactcccggccttgagtgatcctcggcttcccaaagtgctggaatttcaggcatgagccacaatgcctggctctgacaccatatcttaagagcctctgaggcagcacagactccccagttttgtagctctgccaatccctgttaccttacattcagtccgacacacccctttatgtctgcagctatagttaggaagccctgctttaagtgttgtcagtccccggtttctggaactaagtggcctgggtgtttctggcaaggagtgtggacaccgtcttcaaagggaagcagggcctgggtcatggtcattcctcctggtgaagactctgctctggtccgccaccccaccggggcacccagagcccatctccacgcagaggggcgatgactgtcgatgtttcgtgttgcaggtttggcgtgagtgagctcgttcacctgtgcgaacaggtgcctattgccactgactcagagggcaaaccatgggaggagaaggaagcagagaattgcgaaagcagggccgagaatttccaggaactcttgaggtcaatgtgggcagatgaagaggaggaagcggagactttgttgaaatccaaggaccacgaagaagatcaagaaaacgtgaatgaagcagaaatggaagaaatttatgaatttgcagctactcagcgaaagcttctccaggaagaaagggcagcgggtgccggcgaggacgctgactggctggagggtggcagtccggtttctgggcaactcctagcaggtgtccaggtgcagaaacagtgggacaaggtggaggagatggagccgttggagccaggaagagatgaggccgccaccacctgggagaagatgggacagtgcgctctcccgccaccccagggccagcactcaggggcacggggagcagaggcccctgagcaggaggcgccagaggaggcgcttggccattccagctgctccagcccttccagggactgccaggcagagagaaaagaaggctctcttccgcactcagatgatgccggggattacgaacagctcttctcatcaactcagggagagatctcagagccgtcccaaataacaagtgagcccgaggaacaaagtggcgctgtcagggaaagggggctggaggtttctcatcgcctggctccctggcaggcatctccaccgcacccgtgccgcttcctattggggcctccccagggcgggagtccccgcgggtctcatcacacaagtgggtcgtccctgtcaacaccccggtcccgtggcggaacttcccaggtgggctccccaaccttgctgtctccagctgtgccatcaaagcagaaaagggacaggagcatcctcacgctgtctaaagagccagggcaccagaaaggcaaagagcgtcggtccgtgctggagtgcagaaataagggggtcctgatgttcccagaaaaatctccgtctattgacctaacccagtcaaatcctgaccattcgagctccagatctcagaaatcttcatccaaactgaacgaagaagatgaggtcatcctcttactggactcggatgaggagctggagctagaacaaaccaaaatgaagtccatttctagtgatcctctggaagaaaagaaagctctagaaattagccctaggtcctgtgagctgttttccatcattgatgttgatgcagatcaggaaccttcccagagcccaccaagaagcgaagctgtgctgcagcaggaggatgagggggcgctgccggagaatcggggctctttgggcaggagaggggctc

SEQ ID NO: 15179 - DNA, 2300 bp, Homo sapien
gtgtcgcttttgtttctctctagagaataaaagtcgcaagaagaaacccccggtatcccccccattgttgttagtccaggactctgaaaccacaggccgacagatagaggaccgtgtggccctgctcctctctgaggaagtggaattgtctagcacgccaccacttcctgccagcaggattttaaaggaagggtgggaaagagcgggccagtgtcctcctccacctgaacgcaagcagagctttctgtgggagggcagcgcactgactggggcctgggccatggaggacttctacacggccaggctggtccctcctctcgtgccccagcggcctgcccaggtgagtccctcccctcaggcacatggataggcttttgggggaggttggcaatcccagaactgcaacactgggtacccacagccaggtgatggaaagtccaggaaggaaaggcagaggcgggaggaggccagaggggcacttggtggctgcagctttcttctctgtccagcaactacatggtactctgggtaggatcagggaggacccttggtgtccaccagagtgtgttcctggagtttgttgaaaatgcagagtcccggccgggcgcagtggctcacgcccgtaatccctgcactttgggaggctgaggtgggcggatcacgaggtcaggagttcgagaccagcctggctaatatggtgaaaccccatctctactaagaatacaaaaattagccaggcatggtggcacacacctgtaatcccagttacttgggagactgaggcagaagaatcgcttgaaccggggaggcggaagttgcagtgagccgagaccgtgccattacactccagcctgggcaacaaagtgagactctgtcttgaaaaaaaaaaaaaaaacagagtcccagggcaactggcaaaatgcctcagatggagcccggaaactggcattcggagcacacactccagacagtcgtgcggcaggtagccctacagtcagtacgcagctgcctgaggcagcttggaggacttcaggagggcggcaggcctgggcccccctggcctctgacaagcctttgtgcaaacagatgccacaggcctggccttggccgtgacagaggaggagcatgttgacatgagtgctggggaaaagcatcccaggactgctccaggctgtggctggagccccggggacagtctgtccccacagcccacatcctgctctgtagttttaggtccagccgtgcataccacatgtgatggcttctgcagtgtgtgcgtcaatgacagtgaccacgtggtcactctccttactggcttctttcagggccttatgcaggagcccgtgccgcctctggtgccacctgagcactcagagctgagcgagcgaaggtcacccgctctccacggcacccccactgcaggctgtggctccaggggcccgtcgccttcggccagccagagggagcaccaggccctgcaggacctcgtggacctggcgagggagggactgagcgccagcccgtggcccggcagtgggggcctggctggctcggaagggactgcaggtgagatgctgggtgggactctagggccagccctgccctcccgggcctcccctccccgcggctgaggctgccatggactggctcttgtgccgccgcgacggcagctctgacctggtgggagaacacgcagcctctgggcgctttcattttttctcaaaggtcaatgtggtgtagacaactctgtcatgattttccttccactttaaccaaagacagagctgtctgcccacagcgagtgaatcctctgggtgaactgtctgttttgctcttctcttacctccctggtggagtggtggtgagacagggtgtgcgggtttgctttgcatgaaggtgtcctcggatagcaagcaccttccgaggcaccgcaggggctggctcagcctgtggtcaacgctgtcttcttggtggtggatgtggctgggctgtgacgttcctttaacctgtgaatcctccactcagggttggacgtggtgcccggcggccttcctctgactgggtttgtggtgccatcgcaggacaagcacccggacaggggcggccgcaccttggtaagaactggctctggcccgcgctctctggtcccggccatcccacttgccatgtgtgtggtggggttggctcaccgctggcctctggcccccaacgcaagtgcagtggcctctcaaggcctctgctttccagaaggctgccacatcctgacatccgtgagcagagccacggacccacagccacct

SEQ ID NO: 15180 - DNA, 2300 bp, Homo sapien
ggctgcggtaggtacgaagcaaggaggcacaagtccccttccctctggaaacctgcaggcttgcaggatccgttatgtcattcagtaaatcttgactgggcacctataggaggagatagactgttgtgaggttcatatcaacagagatgcggagatcaacacagttgtggaggtggaatttgttccagccgctccccgcatccaacaggataaaattcactttgcctagcctgaccttccaggcccttgtgagccaatcctttcctctccccgcagcgttttctcctacacctttctctctactcccattataccgaactctttgcaattcatgaattcaacaagtagttgtggagcacttatttcaagtcaggcaccagatcagccaaagaggttgcaaagtaatagatggatctctaccctcctgaagtgttgagcttaatgggggacagataataagccgatgaataaaaacacaagagcggatagtttcgaaccacacttcctgggtttgatcccagccctgccactgtgaaagctgttcctgaactggctttaggccagttcctcattctgcttgcgcgtgtttccttgccgtaaagacaggatgacaagagattccaccatataggcttcttgtaaggattaaacgagtttgacttggaaagcaattggaacagtgcttggcacacagtaagcattcgatagatattacctgtttcatatgatgataacctatgacagatgccattgtgaaaacagtgggcgatgatagggattaacggggatggagacggtccataaaggattagaggacacttctctaaggggaagacacagaagagaatgcgccagccatacaaagtagattctaggtaggagtattttcagctctggaaaacaaaatgattaattagattccttggacagtggagattgcattattgtatttgaaaggaataactttctgccattgggtcattcagttttgatttttgaaccccacttagctgtgtgccaaagtaaacaaccatgctcacgaggcccagcctttgcacacaggcgacattccagtcatccaggtttggagagccttgctgggttgagaagataagtaaaagtgaccttttctctcctgagtgttcatgagaatataatgtctctttctgtctcttatgttgcagtatttacagaaagagcctctttaacagccaggggtcttagatcagtgtaggagatagttttcctagatttggggatcatcctgtttctgtggtgactgccttttatggggtttgctccctaaatttcagttaagaaaacactctcccaagatgcacatattttaatacctgtggaagaacaacatgctttgacaggtttctaggtccttttgttgtgatgtctgataggacggttagaccatgttaaccaggctggactgagtatttgacagtattgttactccgaagacttttccctcaccccacatgcccttgtccctccctggaagaactggcataaaatgacaatgtctgattacacttacatgcttttggttttccacagatgtgtaattaagtgaaccatatatgtttcatcatcatggagatcttggagaattatctgagcaccaggttcatatgtattcgatctcagaggcatctattggacaacaaaacactctttcagttgtgaactttatttatttattattattattttttgagacagagttttgctcttgttgcccaggttagagtgcagtggcacgatctcggctcactgcaatctccgcctcccaggttcaagcgattctcttgcctctgcctcccgagtagctgggattacaggcatctgctaccacgcctggccaattttttgtattttcagttgaaacgaggtttcaccatattggccaggctggtctcgaacttctgacctcaggtgatccaccccccgcctcgtcctccaaaagagctgggattacaagtgtgagccaccgcgcccggcccagttgtggactttaacagagggaagctttaaacatgtttaaccacaggcccaatttgaacaaagatacttcaatcattatagagaggaaaacagtactttttgttcaattgtgcaaactctccaagtatctaatggagaagtagagaagaaccctaatgaaactgagtgtgaatgaggctcagctaggcttctacttgggttcactttctcatctgtctgcctgtcctgggattgaccctcgctcctctgaagaccagcctgaaagccttaaaactggtcagatg

SEQ ID NO: 15181 - DNA, 2300 bp, Homo sapien
aattcaagtcccaagacaccctgccctacccttgcctctgggctgcttatcattcttgttctgtcttctttatccagttggaaaccatattacaaactaacttagatttccaagccagagagcaagtaaacacctcctaaatccttcatcaaggaaaacctcttggaaggttttgaagctcaacattcagaatcaaatgtagtcttacccagtaattccactcctagaacacaaaaacttgtgttatgaacacgaatgttcatagcagcattatttctaacagccaaaaagtaaaaacatccatatgcccatcacctgatacatggataaacaaaacatggtccatccaaacacgtgattatgcagccatgaaaaggcatgcagtactgattcatctacatggatgaaatcttgaaaacatgcttaataaaagcccagcagaaaaagccaagtatcacatgatcccatttacataaaatgtactgaatacgcaaaaccacagagacagaaagccgataagtgattgccaggggatggggtcgggggaattgcggagtgactacgaatgggtacggcaggttcgatttggggttttaaaacgttctggaattagcgacgatggctgcaaatcctgtgaacgtactggaaaccactgaatgtacacttctagtgtgcattttatgatactgtatcttttaaaaaacatattgtctgccctgcaaactgattcctttacacctctcctgtgttcattatttcagtgactggaggcacactactctcagatgttaaggccagaaaccggcaaatcgttaacaactgcgtcttgactatgctccatatttctccattcttttcgctccacctcctaattcgggccgctctcacttttcatctagattatgtaatagcctcctaatgggtgtccttgcctcatctgttctcactgtaattaggcctttaaaaacaaaatcttacgccgggcgtggtggctcacgcctgtaatctcagcgctttgggaggccgaggcgggaggatctcttgcggccagggctcgagaccagcctgggcaacatagtgagactcccccccccgcccccaccgcccgtctctacttaaaaaaaaaaaaaaaaaaagccgtgagcggtggctcacgcctgtaatcccaccactttgggaggccgaggcgggcggatcacctgaggtcaggagttggagaccagcctgggcaacagagtgaaacctagtctctactaaaaacacaaaaattagctgggcgtggtgactggcgcctgtaatcccagctacttgggaaggtgaggcacaagaaccgctcgaacccgggagacagaggttgcagtgagccgagatcgcgccactgcaccccagcctgggcaacaagagcaaaaccccgtctcaaaaaacaaacaacaaaaaaccttcaatggctcccgacgaccccaagttgaagctcaaacccttaatacgatgtgtaaagtccctcaaataccaagccatggcaaacctctgctacctttcccccaggccctggctggcttcaccctagccctgcggaagagctcgggcatcccctccaggcacctgaagcgcggcagaatcccctcttcacgtagctaaccctccccgacctccaggcctcgactctcacgccaccccacctgagaggaagcttctcgggcccccaggccagatttggtgcctctcccggtccccctcacaccgtccactctccgctccacaggcaggtatgcccagagggggccgccgttgtatccgcgaacatttcctgagccagctggggaggaaccagactttatctcacagctgccacagtgccttaaactcgccctaactctttctcaaaaactaacagactccacctgaagcaagcgccgcttccgcctcgccccgcctcctgccgaccggaagcgctggccgccgcgggcccgcgcccggcgccgcagaggaagaccggaagcgaggctgccgcaccaccgcgcgcgcccgctctgcgcctgcgcgcaggcaatgctccgcgggggcgcgggcggcgcatgcgcaggcgcgcgagtctccgttaagaaggtgccgcggcggcgccggaggtaggaggagccgggctgtggggctgggagtcggcacccgggaggcggaggtcctgtcatttcgggccgttctctctttcctaagggagaagagcctttctcgcccgtctccctcgctggctccgtggcctcggcaggcccgcagccccgacggagaggcaggagccgcactcg

SEQ ID NO: 15182 - DNA, 2300 bp, Homo sapien
cttctaggacttccaattatgtgcacattagacagcttgatagtgtccaataattttttctctctgccttatttgagtagtttcaattgctatgtcttcaaattcatggatcttttctctttcagtgtttatttggtgttaatcccatccagtgcatcttttcatttcaggttttgtttttactgtctctggaagttccatttggatctttctatatcttccgtgttctcatcatgctcatgtttccctttaccttcttaaatatatgccgaactattgtccttgtctgctagttcctttatctctgtcgtttctaggtcagtttctattgactgtgtatggttataggtcatattttcctctctttcttgcatgtctgttatagcagttatcagtttattgcgtctcaactctaaatccacccttcattgccacttgtgatactggaacatttctcccttgccccatgctggtctttgtcagtggaaagcgttgagaggaaagggcatttcttggttctttgtgctttgcttacagctgtctgtgacatgagctggtatgtgggacatatagggtgctcaggcagctttcaggcaggtcccatagcaccccagctagccgcctggcagctttctggtgagttcaacagcacccccacaccaaccccccggctttccagcactcctcaagcagccttccagctcactgtgttagcgtcctcgcacgtggttcttggccctcagttctgtcctgggacagcccagtcgacgtcatcatctagtgcgtgcttttgatcacaccctctcctaggtctgaatccttcccttagttacctccctttactctaggatgttctgtggatttctcttttgttccctcttagtcaactccctgtaaatagttaataattcttatgctaaacttcccttgtttaagctaccatgtggtttctgtcccctggtgggaccctgactgataggcccggttattttttaaattggatgctgaatattgtgaatttcaaattgttggccaggcccggtgtggtggctcatgcctgtaatcccagcactttgggaggctgaggcaggtggatcatttgagctcaggagttcaagaccagcctgggcaacatagtgagaccctgtctctgcaaaaaatgaaataaattattggctggtgaattttgttgaattcctttgaataatgttgggtttgggtctggaatgcagttaagtcccttggaagcagcgatcctttagagacttctgaacttttcagtgggtccagtgctgctttagtctgcagttgacttagctctattactaagggtgatggccttctgcggagtctacccaataccccacgaattaggagatctctccacggtggcttgtgggaacacaaaatattccctgtgtgaactctggggattgttttgtttgctacttcctcaggagtctttcctgggccttctcatatagtttttctcacccaggcacagatctgttttcagctaaagactccaggagaccctctgcagatcctggctctgcctctgcagctgcctcctccccaggactctgccctgcaaatagcagcagccttggcctccctgagctctgaactctgtcttcccaactcagaaagactgcaggttccggctgagtttccctgcctgcgctgcagcctggaacccgcctcctggctgtaattggtgcagtcataggatgtgctctcttgtctcccttatcttggaatcactgtcctgcactgttttccaccaactgaaggcaaaagtatgttgtccagttttccaggtgttcagggttccctgttgctgcatcctacatgagtatataaacagagaacaaacaaaacagcctgtcaggagtttgctgaagtttcagaataggtggtgctgggtgagctgatgggcatgagtaacactccccttttccttcttttagtgaccacaatatgaatgggaacagcaagatggcaaaagcttgctgagtggtacagcgccagcctgggtagtggcctccccagcaagttgcatgtcactagcttcctgtggctgtcactcctgggcccaggcacctccgaagatcagcacctcctcatgggctcaagcgaggacaggagcccgtcacccatgagctctcaagggcagagccactgtcctgtctcgatggctccaccgtgactccagtggactttggacagtggggagcaggcccaacagggccactcggatgtggtcactctggatttgggtggatcagcaccaagctaga

SEQ ID NO: 15183 - DNA, 2300 bp, Homo sapien
cacgtcgaccttcacagtaattgcttgttcagtgactgccacaacccagcctggcagagagagggaagataccctataaagcaaggtaacgttaatgttgagaccatgaatggccttgagcagagcagagtatcattgcttccttcaaaattcagaaggatctgatggtgctctgtgagttcatgggggtgcctccgtgcaggttggaaaccacagctgtgcgtccttcccgctttccctcttgatcagtagaagggtaccctccctggcctgcacgtcgctgggtcacacaacactggctgtcgttgcacaaagccacggccaccagcgttcctttgaggccatttgtttccagccatggtgcctataggatttttcctttatcctgtaatttcagccaaatcagagcatgtgacctggcttagatgtcaatataattgttgttatgtgctcttttcccttcctgtgtctgtgacaggtttaatttaacctgagaaggctgcagatcctcggggttggtgtaaaaacacctcatcctgatctgagaaggcggtcagcttttctcctcgttgccgttggctgccagcacccattctctgtggatgtgaaaatcccagaagggctgggcttccttcttgggcattccccaggcctatctccagagtggggcccagcatgggaggattgtaccccactcactcccctgatgtggggcttggacctacagctcgacagcacccatggaatgtgggcagaagcgacagcagccagctccgccttggccttagggcggcacgtgttctgcttgtgccctgggagcctccaccttccacactgtgggaagagggtgcccagggagctgcagtctctccagcccagccccaggacgaggcccaggcagcagagccaccccagcagacctggcagtgtgagagaaatgcatgtgtatacactgagtttgcaggtggctgttacatggcagcattgactgacacagacagaaaagagatccacgagggagaagtgagagtgctggagactccacaagccacaggctgcaggggcaggatggcttcttagaaggtgaaatgattgttctgggaatctatcagaggaagacatagaggctccagacggttgaaggcccaacagtgatcccagacgggccccatgtcagaccaggctcctccagggctgtgctgccctcaccaaagcccgtcctgagggcagccacacagcaggcagcactcgccatttgtacaagcgaggcccaagttccagccttccttctggcaggtagaggaagcaggggcactatgcctgggagttcctgaaagcagatggggcagcatttggtcaagagccaggaggggatgacagaccagaggggaaccctcgtcccacgtgctgagcacacgtagggggttgggcacttgctctgtgagctataattggtgtccctgtgccccgccggaagctgcaccaggcagtttcttggtggaggacagtggccgccctctagctttactcccttccccgtgatgggtcgctgtcagatgtgtgtccaggaaaggcaaacaccaaaggcagaggactagtccctacaccgaatactccggtggccttgcttgggggctgggttttgacgtgctggaggctgtcctagacttagagattaaaaacagggaagaaccattgctgaaacctttggaaaagcctgcaatggggcctctggcagcctgaggagtggtggtgtttccatctggtagacgccgtctcaataggagggacagatgagtgcaccagtgctgccagccagaggcgtctgttggcgtgtctttatggaatggggtgccagtcttgtggagggtggtttaccttcctgtttctagtccccactgggcctgccttctgcttcatggccagctggccagaccgagcactttcctgactttcgaccttggcccctgctgactcttgccgttgaggcctcctgcagaccccatttgtattcatttcctgcagttctcatacctgaatcccgcctggacttctgccaagccttccaggccctcctcccccagggggaccacagatgctacgtgcagggctgtccttggagggccagcacagccccttccaagtgggcaagacccaggggtggctcaaaagatagctgtgccctagccctggaacctctgaatgttgatttttgtagcaaaaaaggacttgcagatgtgagtaaaggctgttgagataaggacatcctccctgctctctgggaggaccccaaatgcagg

SEQ ID NO: 15184 - DNA, 2300 bp, Homo sapien
gccgttgaggcctcctgcagaccccatttgtattcatttcctgcagttctcatacctgaatcccgcctggacttctgccaagccttccaggccctcctcccccagggggaccacagatgctacgtgcagggctgtccttggagggccagcacagccccttccaagtgggcaagacccaggggtggctcaaaagatagctgtgccctagccctggaacctctgaatgttgatttttgtagcaaaaaaggacttgcagatgtgagtaaaggctgttgagataaggacatcctccctgctctctgggaggaccccaaatgcaggtgcacagatcttaagaagaagaggcagagactggggtgatgcagccacaactaaggaaagccaaggattgctggcagcctgcagaaactggagggcaaggagcatcccccaaccgcccggagcctccaggaggcgcaaggtcctactgactccctgacttcagacgtccagtctccggaattttgagaggatccatttctgttattttaagcaaccaaacttgtggtagtttcaccagtctcaggaaatgaatacgaatggaaagtcaaagattccaagaaatgagtggcggggtgcggtggctcacacttgtaatcccagcatttgcgggaagattgcttgggctcaggacttggagaccttgtgtctgtgagaaacttaaaaaataggctgggtgcgatggctcacgcctgtaatcccagcactttgggaggccgaggcaggcggatcacaaggtcacgagtttgagaccagtgtgaccaacatggtgaaaccctgtctctactaaaaatacaaaaattagccgggtgtggtggtgcgtgcctgtaatcccagctactcgggaggctgaggcagaagaattgcttgaacccaggaagcagaggttgcagtgagccgagatagtattactgcactccaggctgggcagcagagcaagattccgcctcaaaaaaaaaaaaaaaaaaaaaaaaaaaaaaaaaaactgagcatggtagcatgcacctgtggtcctggctacgccggaggattgcctgaagccaggagttcaagaccagtctggacaaaagagcaagaccccatctctaccaaaaaaatttaaaaattagccaggcatggtgccgtacccatagtcttagctactcaggaggctgaggagggaggattatctgagccctggcggttgaggctataatgagccatgattgtgccactgcactccagccttggcaacacagtgtgagaccctgtctcaaaaacaataaaaacccaaaacaaaagaaccaagaaattactggacctgaggcctggcctttagctgctgccctgcccttgtgacctggtcactcgggatcccctgggcctaaacacacagcctattgtctacctcaagaaggctccccactgcttggctggcaattggggtgggctttgcaggccccacctgtcctggccccacggcgctggtgctgcaggcccccaccactgcttgttccgagctccccagcctcctgcagagttgcctgcacctgatggcgatgaatcaggaaggcaggcgtgtcctgggccacagagcagtcatggctgtcagccaccagggggctccatttgcaactttggatgtggctttggcctctttgtccaaagtgaccttggggcccccagacaagagacagggagactggagcccagccccaccctcccgcacatacctggcccatccctgccctatcctggaagatgggggccaccacacgtgcaagggacacgggataggaacctttggccttgttatcagacattttaaaactaagtgcaaacgtgattatcaggtgcagtttttacagcagcaagaaacctgtgcttacagaaagaaacacgtgctagcaacccacctatgcggaaagccacacagagccattgttttctgcactctcaggtgacggctcacatttgccccagggaaggtcacagctgcctgaacttttaaaactcccagacacgcactgcctgtgcaggatccggagcccagcagcactgccagggccttgaagtgcttcttcagagacctttcttcatagactacttttttttctttaagcagcaaaaggagaaaattgtcatcaaaggatattccagattcttgacagcattctcgtcatctctgaggacatcaccatcatctcaggtgagcaccaggtggagtgcctctgggtgactggccggtttggagcagggagggaggcttagagtctcatcct

SEQ ID NO: 15185 - DNA, 2300 bp, Homo sapien
atcttgatggtgggagagctgtgcttttcctaattgctggtgtaatattttcttttcggaatggtttttaacaaacaaagcaactttctgctgtcccttcctgttttctctggtgaggccaagctgctatgactagaattagtcttttcgttttttctttttttttttttgagatggagtctcactctgtcacccaggctggagtgcagtggcgcaatctcagttcactgcagtctctgcctcctgggttcactgggctcaagcaattttcctgcctcagcctccgagtagctggaaccacaggtgctcgccatcatgcctggctaatttcttttttagtagagatggggttttaccatgttggccaggctggtcttgaactcctggcctcaagtgatccgcctgccttggcctcccatagtgctgggattacaggcatgaaccatcactcccggcccctagaattagtcttttctgatgagcatctggtgctacctggctgggccctgtctggccaatgtcattgacaccacttgagtccctgggactgctggtgcactcacccggctccccaggtgctgggggcttggcacttagtgcgtctctctcctcaggatactggtatcgggatgacacaggaagagctggtgtccaacctggggacgattgccagatcggggtcaaaggtaagcgtggggcccccacacagcctcccccttcccctcagggtgcaaggatccctccagtaggggtggccctgggtgccagattaagtaagaacgttgtcagttgcatgccacgcagtgggtactgtgggaacacctcatgacatgacagccatccctcagtatctgggggttggtccctcagtatctaggggttggtttcaggaccccccttggatagcaaagtctgcagatgctccagtcccggattaaattggtgccgtatattgtagacacatcttcttgtatgctttagatggtctctaggttagttataatacctgatagaatgtaaatgctagatatagatataacatagttatgttttttatactactttttatcattgtgttgttttttattttttttctgagtattttcgatccttggctggttgaatctgcaaatgtggaacccgtagataggaggaccaactgtattggctcactgcaacctctgcctcccggttcaagcaactctcctgcctcagcctcccaagtagctgggattacaggcacgagccaccacgcctggccaattttttgtatctttagtagagacggggtttcaccatgttggccgggctatcctccagcctcagcctcctgaggcgtgactacaggtgcacgtcactatgcccagacccacagagcagttctgaccagaaccatcaaacccacagacgccgcatcccaagcccgttctcatcacggcgctgtgtgagaggggactgatccctctgaccctctctgcgtcaagcccacaaggctcagggaatcgactttgcagaaaagtgctgtgaggcagagcaacacatttggactcagaccaacagcctgggaacctccagcggtcgcccttttccagctctgggcaaagcacttacttcagtctcctcatctgtaagatgaaaacactaggtcgggtgcggtggctcacgcctgtaaccccagtactttgggaggccgaggcaggtggatcacgaggtcaggagatggagaccatcctggctaacacggtgaaaccccgtctctactaaaaatacaaaaattagctgggcgtggtggtggtacctgtcatcccagctactcgggaggctgaggcgggagaatcacttgaacccgggaggcagaggttgcagtgagctgagatcacgccaccgcgctccagcctgcgcgacagagcgacactccatctcaaaaacaacaacaacaacaacaacaaacaaaaaacccaccctaactgtgacttgacccccacgttacgtcttttgttgtatttctctcgaggttggtctgctgtcctgtgtagcggccaccagctgcatgtggcagtttaaatgtaaatgcattcaaattaaataaaaggggacattgtgctcctcagctgcacaggccacattgcaggtgctcggcaggctgtcgcattgcacctggcagaacgttcctgttgttggagaaagttccatcggacaacgtgggccagggcagtgggcgtgtgtattttacttgactttggccttaggacctttggcagtattatagtagaaaaatgaagtgctgtgcggtgcttaca

SEQ ID NO: 15186 - DNA, 2300 bp, Homo sapien
aattttttttgtttttgagacagactttcactcttgttgcccaggctggagtgcaatggtgcggtatcagctcactgcaaccttcacctcctgggttccagcgattctcctgccttaacctcctgcgtagctgggattacaggcatgcgccaccacgcctgactgattttttgtatttttagtagagacggagtttctccctgtcagtcacgctggtctcgaactcccgacctcaggtgatctgcccgcctcagcctcccaaagtgctaggattacaggcgtgagccactgctcttggcctaatttttgtatttttagtagagatggggttttgccatgccgaccaggctggtctcaacctcctgacctcaagtgataagaccaccttggcctcctaaagtgctggaattacatgcgtaagccaccatgccaggccacctttgcaggtcttttcctgatcctgagggtctaggaatttttaacggtctgaataaacaatatttgcgaaaacatttgccatctattacctgtaagggtggtcatctatgagacttcctctacataataagaaccttggtcttcacaacctgttttttgtttgtttgtttgtttgtttgttttgagacagggtgtggctctcttgcccaagctggagttcaatggcacgaacttggctcactgcaacctctccctcctgggcttaagcaatccacccacctcagcctcccttgtagctgggattacaggcctccgccaccacatccggtacaggtatgtttggtacagacagggtctcaccatgttgcccacgctgctctccaactcctgacctcaagcaattcgcccacctcggcatcccaaagtgttgggattacaggtgtgagtcaccgtgctcgtgcccacaaccccttatcttcacccagacactctttttattgattccaggtctgtataactcaactcttttttttcttttttttgttttcttttttttttttttttgagacggagtcacagctctgtcgcccaggctgcagtgcaagtggcacgatctcggctcactgcaaccgcagcctcccgggttcacgctattcttccgcctcagcctccccaggagctgggactacaggcacgtgccaccttgcccagctaattttttgtatcttagtagagatgatgggttttcaccatgttggccaggctggtctcggactcctgaccgcaggcagtccgcccacctcagcctcccaaagtgctaggattacaggcgtgagccaccgcgcccaaccagaactcaactcttttaaccaattgccaatcagaaagtatctgaatccacctatgacctctaagtatttcaccctttgagttgtcctgcctttccacacggaaccaacctatgtcttacatgcattgactgatgtcttatgtctctctaaaatgtataaaaccaagcaagctgtaacccaagcaccttgggccaagttctcaggaccttttgagactgtgcctccctccatgcacactcatatttggctcagaataaccttctaaatactttagagtttgactcttctcgacaaggacaagagaagtggaataaacgaataaccgcagttttcctggtggtattggtcactgggttcaggttttggagtagtagccagtcaagcctggaatccccttcctcattcgctttagctttttgtccagtcttggtttgcaagagacttgcagcggcctagacggatggccgggattcacaaaggtcgcagacacgggaactgcttcttccccagcgtcgcctccacaccctcgcgtggatactgacatccgccccattccaggaatgcgcacagctaggcgcagccggccagcgtgggccgggggcggcggggccacctcccccacctccgcgcgcaaggcccgtcgcccttgacaacgcgatccaaggtcacggaggtcccacccccaggcccgaccgtccacgagacgggtagtaccccgccacgcgcccgagcaggcagctgcccggacagcccggcgcccgccgtgacgtcaccgccccgcgcccgaggaagccccgccccgcgcagccccgtcccgccccttcccatcgtgtacggtcccgcgtggctgcgcgcggcgctctgggagtacgacatggcgcgcgagctgcgggcgctgctgctgtggggccgccgcctgcggcctttgctgcgggcgccggcgctggcggccgtgccgggaggtgagggcgtcctggctggacgggcagcgggcgggccgggccacggaga

SEQ ID NO: 15187 - DNA, 2300 bp, Homo sapien
cgcttgtacaaacaaaagaagaaagctttttcctgtagaagatatcatacggatgcattgtaaaatatagctgaatcagccaacacacgcattaatgtcagcactactcaaagtaacccagagaacaaggtgtggacgcacacacagacttctacaagtgactctggtcttgtggttccgtgtgctttaacagtgcgccttctttgcctcctagtttcgttgattgcaaggagtgtggccggaagatgcatcagatttgcgttctgcactatgacatcatttggccttcagggtgagttgtttcccctggcctggagggcagttctgcacagagccagtggcggggcagttgcagtggctactgcatctcattcattgttgtcagcaagaattcagcgattaagagagatggcagttggttctaaatttaagttctaagcgtttgtccgctttaggaattgtggaatcaaagcagtctgcctcttcactctttaattttataataatgtgatttaaactgccaacaaactatctgaatgctgcattttgttggtttgacaatttacatcattatatacagtctcatcataccactattattttgcagttttgtgtgcgacaactgcttgaagaaaactggcagacctcgaaaagaaaacaaattcagtgctaagagtaagtttcgggaagctttctgtttcctggactgcacattttagaaacttgtagaaattgtccccattgttctttggttcctctcaacacatggttctgaggttcggttgtcaaagattttcgttagttttttccccagtactttgtatttttcttgtctcatccttaaggagagccaggccagtcatgagggtaagaatgcaagaatgttcttcaggggcttcactgagaataggcagcacagctgtgagtccctgaagtctgtgcttctcagaatggtcatctcagccacggggctgctgagcacagagctcagagcaggactcgcagccttgggctgtggatcttcatcaagtgtaaaacatctcagtccacccttaaagggaatatttggcctgattgttatatgaaagtcagcatttatgatcagcgcatgttttagatgaaaggttagatgtgcagtaaactttgtaaattctgagaaaatttatcaacagattattctcaagtggtttagacctaagacccctcacccctcgtgcgtgcatgtgtggtgtaatgttggccagcactctctaaccctgggccctatgtgggctgccgtgggtctgtcccgtgggtgctggcttctgctacagtggggtatgagccatggcctctgggaaccagccaccaccccaggagcggtaggagcctggcctgcatgtggacttggctggacatgttactgcagctggtggtgcctgtgcagaaatagaaggaacaacctgttactgctagaagtaactttgcatgagtagactttcttttttttttaatttgagacattctcgctctgtcgccaggctggagtgcagtggtgcaatctcagctcactgcaacctccacctcctgggttcaagcgattctcctgcctcagcctcccgagtagctgggactacaggcgcccgccaccttgcccagctaatttttgtatttttagtagagacgggtttcaccatgttggccaggacggtctcaatctcttgaccttgtgatccgcccgcctcggcctcccaaagtgctgggattacagccattagccaccgcgcccggctgacttttttttttaagaccacattgcattgttatcaaaagtttatggttatttaatctttatagagtcaattctcaagtcttgggatggccttctgcagcttgacgcgccaggctggccttttgccgagttaaccagcaaacccacacaagaacggcaactgcagcagtgttctaacattgacttgccagctgctccctacagctgtcacctttctctggcaggacaggtgactagcatgttgctcaggagatccccaatagaaccagggtcatttggggagctcagagtagaagagagatggaaatgctaggatggaccatgcactgggggaaggggaggaggaagccaccctgtagacttgagactgagtcttaattcaagttcaaactctgttgttaaccaacatccaaagttatgcaatagcttacactgcctctgttaaaaacttgtgaaatatcactcattgataaactattgtaatacttttccttagctcggtttctcaactgaggcactgttgacattt

SEQ ID NO: 15188 - DNA, 2300 bp, Homo sapien
agggtgtgctattttaactccttgaatatatggggatctctttatgtttggccaaggggattagcacagtctcaatgcccttgggattctcaagagctatttgatgcataagtaaaaacatgaactaattcgggggcagtggaggcggggaagatggggcaggatgtgttatgtgttctctcacagagcccagaagtgatatgggagccgaggagtgggctaggagggcttcctggagtaggtgacatttgaactgggttctggaggatgagttagaatttgccaggcatgtcttctcagcacagggaccagcatttgaaaaaaaaaaaaaaaaagcctgaatgatgtgaactgcctactggccaagtgggtgtaggatgatgatggtgaagtgagccatgtaaagtagaagagacagattcaagagcggtatcacggcccaagattttgagcagtacaggtaaacagagaaaagcagaacgatcactcaatcttgacactcaaggacagtcaccatatgtacatacacctatgtttttaagagaattcatacgtgttcttttttaaagaaagactatgtagtgttttctttttctatgtctgggattttgttttgttttgttttgtttttgagacggagtttcactcttgtcgcccaggatggagtgcaatggcgagatcccggcttactggcctccccagttcaagtgattctcgcatctcagcctcccgagtagctgggattacaggcgcacgccgccacgcccagctaatgtttgtatttttggtagagatggggtttcaccatgttggccaggctggtcttgaactcctgacctcaggtgatctgccaccgcgcctggccagggagttgttttaaacagattttctccctctcttttcgggatgttaactctggtgctgcgtggggagcaacgtggagagcaaagaacacttaagtgagtagctgccaccatagccaccgggacagtgcgggaggagcagtctcccaggtaaagaccgtgggtagaggggcgcgtggcgggtgagagggaggagtccgcgctgactcacgggtttctggcttaggaaacagtggagctgctgatacctttatgaggaagccgggcaagtttggaggggcagataactaactgggatgggaacacctcgggtattcgtagaagtgtcccgcgggctgtggtctcgcgtgggggactccccaggcccgcacccctgtctggggcacctgcgaggcgccaggcaagttgcctggggcggggagtgcggcctgagcgtccaggcttaagccccgatgcgcgggcccttctccgcccaggccggccctcgccaccccgctctcacaggtgagggtgtctgccctgccgccttgggatgcgaacaggcgtgaggccccctcactccctagtgtcacgaggtagggcgggacccgaatcccggccctgccacttcctgcctcgaccactttggagcagttgctcgccccccgcctcagtttccccatccgcccacctcgtcggcaggacccaagggcggtctgtaacctgcagaggccattccacttccctggccggcggcgaaggctagtggcgcggcctgggctggggtcgccccgaccgttcccgaccgacgccacctaggagggtctggggaaggggacgcgaggagctgggaacacgcagcgccgccccagcgggacgggcgggcccgggctggcgtcgaatccgcgcccgagagcccagcccgcggccaggccgccgctcccggagcccgctggggcccggagccccggccctctacgcctggtcgccatcagaacaaaagctgtggctcagcccggagcccaggcgccccgcaggcctggcccgcgccgggccgccagcttccctacgcttggcggccgcgccttcagcccttcggcccgagcacgctcggctctttccgccacggccggcgcaggtggagggggcggggcgggggccgtgcgtggtgacgccgcgggggggtgacgcaccggcgtgccccgcccccaccccctccccgttcaggctctggaaagagaagaaaaaaaactttcttttttttttaattgaggaatcaacagccgccatcttgtcgcggacccgaccggggcttcgagcgcgatctactcggccccgccggtcccgggccccacaaccgcccgcgcaccccgctccgcccggccggcccgctccgcccggccctcggcgcccgccccggcggccccgctcgcctctcggctcggcctcccggagccc

SEQ ID NO: 15189 - DNA, 2300 bp, Homo sapien
caacatagtgagaccccatctctacaaatgatataaaaggcacctgggggtggtggtgcgtgcctgtggtcccagctattcagaagcctgaggcaggaggatcgcttgaatccaggagttcaaagctgcagtgaactgtgattgtgccattgcactccagcctgggcaccagagcgagaccctgtctcttaaaaaaaaagaagaagaagaaacatgtatgagatagagcgctgcaaatctggttccaactttctctgtgattttgctggaatttgttcaacactgagctcacagacagcagtgaaccaaaacttgttttctttggactgctttgagcaaaaatagaagaaaggggctcatttttttccagtgattttttatttttcatcaatagtgcagatccaaagtaagtatttattcactggcctgatttcccaatcttttaacttagaagtatgattgccagtttcctaggtttttaagaatacgctgaaaacaagctgccaagcttaggagccgagaaccatagaaagttctgtccatgtgcttggatcagatttccagcacaaactgtgatgtgtacatcgcttaactcggagtctgacttttgttagctgttgttggatgaacaggtgtgtgcagcggatgagtaacatgatacaaagagaggttgtacttccgctgggaggagaatgggcatttgggtttttgttgttgttgttgtttaatttcagcccaactgtttagaaagaaaattcttgctgtctttaccactttgtgctgcacagggaggtgggaaggaggatgttagacgtgcgtattaacaaatgctcttatggctacattttttggtccatgcaaaaaaaaaaaaaaaaaagttcgtcttttttttatccagttatcaaacttgtgtaaaaataagaaagtatatccttaaatagaattgtgccctggaaggaacccagatggctctcttgagattaaaatagtcatcccagccgggcacggtggctcatgcctgtaatcccagcactttgggaagccaaggcaggaggactgcttgaggccaggagtttgagaccagcctggccaacatggtgaaaccccctctttactaaaaataacaaaaattagctgggagtggtggtgggtgcctgtaatcccagtgactcgggaggctgaggcaggacaatcacttgaacccaagaggcggaggttgcagtgagccgagatcacgccattgcactccagcctgggcaacaagagcgcaactccgtctcaaaaaaaaaaaaaaaaaaacttagggacatcattctcagttttttttaaagggtactagttttagttttgatttaccaatttatgtttccgagacgttttttcaatgaagtgagtcacttttgaactattgtgaggcactcattctaatttcatggctctcagtttacaggaacataacatttgatgccaatgaaattcattagaattctgcgctatcctgtgaactgcgtgcccatctgtcttgtatgtgtttccaggggtggcttacaatggtcttcgccatgtactggatggacgtgtacttattatgaatcctcacaccctgagacccaagaggatccctcgtaaaacaaggccatatctgatttggattaaaatccccacggagaacctgatgtcacccaggaaagtgcacgtctccttgcgtgctcttgagaaacggttgagaaaacagtccttccagctcagtaaataccattttctttctgtctgctcaccacccttgcatttgcaataaacctgacaaaaacttccagagcgaaaataagaatgttcatatttgaaggagatgttggcagacggccacagacttcaagtacgcaagctcattccgctcttgcttttctgccaataactccttggcctccgcgcactctgcacaggcggggcctgaggacggatcatgatcgtgtccgatgatcacggacccgccggagactctcaatggagaggcgatgagtcacagccaagcgaactttctctgctcctgaacaaattgcttctcctcgtcgtcccactccaaacctagaggtgggacaaccccagcatcctgggcgtgaacgcacccagcttgattgtcacatggggaatagagacctcgcgcctgcctggcataggccaacccagtaatgttcatttaaagctggctttactagtccttcttccacaatgagaggtgacccttcacttcaccgagaaaggaaggaagaaaggtaggtgcagggaggaagtggtggggc

SEQ ID NO: 15190 - DNA, 2300 bp, Homo sapien
actgtcctttcctgttccatgttcccaaccagcatcccatgttccatttagttgttgtatctatccccttagggacgattcctagattgtgacagtttctcagtctttgtctttcaagacccaaagtgtccaaggacacttttgatgggtactggttaatcactttgtagaacaggtctcaatctgggtttgtctggtgttttcttgcgattggattgagattacacacttctgcaggaataccaccacaatatgttgcttttagttttttcctcctttattgtggtaaaatacactcaacataacatttaccatttaaaccactttattttattttattattattttttgagatggagtttcactcttgttgcccaggctggagtgtaatggtgcgaactcagctcaccacaacctccgcctcccgggttcaagcaattctcctgcctcggcctctcgagtagctgggattacaggcatgtgccaccacgtccggctaatttttgtatttttagtagagatggggtttctccgtgttggtcaggctggtctcgaactcccgacctcaggtgatccgcccacctcggcctcccaaagtgctgggattacaggcgtgagccaccgctcccggcctaaaccactttaaagtgtatgattcaagggcagtatgtagattcatcctgttggatcatttctagactttttcatcatcctaaaacgaaaccccaagctgcttatcttcctcccctagcacctggcaacctccaatctgtgtcgcctctacggatttgccaattcgagacatttcatctggatggaatcatacgctatgtggccttttttgtttggcttctttcactagcataacgtttcccgggttcctccacactgcagcatgcatcggtgctccattcctttttgtagccgaataatattccattgcatggacagatcacattttacttttattttctaattcaacagtgagacctggtgtgggccccggcgctgggcctgggaggcgagggaggggatggaagagagccccgtgactggcaggaggcactgtggagtgtggggagaaggggtcgggatctgcatgctagagagaataggattttatttacacgtggcaatgtttatggaggccaatgcacaactgccattatgggacgcggactcctttgaaagtctcatttgtgtaaaaggaaaagcagtagttcatgaggagggggagaagggctcaaggacagcaaggtaaactacccctggggcgggggaacgtggtcgtcggtgggcccagctttggaggctaggcccgtgaaggtcgccccgtgagcaggtccagggcaggccgagtgccccggggcccgcattcattgcttacagagcaaggggagcctcccgggagggaaatccaacggttggaaacttcgatttatcccaaaggcgtgccgagtgggaaggcaacattttgatttcccaaacgttgcggccagcggcttcttccacggcaggcgccttcaggtctctccgcagggtcgggaccccgggcggcgcgcggcctctgggacgccgagggagggcgggcccacagcgcccggagcgcggacagcggccacagcccgccgcctagaagcggcgccgcccggggcggggggcggagccgagcgcgcgccccgccccgccccgccccgccccgcagccccagcccagcgcgcgcaccaaggcggggcggcgcgcggcccgtgcgcgtgtccggggccaggaggcggtggcggcgagcgcgggccgcgcgtgcgcgctgcggctgggcgaggggcggcgcgggcgcgcgtctgtcagtgacagcgggcggggcaggggccggagatggtggcggcggcagctcttccgacatgaggcagcggccgcgggggacacggcggcgggcgcggcggcggccgcatctctagctcggggaggcggcccccggcgtgggcgcgggcgggcgggcgtcccggccggcgtcgcgggagcccggctctgcggcagcgtctgcaccgccgcccggcgaggggcccgcgtccgtggttccacgcgctcggtcccgggacagctgcggccgcggcgggagcggcggcgcactcggggggaagcaggccccactagacgggccgcgccgacgggctccgcgcactcgcagcccggggcgcccccacccccagcgcccgccgccgcgggcagggccggcccggagcgcggggggcggccggggagcgcgagccgggggcgcccgccgaagctcgctgctccgggtc

SEQ ID NO: 15191 - DNA, 2300 bp, Homo sapien
gtcgagctaagggtcctcggaaaaaaggcatgtccgtgcatggttctgtctgcagcaccatttagagtttgattactgtcagccattctgatgggttgtaacactggtttgcctccaccagatgttgagatagtttccagattccagagaaaccaggcagagagaaacaaacatgctccaaattttcttcacaggagtataccttattcaattattaaaggccataaatagttcacaataagttttcttgactcgttttgatgagtgttgtaccttgggatcccggatgaggtccccaacatgaagcagctacattgtttggggtaaatacctggggttcattgtctcacgccaagaaaatttaggacacagacacacatgaggagtttaggagcagaggtttaacaggcaaaagaaagagaaagaaaaacagctccttagtgagagagaggggacttccaagaggaaaagtcccaagaccttgtctttgaaaaagcagtagctcatgcctgtaatcgtagtgctttgggaggtcgagacaggaagattgcttgagcccaggagttggagaccagcccgagtgacataggaagaccatgtttgcaaaaaacaaaaaaattagccagatgtggtgcacacctgtattcccagcccctcggaggttgaggtgagagggtggcttgagcccaggagttcaaggctgcagtgagctatgatcgtgtcactactccagccagggtgacagagaccctgtctcttaaaaaagattaaaaaaaaaaaaaaagtcaagtgcctaccagatgcctaattctttttttttttttttttttttttgagacagagtctcgctctgttgcccaggctagagtcagtggtgcaatcttggctcatggcaaccttcgcctcctgggatcaagtgattctcctgcctcagcctcctgaggagctgggattataggcacccgccaccacacccagtaatttttgtatttttagtggagatggggtttcaccatgttggccaggctggtctcaatctcctgacctcaggtgatccacccgcctcggcctcccaaagtgctgggattacaggtgtgagccactgtgcctggccctgatttagttcctttcctccaaggctggcttctacctcttccccacacagtgacactgtaccccgaccagacaagcaagtgtctgctttcccttggcttcttacaactggctctctgggccatctacaaaaaattttaaaaaattagtacagcatggtggcactactgtcctagctacttgggaggctgagttgggaggattgattgagcctgggaggtcgagtgcagtgagtgatgattgtgccactgcagtccagcctgggtgacagagcgagatcctctatcaaaaacaaataaacaaaaaagcactttgcagaggtgactgaatgttctggaacccctgggccattggaaatggatatctgttgctccatcctccagtttacaccgtagcctcagcttgtgtctcagtgtgcccctctccctctggtctgtgctctctctcttccagaggctgggaaggttgttccagggctgcagccttggacctcagaggtcacatgttgcgggtttgccgtagctgaccactctctagcatgtggatcagtggctgttaaataggatttcttttgcgtggccttacaacttcctccttccagtgcaggcgtgtcaaggtccttaacctgccgagacttcaggtcaagttattgcaagttctgggaagactcagcttcccagctccaccgcctgagcccaagggatgctccattttatgcctgtcacccacgccctgtgacccatgtcatgtgatcccagggctgcaggggttcgggggaagagaatccagccacggccctgccttctggggcctggcagctgggacagcagtggcgcagcctgagcctctgcacagccttctggggtccgggcttcttccccatcacaccctcctagttgccctggtgactgtgtgacccctctcccccctccaccgcctgctgccacggccggccgtataaatagaggcgaggagcagctgggctctcttggcagtcaccatgagggcgctggtcctgctcggctgcctcctggcctcgctcctgttctcaggacaagcaggtagggcccctcccagcatgacccagcccagactggtcccccacgcttcctccaaggttttctgtctaccatgggttgggtagggggtcggggctgatggcaaaccctggctcttggctggtgtct

SEQ ID NO: 15192 - DNA, 2300 bp, Homo sapien
ggctggtcttgaactcctgacctcaggtgatccacccaccttggcctcccaaagtcctgggattacaggtgtgagccaccgtgcctggcctgggcccggctgacttttttatattttattgtagaggcagggttttgccatgttgcccaggctaggccatggtcctttaaatccttcactcttccgtgaccagagatcgatttacaccgtggtcccctcctatgcctcatgctcacagtgctgggtgcttggggactgaggccagagcagaaggcagaatcacagctcaccccacgatgacagtggacacgaactcttcacagaaaggcaggagtctgcaggttttcttggaattttacagtgaacaattcaatggcacttcatacattcacagtgttacacagcctacctggttccaaaacatgtccgtcactccaaaatgactccatgaagcagtcactccttccccctcctcccagtctccagcaaccacctgctttctggttttaatatcttttttaaaaaattaaagtagttggctgggcgtggtggctcacacctgtaatcccagcactttgggaggccgaggcgggtggatcacatgaggtcaggagttcaagaccagcctggccaacatggtgaaaccccaactctactaaaatacaaaaattaggctgggcacagtagtggttcacgcctgtaatcccagcagtttgagaggccgaggtgggcggatcacttgaggtcaggagtttgagaccagcctggccaacatggtggaaccccgtctctactaaaaatacaaaaattagcctggcatggtggcgaatgccagtaactgtggtcccagctactggtgaggctgaggcaggagaatcacttgcaccggggaggtggaggttgcagtgagctgagattgtgccactgcactccagcctgggtgacagggcgacactccatcttaaaaaataaataaataaataaataatttttaaaaatgaaagtagttacatttagtagaagtcacactttctgatttttggttttgcgtgtttcctacacgcaaatgcatagtttcctacccaccactatgatcaagatatgatttaaagaaaaaataaaacaggccgggtacggtggctcacgcctgtaattccagcactttgggaggccaaggtgggcggatcacctgaagtcgggagttcgacagcagcctgaccaacatggagaaaccttgtctctactaaaaatacaaaattaaccgggcgtggtggcgcatgcctgtaatcccagctactcgggaggctaagacacgagaatcgcttgaacccaggcggcggaggttgcggtgggccgagatcgcgccattgcactccagcctgggcaacaagagcgaaactgtctcaaaaataaataaatagataaataataaataaaaccaaagcaaaataaaaaagatatgaattagttccttcatttccaatgccccccatgcctcttggtggtcaacccagcccctaggagccactgatctatgttgccatagtcttacctgtgacatgtcatagaaatgggataaccctgccttttgagcctggcttctttgcactgcagccaattttctcttgctgagattatccagctaaatttacataggatctggcccggcacagcgacccctttcggccaggtgcgaaacggcaggcccgacggtccccacgcagctcctaagaggatcaacagagggcgcagtgcgcccggaacgcccagcccctgcgaaagcggaggctcctctctcggtccctgcgggacagctcagttctcataggccagaggcgtggcttgggggcgggccaggggaatcccacctccccttgcatgctcaagcgcgccgggcgatggtaggcggtctcacccgcaggcggtggaagtcaggggcgcggctgcggccccgccccttcccggactcgccccgcccgtcccctcgccgcgcatgttcccagacgcctcaggccatggcgcgcgcgctcccgccagcacgcacgtctggccccgcccccgcgcctggcgcccgcgcgctctctcgcacgatctgctcccggactccttcagcgcgctgcctgcctgcccagggccttcccggagagcaggtgacggcggcctccgggcatggagctcgcgctgacgaaaggttctggaagccgccgtaaaaagtaatcaagaaacgggtgacaggacttttcgtaagacatttaatttttacccagagtatccgaaacattgccgtgtcaatctcagtg

SEQ ID NO: 15193 - DNA, 2300 bp, Homo sapien
ttagccgggcttggtggtgtgtgcctgtaaccacagctacttgggaggctgaggcagaagaatcacttgaacccaggaggcggaggttgcagtgagccgagatcgtgccactgcactctagcctgggtgacaaagcaagactccgtcttaaaaaacaaaacaaaacaaaacaaaaaaaagaatagcttgctcactaagggcagttaaaaataggcttcccaccagggccatccatggctcatgcttgtaatcccagcaatttgggaggtagaggtaggattccttgagtcccaggagttcaagaccaggctgggcaacacagtgagactcctatctctatttgttgaaaaacagtaaaaaggtttttttttttttttttttttgagacggagtttcactcttgttgcccaggctggagtgcaatgacatgatcttggctcactgcaacctccacctcccgggttcaagcgattctcctgcttcagcctcccgagtagctgagattacaggcatgtgccaccaggcccccggctaattttgcatttttagtagagacggggtttctccatgttggtcaggctggtctcgaactcccgacctcaggtgatccacccgcctcagcctcccaaagtgctgagattacaggcgtgagccaacgcgcccagccgaaagttttttttttttttttttttttttaagtagaaacatagtaagccttccagagacttttttttggtcaagtggtctgggatctctccttagagaaactgcctaacaggttgcttcaaggattggagagcgtgtaagcaaaactgctcggcatccaccgggtgctggcaacatctaataacaatatttcccaataataacagtaactattgttactagtaggaataagtcaaattaggaggcgcgatttaggcggaacctggaaggcggtgggcaggatccaggacattccaaggcaggcgtgggcttcctgagccaggagccaaccctccaggagccaggggagggcctggggccggaaggtgcggcgtgcgagcggaggacggaagctcgccgccagggtccccgtccctgccccaagtcgtcaccccctcttggggagcgcatcctggcggaggggcaagtcccacacgggctttgttatgaatgggaagctgcagccttcagcccgcggagggaacagtgcgggtctgggggaatagcaggggacccggcagcaaccagcagacctccccgcagcgctggcagcctgcgcccgggggccgctgccgttcaggcccgcctccaccctcccctccctgccggggcccccggcttcctagggcggccccagcatccgaggcgccctttgccgtcccgtcgccgggtccaagattcccaggatccggagtcccggccgtgcggccagctaagcaaggcgggagggaggaagctggccggcctccgaagtcagccccgagttacatgtgggaagcggtggctgtgacgcaagtttccagggggccctgggctcggctcgaagggagcacaccggagaggctccgctccgtgcagctgcaatggtgaaaaagcagaagccccaagcgcgaaccccaggccgccttccttgctgccgctgcacgcccgacccagccgcgccccctcctccctgcgggccggccgagcgcgcggaccctgctctgggccagtcgctgctggactccgggctgcacgggctgggctccctgcgcggtggctggcctttttttttttttttttgcaacgcttgccaacctgtcagctgatggacctcatcacccatagtggcgcatgtagctcggccgcagctcgctccattcacgccgcgccccgcaagcccgcccgcggcccccggccccctgcgccccgcgagaggcctgcagaccccggttgcagccggtccccgggggcccgcgcccctctcgccccggcctcgcgccgcccggggggcgctgcaaatagtcctttgtttacatgcaattccttactccgcggaaggaggccgggggagtgctgagttttcaccagctgtttcccgccttgaaacagacatctgatcagctgcaaacacacacacacacacacacacacacacacacacacacacacacacacatacacacgcccggggaggcaggccggagagacctccctcccgcccctcccgcccgcctccctcccctcgccgccgccgccgccgccagcatctgggaccggccgattctgcacctccgtccggcgctgccctttgattcggatttccatcttgcatt

SEQ ID NO: 15194 - DNA, 2300 bp, Homo sapien
caagtagctgggattacagatgtgtgccaccaggcccagctaactttttattttttgtaaagagatgtggtctcttgggaggccggagcgggtggatcacctgaggtcaagagttcaagaccagcctgagcaacatggtgaaatctcatctctagcaaaaatacaaaaaattagccggcatggtggcgagcgcctgtaatcccagctacttgggaggctgaggcaggagaatcacttgaacccaggaggcagaggttgtagtgagccgagatctcgcaccattggactccagcctgggagacaagagcaaaactctgtctcaaaaaaaaaaaaaaaaaaaaaggtctggggtgtcattatattgcccaggctggtctcaaactcttgggctcaagtgatcctcccaccttggcctcataagagtgttgggattacaggcgtgagccactgtgcccgccctgtctctatttatacaaataaaaataaaagtaaaaaaataaaatgtctggtagagaaaaagaactggtctggaagtggctcacacctgtaatcccagcacgttgggaggctgaggtgggaggcttgcttgaaccctgcagttggagggaggctacagtgaggtaggatagagccattgcagtccaacctggacaagagaaggagaccctgtctctaaaaaaattcaaagaaaaataaaaaaagaaagactggtcttgccaagaactggaagtttcttttttttttttttgagatggagtcctgctttgtcacccaggctggagtgcaatggcatgatctcagctcactgcaacctatgccttccaggctcaagcgattctcctgcctaagcctcctgagtagttgggattacaagcacgcaccaccatgcccggctaatttttgtatttttagcagggatggggtttcaccatgttggccaggctggtttcaaactcctgacctcaagtgatctgcctgcctcagtctcccaaaacgttgggattacgggcgtgagccaccacgcccagccaatttttaaaaaatataatagagactaggtgggaggtgggggtcttgctatgttgcccaggctggtctccaactcctggcctccagggatcctcccacttcggcctcccaaagtgctgggcttacaggtatgagccaccgcgcccgaccgataaacatttttgctaacagatttaaactagcgtctcctgtaccttttttctacacacctcgaccccagggctgcagttctgcctgcctgaggtcggatgcggtcggctgcagggcagggctccgggctgaagcgcagcgattcccgccgccgtgagggggcgctctgcgggcctcggcctcggcccttccggacgcccgcacaggtcgccggacccagagagtcggcccttaatagccccctcctggaagcgctaggtcccgaaactggccttcccccggggcccatctcccggctaatgtttaacccggccacactccacattatccacactcaggagaccggggtgaggtgagggtggaggctgggggaggtcacctccaaatcgccaacttccgagcctttgctccaggcaaacggccttcctacatcccttccaggtatcaacctacagctcctgcgcacctactatgtgcccatttccacaacaggtcatgagcacctaatatgtgttcattagaccaaaacatgagcatccattacgagtccacacctactatgtgtgcattcacccacaacgtcctgagcacctactatgtgtgcattctcttaaaatgcaatgagcatcgattgtgtgtccacataacccatgagcacctgctatgtgtccatctgggcaccagcccatgagcacctactatgtgtgcattctcttaaaatgcaatgagcatcgattgtgtgtccacataacccatgagcacctgctatgtgtccatctgggcaccagcccaggagcacctactatgtgccaagccttgtgcctgccatggatgccttgtgatcaagagccacgtgcttcgggctctggcggggaccgcagcatcaaatgcacgaatgaagacggacttaaaaccagcgtcagatgcctcacctctaggggatgctgattctgggatgcctttttcgtctcctaggctcctcaaggccaactgcgctgggaagagggggtgtccaacagcaggagggctgtttttttgaactacaatttgccagcatacagcagagcagcaagaagataacagggcggggggcacgggattagcccaaacaaaacacactc

SEQ ID NO: 15195 - DNA, 2300 bp, Homo sapien
aaaattagctgggtgtgatggtgtacacctgtaatcccagctacttgggaggctgaggcaggacaatcgcttgaactcgggaggcagaggttgcagtgagcccagatcacaccactgcactccagcctgggtgactgagagactccatttccaaaaagaaaatgaaaattaaaccagtgagaaattctaagaaaaatgatgaaaattacagcatgggaagtgatactaaaagaataccatctccagtaaaaaataatttctacatatttatatattaaccgccagatacagctggtcaactccaccaaccctgccccagctggccaggccaggccacaatccccagctgccccctggtggcgacccagcgccctggggctccctggcttgcgatgcctctcctctaggcctctgcagggagggcggtggggcccctggctgtgcccactttctcggtttgcctggtgcgagttccttggtggtgagcgtggctacctgccggccatttcagaggatgctccttgccccctggcctggttctagatctttggggtcaaacagggcgggagtccggagcatggctcctgctctgtcagaaaaggctgttaggacacggctagccagttcccgggagatctggcttcaggccttgaatcttgttgggaacaggccccccaaaatctggctgtaaactagccccaaaactggccataaataaaatctctgcagcgctgtgacatgttcatgatggccatgacgcccacgctggaaggttgtaggtttaccagaatgagggcaaggaacacctggcccacccagggcggaaaaactgcttaaaagcgtttggctttttgtttgtttgtttgtttttgagacggagtcttgctctgtcgcccaggctggagtgcagtggtgcgatctcggctcactgcaagctctgcgtcccgggttcacaccattctcctgcctcagcctcccgagtagctgggactacaggcgcccgccaccacacctggctaatttttttttttgttatttaatagagttggggtttcagcgtgttagccaggatggtctctatctcctgacctcgtgatctccccgccttggcctcccaaagtgctgggattacaggtgtgagttactgcgcccggccacaggcgttcttgaaccacaaacaatggcatgagtgatctgtgccttaaggacacgctcctgctgcagataactagccagacccatccctttatttcccataaggaatactttcagttagtctataatctatagaaactatgctaatgactggcttgctgtcaataaatacgtgggtaaatctctgttcaaggctctcagctctgaaggctgtgagacccctgatttcccaccccacaccgctatatttctgcgtatgtgtctttaattcctctagcgccgccggattagtctcccgaccgagctggtcttggcaaatctgatagtttttccacttctgagctctgcgatctgaggcgatgcctgtaaaagacgcagtttcgccaagcgtggtggctcaggcatgtagtcccagcgttttgggaggccaaggcaggaggatcgcttgaggccaggagttcgagatcagtttgggcaacatggagagacccgatctctacaaaaaagaaaatttttttttttaattagccaggagcggtgcctgcctgtagtcccagctaccagggaggctgaggtgggaggatcgcttgagcctaggaggtcgaggctgcagtgagctatgattgtgccacttgcactccagcctgagtgacagagcgagactctgtcagcaaataaaattcagtttcatggcaaaatgaagaatgtgagctttgtcttccccaagagactcatgggaagcagatgcggaatctctgaggaggctgttggctctccccccatgatagctgccggccaggtcgctcggagggtctccctacccaggagacaacctcacactgccccctgctcctgctcctgttagactgtcatgagtacagcccgaggagaagcctggggtctcagtgccacagcacagctcctgtccttccccaggttcctgcgtgaagaccagctgggagcccactgcctgctgccacctccaactccggccccctcaccatgcactccctggacgagccgctcgacctgaagctgagtatcaccaagctccgggcggcaagagagaagcgggagaggacgctgggtgtggtccggccccgtgctctgcacagggagctgggcctggtggatgacagccccac

SEQ ID NO: 15196 - DNA, 2300 bp, Homo sapien
cccaggggccctgggttcgagtcctgttctgttattaaccctgcgtgccagaccattcccgtctgcaaagcgggcacttcccccctccccggctcacgggggccaagctctggcggctggtaaagctcagaggtggtgggtggtgtcacacacctgtcagctccacaggctgctcctcacattcgtgtggtctgggggcatggctggtgtctgctcccaaggtcacagtgggggttcggaggcaggagtacctggcccactgggactctacactccagcacaccctgaactgtgcctctccctcaggcttcctgctgaactccaagttccccgagaaggtggagggacgcttttcagcagcccctctcgtggacctcagcctgtcaccaccatctgggctggactcccccaatggcagcagctcgctgtcccccgagcgccagggcaacggggacctgcctccagtgcccagtgcctcggtaaggaggggtgagagttccggagagaggggtggactggtttcctggggttgccatgacaaagtaccccaacactgagtggtttaaaaaacagatgtgttacccctcataattctggaggctggagtctacctggaaggctctaggggagaaccttccctgcctctctcctgccttctggcagcttctggaaatgcctggcactctagcctggtagctgcttcactccaggctctgccctgtcttcacacggtctttgtccctctgtgtccgaatctctctctggtttctcttataaagacaccagtcatggccgggcacggtggctcacacctgtaaccccagcactttaggaggctaaagtgggaagatcgcttgagcccaggagttcaaaactagcctgggcaacatagcaagaccccatctctatttatttttttgagacagagtcttgcttcattgcccaggctggaggccagtggcccggatctcagctcactgcaacctccgcctcccgggttcaagcgattctcctgcctcagcctcccaagctgggactacaggtacacaccatcacacctggctacttttgtatttttagtagagacagggtttctccatgttggtcaggctggtcttgaactcctgacctcaactgatccgcccatctcggcctcccaaagtgctgggattacaggcgtgagccactgtgcccggccttttttttttttttttttaaacagggtctagctctgtcacccaggctggagtgcagtggcatgatctcggctcactgcaacctctgcctcccaggttcaagcaattctcctgcctcagcctcccaaatagctgagattacaggcatgtgccatcacgcctggctaatttttgtatttttagcagacatggggtttcaccatattggccaggctgatcttgaactcctgacgtcaagtgatccgcccacctcagcctcccaaagtgctgagattacaggcgtgagccaccgcacctggctatatattttttttaattaagaaaataaaaatttaaaacacaccagtcactgggtgttgggcccaccctaatctagtgtgacctcatgttaacttgattacatctgcaaagatcctagttccaaataaggccacatgcacaggtaggggctggggagaagaggacctgaatgtctctgtttggggacaccattcagtccactaccgatgggacggggggctctgggccagcaggaccttgactagccctcccctcgcaccccaggacttccagccactgcgctatttggatggtgtccccagctccttccagttcttcctgcccctcggctccgggggggccctgcacctgcctgcctcctccttccttacccctcccaaggacaagtgcctctcgccagacctgcccctgcccaagcagctggtgtgtcgctgggccaaggtgagtgggggccagcaagagtagtgtggagtctggggcaggtcaccccgcatgggctcagaacacttcccatcctccgcagtgtaaccagctctttgagctcctgcaagacctggtggaccatgtcaacgattaccatgtcaagcccgagaaggatgcggggtactgctgccactgggagggctgcgcccgccatggccgaggtttcaacgccaggtgaggtgggggagagaggggtagagggaggactggggtctccagtgagctgagccgtgccccccgccctccctggagcaggtacaagatgctcatccacatccgcacacacaccaacgagaagccacaccgctgtccgacctgcag

SEQ ID NO: 15197 - DNA, 2300 bp, Homo sapien
ccaaggcaggcggatcacgaggtcaggagcacgagaccatcctggctaacacggtgaaaccccgtctttactaaaaatacaaaaaattagccggacatggtggcccatgcctgtagtcccagctactcaggaggctgaggcaagagaatctcttgaacccaggaagcagaggttgcagtgagccgaggtcatgccactgcactccaggctgggcaacagggagacgctctcaaaaagacaaaaaacaaacattaaccacatgtgttggcacatgcctgtggtcccagctactcagaaagctgaggtgaaagtatcactcaaggctggaaggtcaagactgcagtgagccatgatcatgctactgtactgcagcctgggcaacagagtgagaccctatcttgaaaaaaaaaaatttttttttggctgggcacggtggcttacacctgtaatcccagcactttcggaggctgaagtgggaggatcacttgaacccaggaggtggagatcgcagtgagccaagattgggccactgctctccagcctgggtgacagagcaagacttcatctcaaaaaaaaaaaaaaaaggaaaaataatttaaaaataaaaaaccggttgggcacagtgtcacatgcctataatcccagcactttgggaggctgtggcgggtggatcatttgagaccagtagttcaagaccagcctggccaacatggtgaaaccctgtctctactaaaaattcaaaaattaatggggcatggtggtccatgcctgtaatcccagctactcaggaggctaaagcatgagcatcgcctgaacctgggaggtggaggttgcagtgaggcaggattgtgccactggactccagcctgggcgacagggtgagaccctgtctcaaaatgataaataaaataaataagtaaattatgtggtatggtagagggtgatcagagtcttggaagaaaaatagagacaagaagggaggataagccagtcacaaaaggctgcacattgtatgattcaatttcttcttttttttcatttttcatttttaccttttttttttttttttttttttttgaggcagggcctgactctgtcacccaggctggagtgcagtgatcacagctcactgcagcctgtacctcccgggctcaagagatccaccactcagcctcccaagtagctgggattacaggcacctgccaccacacccggctaatttttgtatttgtagagatggggtttcaccatgttgcccagcctggccttgagttcctgacctcaagcgatccacctcggcctcccaaagttttgagattgcaggcatgagccaccacgcctggcttgtatgattccatttctatgaaatgtccggaacctgtgaatccatagagagaaaaatgagtggttgacaggggctgggggagggggctggggagtgactaatgggtgatgaaaacgttctggaactaatagtggtgacagtggcacagctctgtgaataaaaggcattggactgtgcacttgaaaatcatgaaatctacagtgtatggattatatctcaataaagctgttacttttttcattcatggagggcaagtcacggcgttttaaggggtccaggtgggcctcattgaggtgacatttgagcaaagatttgaagaagggaacgagcttctcaggcaggaggaatgtggatgaaacctattttgaagttttctattttctaaagtatttttgagaatttagcatcctactccatattatgttcattgatttcatataatgttgcattcccaaatattttggcaaaatcaagggcagaaatcgccccacgtctgaccgatgtgcttagctgctccagcgcactggggtaagcacgcgggcaattgagactcccggtaacgccccttgccctcccaagcccgcccccagttatccagagcccgacgcaggctcagtcaaaccccgcctccgaccccgccccgagccgctaagacgctcccggtggcccgcccttagactgaggcaatgcgcatgcccagcgccgtatcgcgcacgcgctctctgcggctttccttgacctctgacccgccgaccacgcttgatccccggccgcggggccaggaagtcggagtttgagccccggaggcagagcggctgccatggtgagccccgagtcgggcgctaccggggaggggaagccgagtcgggccgggggccgggggccgggcggcgagctccgggctgggcggcgggcgccgtgcgccccctgcgtgcccggcgggaagcatggtctg

SEQ ID NO: 15198 - DNA, 2300 bp, Homo sapien
ccgagaatagagcagtgtcagcacacagtcagcactccataaatactgacgtacacccccggtgctcaccccatgtgcaacgaggctgagcaagtgaggtagtcagcctagggctcagctcagcgcccagcatgttggggagccccatctccagccactgtggttctgtggctcaggtccttggggacctgtgggggagctgatgccagtcctgggccctccccaggggttcagtcagcaaacggggctcagttcagactcatttcagggcgagaggcagctgtactgttacgaggtggtcccgcagcagccggcgctgagcccaggtaagccttgcttcctcgcccccatcccctaccctcccctcccctgcccatcctgcctgttcccctatggtgtcctcaacagtgacccagtgtgtcctggagagcgtgctgcgtggggctgcccttgtgccccggcaggcgctggccgtcatgagctgcgaggtactccgcgtcctacagctgagcgacacagccatcgtgcccatcggctaccatgtgccccgcaaggtgagggggacttgggcgagggactgcgggggctggggagtcggggggcctgggcctcactagctgcctgcttgtctgcggccaggctgtggagttccacgaggacctgttcccggacactgccggctgtgtgcctgccaccgacccccatagctggtgggctggggacaaccagcaggtaggaccagggctggctcacctctcccagcctccccgagtccctggtagccccgtgtggctgtgtgccaactcagtctggcctgctgggtgccccccatccctacccagttgaccctcccatgggggccctcctgaccgggcagcccatgcccccatctccccactgccggcctccatgcaggtgcagaaggtcagcctcaaccccgcctgccggccccacccgagcttcacttcctgtctggtgccccctgcggagcccctccctgacacagcccagcctgcggtgatggagacacccgtgggtgatgcagacgcaagcgtaagtaccagggccgcccccatcctccctcagcgacactgcagtggctgccctgagtgttcaccggctgaacggcctttttttttttttgagacagtgtctcactctgtcacccaagctagagtgcagtggcgcaacctcggctcactgcaacctcctcttcctaggttcaagcgattctcctgcctcagcctcccgagtagctgggattacaggcatgtgccaccatggccgactatattttaatttattttttgagacagagtttcgctcttattgcccaggctagagtacaatggtgtgatctcggctcactgcaatctccgcctcttgggttcaagtgattctcctgcctcagcctcccgagtaggtgagattacaggcacccgccaccatgcctggctaatttttgtatttttagtagacatggggtttcaccatgttggtcaggctggtctcgaactcctgacctcaggtgatccacccgcctcggcctcccaaagtgctgggattacaatcatgagccactgcacctggcctaatttttgtttttgtttttgtttttgagatgagtctcgccctgtcgtctaggctggagtgcaatggtgcgatctcggctcactgcaacctccgcctcccagtttcaagcaattctcctgcctgagcctcctgagtagctgggattacaggcgtgcgccaccacgcctggctaatttgtatctttagtatctttagtagagatgggttttcaccatgttggccaggctggtcttaaactcctaacctcatgatccacctgcctgggcctcccaaagtgctgggattacaggcgcgcaccaccacgcctggctaattggtatctttagtatctttagtagagacgggttttcaccatgttggccaggctggtcttgaactcctaacctcatgatccacccgcctgggcctcccaaagtgctgggattacaggcgtgagccaccgcgcctggccaatttttatattttttttagtagagtcaggcttcaccatgttggccatgctggccttgaactcctgacctcgtgatctgccctcctcggcctcccaaactgctgggattacagccttgagccaccacgcctggccccaaccttctttgtcaagtgtaacagagacagagaaacacgtggagcataaagaaggaacttgcacagtgctttctaaattgggcaaacacttaaaaagcaagaattttcatacagatcta

SEQ ID NO: 15199 - DNA, 2300 bp, Homo sapien
gacattctgccattgcgccagttcaaagcaggctgggtcccttggatctgtccctatcacccaggctggagagttagttaggatcctttgacccccctccacccccacagcccctagctcccccgctgtgtgcagactgctggtaaccaggttctaaaggcgggtggcaccttgaaaccatacaaggcaatgttggataaactgagaggggtctcctaaaagcttcccttgagcctctgggtaagtggggacctgtgtaaggccagggcacaggattggggcagggggtgaacaccaggcagatggggtctctccgtctacaagaacctgccacagaggtgagaagcttcaaggacatcaggaggtcctgttccttgaggaaagccaggctggaggctcttggagccctctttacccctgaccctgggcatctgtggatgcttctgagggcttcagaggacacagggccaagggaagaggcagggaaacagtccgacaagaggctgcacagcactgattggaaactcagatggttctggggccgggcaggaaactcaagtgagtggacagcttggcaggaggcagcagggagtggtggggactggggtgacccatgagcccacattttggcagagggagcaaccgccactcagccccagctgagagttcctgttcaatgcaagctgggaagccccattttaatatgaaaccacctgatttttcaatgttagcagtgccttcaaagttgtaaaaactcccataaagcctgcactaaatgcacccaaaggccagccccaacccaggaacagaggtccgcaagccatgccctaatccatgtagaccgagaaacgtatgggttgtggagccctgccagccctggaaaggggccctgtggggagagggccctgtggacgggaggtccagaaggtgactgtcccagccaggccctgcttagcccttgacggctagacacagaggccatcctgccttctggagataactgagtcctccagagactaggaaaccctccagctggtgtggcccagcctcccagggataagccttcaggccccccaaagactagagctagcccagccaagggccttggctacaggccgggctggagggggtgtgggtgtcccaaggctctccggaagtcaggagctgagctgggcccccaaaggctctgaggcatgactgaccacaaacgcggagggggaggagggcagagtgttttcctggaatcctccaaggcaggggatttttctggactagtccggcccctggcacccgcccctcctgcccaatcaagggccactgtcaactgcagcccaggccccacccaccgacggtgaccacccctatgcctccacagctcaggcttgaagctgccagtaactgtggggccgtgggcagaccaccactgccctccctgacacagccccttcatctcataatatggtggggaagagagtccagggctgctcacaactcttaaggctgtcgtggctaagaggaccctgagctcagatttggcattggagtttatacttaggaggctcttgaaagggctttgtgtgggctgccaggagttttttgaaattgggattagctaccaacaataacacattgagagatttcacctaaaaatctggatttccagtttctcttcaaaaatccaaagctctagctggcccgggctggtcatgaggactcagcccttaccagccccactcccgccatcctgcctctccagggccgcagaggccctggggtggacttctggcatttgtcacctgcctggtgcctcataggcatctgggctgtgacgcttaggattcctaaatagtctctcgctttttacacaaaaagcagaaacctgcccagtgtcatccggcaaacccacgacgggcaaggtctccccgcgcaggtcaggtggccgcagggtgagggccagggcaacccggcccacgagcccctcggtggggaaggggcgtgtctccacgcggctccgccccggccaatggggagaggccccgcccctgccgcggcgggcccgccccccgggactcttaaggcgcgacctgcctccagcgagccgactccggagcccgagcccggggcgggtggacgcggactcgaacgcagttgcttcgggacccaggaccccctcgggcccgacccgccaggaaagactgaggccgcggcctgccccgcccggctccctgcgccgccgccgcctcccggtgagtttctgtggggctggggggctgcgggcggggaagggggcgccacggcca

SEQ ID NO: 15200 - DNA, 2300 bp, Homo sapien
ctttgggaggctgaggcaggtggatcacttgaggtcaggagtttgagaccagcctggccaacatggcaaaatcccatctctactaaaaatacaaaaattaggagtagtggcgcacacctgtaatcccagctgcttgggaggctgaagcaggagaatcgcttgaactcaggaggtggaggttgcagtgagctgagatgacaccactgcactccagcctgggcaacagagtgagactctgtctcaaaacaaacaaacaaaaagccttttcaataaaccacaagtgactttggttcacagtaaatacacttctgcccgaactaagataaaatgtaagcattgcttttcaaaccttagaaatgcaagaatcagctgggtgcgttggctcattcctataatccccacactttggcaggccaagttgggaggactgcttgagtctcgttcgagaccagcctgaccatcatggtgaaaccccgtctcttactaaaaataaaaaattagttgggcgcggtggcaggcgcctgtaatcccagctattcgggaggctgaggcaagagaattgcttgaacccgcgaggcagagggtgcagtgagctgagatcgcgccactgcactccagcctgggtgacagggactccgtgtcaaataaatgaataaatactaaagaaaaattaaaagctattattattattatttttagaggcagggtctctttctgtctcccaggctggagtgcagtggcacggtcacagataactgcagcctcgacctcttgggctcaagggatactcctgcctcagtctcccaaagttcgggattacagacctgagccaccgcgcctggccggatgcagagcgcctggccggatgcagaggcttttgagtaggcccggtggacagggatttgctttagacctgggcccctgttccccctctgcctcttaccactggtgtgacctggggaccgacagtttacactctcctttagccgggggtttcctgtctctgaaatggagctaatttctcccctctctacaggaagaggtagatagtgctggaaggcgtgctaggtacaccgcaaagactccacagcaaatcctgcacacaaaatcgcgaatgctgcagccgagaccccacgcaagcaagcaccgcaggagacgtgggctgacagctgcgccccacgtgacctcccacccgcgccagtccgtcccctcggtatcagggcgtggcctcgcggggcggccgtacctggattggccgggaggcgggaccggtggtgcgcgcgcgaaaggagaggggcttgggggcgtggcccagggggccggagacggctgcgattggcagtggggcgcgccgggggcgtgaccgcggcattgggtcccgggtggggccgaggcagcgggagtcgcggttgctcagcgtgcacctgagacccgacgcccggggtcctcgaagacgcgtccgccgccgtgcccgtcgccatgaaccgcttcagggtgtccaagttccggcacaccgaggctcggccgccccgccgcgaggtgagtccggcccgaggaccgggcgctgtcgcctcgggccccgtccggctgcccctccccctgcccggaccccacaggggtgccctccagggccgtctggaaccccgagacctccatccccggggaaccccccttcaggccagggccccggcgtccgggccgtttcgtcgccgccggagggcagagtccggcactcccgtgactcgctctggcgctcggtgaccctggcggtctgcccgcctcgcccacctcgccccgggacccccgaggcggcgcagccctcctagccggggcccaggcctgcgaggccgcctgccttcccagcttccggtcggcctcgccgggagccggggctcggggcgctgccggcgcctggctcctcctccctgccgccccgggtcgcccctgcccctggctgggctgtggggagacgcccctctctcctctggccccggcgagcccaagtgtgtcagtggtggggagggagcccctcggccgcacgcgcccctccctcgggtttccgccggtgcttcctcctctcgccgctggcgcaagctctttctttatctcggtgatgctgccacggctgggtggggcctggggaagcctgagcaggtggagccccaaagaattgctgagccaggtgccgggagacccttcggacccccgaaacggcaggaggactgatgaggggtgcgccttggaaacgatgtcagctctgctcttccgctttccgtgttatttgtaaggcctgggagtgt

SEQ ID NO: 15201 - DNA, 2300 bp, Homo sapien
gtcctgatgattttctttctttctttttttttttgagacaaaatctcgcttttgtctcccatactggagtgcaatggcatgatctcggctcattgcaacctccacctcccgggttcaagtgattctcctgccacagcctcccgagtagctgggattacaggcacctgccaccacgccttgtatttttagtagagacggggtttcaccatggtggccaggctggtcttgaactcctgacctcaggtgatccacccacctcggcctcccaaagtgctgggattataggcgtgagccaccatgcccagccacttgatgattttctttttttttctttttttttttttttttgagacagagtctcgccctgtcacccaagctggagttcaatggcacgatctcgactcactgcaacctccgcctcccgggttcaagcagttctctgcctcagcctcccaagtagctgggattacaagcacccaccaccacgcccagctaatttttatatttttaggacagacagggtttcaccatcttggccaggctggtcttgaactcctgacctggtgatccacccaccttggcctcccaaagtgctgggattacaggcgtgagctaccgcgcccggccaacctgatgattttctaaaaacctttttggactgggcgcagtggcttatgcctctaatcccagcactttgggaggctgaggcaggtggatcacttgaggtcaggagtttgagaccagcctggccaacatggcaaaatcccatctctactaaaaatacaaaaattaggagtagtggcgcacacctgtaatcccagctgcttgggaggctgaagcaggagaatcgcttgaactcaggaggtggaggttgcagtgagctgagatgacaccactgcactccagcctgggcaacagagtgagactctgtctcaaaacaaacaaacaaaaagccttttcaataaaccacaagtgactttggttcacagtaaatacacttctgcccgaactaagataaaatgtaagcattgcttttcaaaccttagaaatgcaagaatcagctgggtgcgttggctcattcctataatccccacactttggcaggccaagttgggaggactgcttgagtctcgttcgagaccagcctgaccatcatggtgaaaccccgtctcttactaaaaataaaaaattagttgggcgcggtggcaggcgcctgtaatcccagctattcgggaggctgaggcaagagaattgcttgaacccgcgaggcagagggtgcagtgagctgagatcgcgccactgcactccagcctgggtgacagggactccgtgtcaaataaatgaataaatactaaagaaaaattaaaagctattattattattatttttagaggcagggtctctttctgtctcccaggctggagtgcagtggcacggtcacagataactgcagcctcgacctcttgggctcaagggatactcctgcctcagtctcccaaagttcgggattacagacctgagccaccgcgcctggccggatgcagagcgcctggccggatgcagaggcttttgagtaggcccggtggacagggatttgctttagacctgggcccctgttccccctctgcctcttaccactggtgtgacctggggaccgacagtttacactctcctttagccgggggtttcctgtctctgaaatggagctaatttctcccctctctacaggaagaggtagatagtgctggaaggcgtgctaggtacaccgcaaagactccacagcaaatcctgcacacaaaatcgcgaatgctgcagccgagaccccacgcaagcaagcaccgcaggagacgtgggctgacagctgcgccccacgtgacctcccacccgcgccagtccgtcccctcggtatcagggcgtggcctcgcggggcggccgtacctggattggccgggaggcgggaccggtggtgcgcgcgcgaaaggagaggggcttgggggcgtggcccagggggccggagacggctgcgattggcagtggggcgcgccgggggcgtgaccgcggcattgggtcccgggtggggccgaggcagcgggagtcgcggttgctcagcgtgcacctgagacccgacgcccggggtcctcgaagacgcgtccgccgccgtgcccgtcgccatgaaccgcttcagggtgtccaagttccggcacaccgaggctcggccgccccgccgcgaggtgagtccggcccgaggaccgggcgctgtcgcctcgggccccgtccggctgcccctccccctgcccgga

SEQ ID NO: 15202 - DNA, 2300 bp, Homo sapien
actgcactccagcctgggcaacaagatcaaaactccgtctcaaacaaaaaaagagtatgggttctgtggccaggcgcggtggctcacacctgtaatcctagcattttgggaggctgaggcgggcggatcacctgaggtcaggtgttggagactagcctggccaacatggagaaacctcgtctctactgaaaatacaaaagttagccgggcgtgatggtaggcgcctataatcccagctactcgggaggctgaggcaggagaattgcttgaatcaaggagatggaggttgcagtgagccaagattgcggcactgcactccagcctgggcgacagagtgaggctctgtctcaaaaataaagagaaaaagagtatgggttctgtgctaggcatggtggctcatgcctgtcaatccctgcaccttgggaggccaaggcaggagaatcacttgggcccagaagttcaagaccagccttggcaacatagcaagacctcatctttacaaaaaaaaattttttaattggccgggcatggtggcgcatgcttgtggtcccagttatttgggaggccaaggtgggaggaccacttcagtccaggagttcaagtctacagtgagctatgatagtgccactgcattgcagcctgagcaacagagcaagacactttctcaaaaaaaaaaaaaaaaaaaaaaaaaaaaagagtatagctctggagtcagacagcctgggattgaattctagctgtgccacttaccagctgtgtgtccttgggcaacttacttcactctgttcttctgtttccttttctctagaatggggacataggccaggcacggtggctcacacctgtaatcccagcattttgagaggctgaggtgggaggattgcttgagtctgggaggctgaggctgcaatgggccatgattgtgccaccgcactccagcctgggtgacaaatggagaccatatgtcaaataaataaatgaggacttaatagtaacgacgtcggccaggcgtggtggctcacgcctgtaatctcagcactttgggaggccgaggtggggggatcacctgaggttcaagagcagcctggccaacatggtgaaaccccatctgtactaaagagtacaaaaattgccgggtgtggtggctcacgcctgtaatcctagcactttgggaggccgaggcaggtggatcacctgaggtcaggagttcaagaccagcctgggccacttggtgaaaccctgtcactacaaaaatacaaaaatgagccgggcacagcggcacgtgcctataatcccagctactttggaggctgaggcatgggaatcacttgaacccagggggtggaggctgcagtgagctgagattgcaccactgcactccagcctgggcaacagtgagactcttcctcaaaaaaaaaaaaaaaaaaaatttcaccaggcgtggtggcgcgcacctgtagtcccagttactggggagactgaggcaggagaatcacttgaacctgggaggcggaggttgcagtgagccgagatcacgccactgcattccagcctgcacaacacagcaagactctgtctcaaaataaagcaaaacaaaaaatagtaatgtcctcaaagggtcatctgagtgacataatcatgtaaaggcttcctatagtacttgatgcgtagccattgctcaatctgtgttggccccatgtgccaggctgtactaagcactgaggatactaagaactcagacagagttacttactcacggggagcccaaaacttaggagaaatgggggttggggggatgctgctggttgagaagaacaactttcaagtatagaagctgaaaacaagagccaaaaggacttccatttactacctcagagtgagttaggaactagaggagagctcagtaatatgaaaactgtcaccgttgtaacttccccccctttttttctttgtattttcgtttatcccccatctagttccccatagtgatgaacagtaaaaatcctccacgttgaaatggtgtgtgtgttcttgttttcagggatagcaggaaggctgattgttggggagccagtattttctattatgaagcagagaactcttaaggagtggagtggatgatggtaattaccaaaagagaggacaaagtccttgggatctgccacacagaagaaagaaaaacatgggaaagactcccagctgagagcagcctgggcctatgcctggtctctttttggttagactttattattatttatttttgagacagtgttttgctcttgttgtccaggctggagtgc

SEQ ID NO: 15203 - DNA, 2300 bp, Homo sapien
gcggggagggggagtagcacagattcccaggctttggggatgggggtgaagatttatgagcacagtttgttttaaatccaaacaagaatcctcaggttttttccccattgcttgaggtggttatgatggtgggagtgtgaaaattgaaagtcctttgcaagactaaccaggtcaggtctcccttcctagcctcatctcatcacatactttttttttttgagacagagtttcgctctttttgcccaggctggagtgcaatggcgtgatctcggctcactgcaacctccaccttccgggttcaagccattctcctgcctcagcctccggagtagctgggattacaggcatgcgccaccacgcccggctaattttgtatttttagtagagacggggtttctccatgttggtcaggctggtctcgaactccggacctcaggtgatccgcccgcctcggcctcccaaagtgctgggattacaggcgtgagccactgcgcccggccaccacttcttttctttttttttttttttttgagatggagtttctcttgcccaggctggagtgcagtggcgcgatcttggctcactgcaacctccgcctcctgggttcaagcgagtctcctgcctcagcctcccgaggagctgggattacaggtgcgtgctaccatgactggctaatttttgtatttttcgtagagacggggtttcaccatgttggccaggctggtctggcactcctgacctcgtgatccgccggcacctcggcctcccaaaatgctggaattacaggcgtgagtcaccgcgaccggcctcatcacatactcttaaatttagggtttaagcaaagaaggcaaacactttcatatcttagacatttgtttcttaagttcaggctacttggaatactccatccctacctgacacacttttcatcgatgttcagtttgaatcttacctcttagaagccctgacatcccaaacttcctctctcccattttagaaatggaatgactccttcaccttgtatgactgtaacagtgcttattcctgtgatagcatttaacattgttagttgctaaggagcctctctcgagtcattgtttgctcctcccgaacagggatggtgtatcaggcatcactgtatccccgatattctagaacatgcatgacacacagtaggcgctcacaagttttactaatttagtttttgggcagcacggctcccattcggaaccagcaagttcactgcaggtttggagaaggctaacacgcttaaggagagagctgaggtcggcgcggtggctctcgcctgtaatcccagcactctgggaggccgagacgggtggatcacgaggtcaggagttcaagacccagcctggccaagatggtgaaaccccgtctctactaaaaatacaaaaaaattagccgggcgcggtggcgcgcgcctgtaatccctgctactcgggagactgaggcagagaattgcttgaacccgggaggaggaggttgcagtgagttgagatcgcgccactgcactccagcctggcgacagagcgagactctctgtcaaaaaaaaaaaaaagaaaaaaaggagaactgagtcttgttagaggaggcgggtggggaatcagcctaagagacagtgagactgcggccaggattctgagggtggcgacgaagatttactagaagcgcgcggagacggcatgagtaaaactcacgcaattcgtcgtaagtctcagggtcagcaggaggaaaccacgcactacatgctgggagcggcgcgacggaggaccgcgttgtatgctgggacttgtagtctcgcccttagccagacccctcggaccacttaagttcggctacattcaaccacgtccttacaccgataacgtacacccattggttgtctagcacagaatagcgaggttctgcacggcgagtctacctaacaacactcttcagagcaaaccccgtttcggcgatggctacccggaaggcgcgttggctgcggctacgcgtacggtgcgcctgcgcgtgcgcgacgcatgcgcctctacgcgcgcccgccgttcccgcgaggcccacctagagccgggcggcgcaggcgcagagtccccgggccaagatggctgcgcggtgctccacacgctggttgctggtggttgtggggaccccgcggctgccggctatatcgggtagaggggcccggccgcccagggagggcgtggtgggggcatggctgagccgcaagctgagcgtccccgcctttgcgtcttccctgacctcttgcggcccccgagcgc

SEQ ID NO: 15204 - DNA, 2300 bp, Homo sapien
tacaggtgtgagccaccatactcagcctagggcagtgtctttttaattaaagaaaaaaaaagtaagacaaacacataaaaaaaagatacaaagtgagggccaggcacggtggctcacgcttgtaatcccagcactttgggaggctgaggcagacggatcacgaggtcaagagatcgagaccatcctggcaaacgtggtgaaaccctgtctctactaaaaatacaaaaaaattagctgggcgtggtggtgcatgtctttagtcccaactactcgggaggctgaggcaggagaatcacttgaacccgagaggcagaggttgcagtgagccgagatcgcgccactgcactccagcctggcgacagagcaagactcccgtctcaaaaaaaaaaaaaaagatacaaagtgaatactacatttttccttgtccctccctaatccccctttttgaggtagttagtccttattaacagttttgtgggccaggcccagtggctcatgcctgtaatcccagtattttgggaggtcgaagtgggaggatcgcttgaggccaggagtttgaaagcagcctgggcaacatagcaagaccctgtctctacaaaaacttaaaacaatttgccaggactggtggtgtgcacctgtagacccagctactgtggaggctgaggcaggaggattgcttcaacctgggaggttgaggctgcagtgagctaggattgcaccactgctattgtcgttgctgttacttctgttactccggttgttctggcttgcagaaaacctttcgatgaaggtaagggtaggaagcataaattctctacgaggtaatgtcccctgaggagagaggtgaagtgtgaatctgtgaagaatccagggtgcctgtgaggtcaagcgaggatcaacacaaacattttcccagcatgcgcgacggcgggagagttcgtgagacttttggaagcacttcacgccctacacttagcattcagtttggtcatctcatccctcttctaggtgctagtcacaggcccaccccaacctcataggatgtgtttgcacacagggccacttaataaatgttatggctgccttatttgctgtgaactcttgtctgtattcctgggccttggtagacctgggatgcccagtggctctgcctttcactgtaggttttgagtgatgaggtgaagaggaagcagtacgatgcctacggctctgcaggcttcgatcctggggccagcggctcccagcatagctactggaagggaggccccactgtggaccccgaggagctgttcaggaagatctttggcgagttctcatcctcttcatttggagatttccagaccgtgtttgatcagcctcaggaagtaagttcctcacttggaagaattattcaaattttagactaagtatgggtcaaacaaatttttttatcagtttctgtttctcagaaaggcaaggcagcttaaatggagtgatctggaggcagccattttagtagaaaataatttcagtatttgaaaaatcgcataggtagtaatgagtatgtccattctgatggtattcttaacagttgcataatgaggtagcacctaaggctttcagagcccatgagggtgtgagtgttgtctctcatctgctacagtattccaggagagttctgtccggtgggaaggcactgctgatcctctctcatttatgtccttataagacactgtcagagtggaagagagaggggatatatttatgatctaaattatgattgtggatcattcaggctgtttttaagtgccatgtacgagtatttatctgtgaacattttcagtctgttgaaagtacgttttcatttaagtcatacattatctcttaaaaatcccaaagagtagggcagaattcgttcagtgagtcctacctatgcttacttggcagagtgcaagtaagtacagtggtgaaagagtgactgaaaatgtgggccagtaccctcctttccctttagagccgagcgtcagttttggtcgttgcaaacaaaagttgacaggctgtcccttggtttctttagtacttcatggagttgacattcaatcaagctgcaaagggggtcaacaaggagttcaccgtgaacatcatggacacgtgtgagcgctgcaacggcaaggggaacgagcccggcaccaaggtgcagcattgccactactgtggcggctccggcatggtaaggctctgcccgagactccacctcccacggcttgcaccactgactgagaagagctggttgtggcactgctcccagagaacgtatgctg

SEQ ID NO: 15205 - DNA, 2300 bp, Homo sapien
cacctccaggccacatcattctctgtattcgcctcagaaccttctccagcttctttgtggggaaccttggggtaacctccatgaaggaggtgggcattttgggccaaggctttctcctccatctgggggctattccctggcttctccagggtcctgtggttccaagggccagggagcgacctcagccacgcaccctgtattggcttttcctgctttgctccctcactcctgcttcctgggctcacttgcccaaactcttgccccctcatcctagtcacaggctctgctctgggcagacccaacttagctcatttccatgtgcttgtgggcgggcttggcccagaaacccaagtggtggttctttttttttttttgagatggagtctcgctttgtcgtcaggtgcacgccaccacacctggctaattttttgtattttagtagagacagggtttcaccgtatttcccaggctggtcttcaactcctgatctcaggcagttcacccgcctcggcctcccaaagtgctgggattaaaaggcgtgagccactgcgcccagcccagtggcagttcttttttttttttttttttttttttgagacagagtcttgctctgtcgccaggctggagtgcagtagcgcgatcttggctcgtggcaatctccgcctcccaggttcaagcgattcccacctcagcctcctgagtacctgggcctacaagcacgcgccaccatgcctggctaattttttgtattttagtagcgatggggtttcaccatgttggccaggaaggtctcaatcacctgacctcgtgatctgcctgcctcagccccccaaagtgctgggattacaggcatgagccactgcgcccggcctttttttttacccaccccctccaccaccgctctgccgagacagagtcttgctctgtcagccagagctggagtgcaatggcacaatcttggctcactgcaacctccgcctcccgggttcaagcaattctcctacctcagcctcctgagtagctgagattacaggtgcacgttaccatgccctgctgatttttgtatttttagtagagacggggtttcatcatgttggccaggcaggtcttgaactcctgacctcgtgatcagcctgcctcgacctcccaaagtgatgggagcgtgagccagtggtagttcttttcaaggaattcctatcaagattgtcttcatgtagtgaaaactttttatttgagcaactggggaccaggggaaaccacagattttctttctttatagatcccccctgggactcagacagaccagaagattcggatgggtgggaaaggcatcccccggattaacagctacggctacggagaccactacatccacatcaagatacgagttccaaagtaagtgccccctaggctgtggccaagcccgcctggtcctgcggtggcactgcccttggagctctgtggcttgggcaggttactgctccctgtaagtcaggtggttcctgcccgagttatctgtctgtaaagtggacatagtagaatggtcaacttctttttttttgagatggagtctcgctgtgtcccccaggctggagtgcagtggcgccatctcggctcactgcaacctccgcttcccaggttcaagcgattctcctgcctcagcctcccgagtagctgggattacaggtgcctgccaccatgcccggctaattttttgtatttttagtagagatggggtttcaccgtgttagccagagtggcctcaatctcctgacctagtgatccacccaccttggcctcccaaagtgttgggattacaggcgtgagccaccatgcccggccagaatggtcgacttcttggagttgttgggagaattaaatgaacaacacataggaattgctttgctgctgctgctattgttgattttcttcttttttttttgagaaggaatctgtcactgtgttgcccaggctggaatgtggtggtgccatttcagctcactgcaacctcctcctccccagttcaaatgattctcctgcctcagcctcccgagtagctgggactacaggcgcttaccaccacgcccagctaatttttgtatttttagtagagacggagtttcactggccaggctaatctcgaactcctgacctcaggtgatctgcccaccttgacttcccaaagtggtgggattacaggtgtgagccagcacgcctggcccgttgcttttcttgttgatgttactagcactgttaggagctggagaggtggcctgggcagagtgctgtgggtacctagg

SEQ ID NO: 15206 - DNA, 2300 bp, Homo sapien
gcccggagcggcaagacgcctgtcccgagatatcggggtcccgcgacccacctcgtgtcccttgggcccgatcccctcctccttcccgcctcccccggttccagtcacccgccccccggcccgggtcccaccggctggagtgacctcctcgccgcggcctgggcgggacaagttccaggagcccgggaccccgattctgcggccgagtccactgcagaggcggggatggagctgcgcgctaggcgccaactccctccccgcagctccggccccacctggcagagcgccgctcacggaagcccagcgtcggaggacccctggctgcagccgccaatcccgacgtgtcggccgaaacccctcctccggcgcagttggctcctcctggatcccgcgggactcggcgtcgtttccgggtttgcccgccccaggcacgtgcacagtgagtttgtgtaaatccagttagaccaaaatgagcgaggtggagagcctcttaaccggatgctacgggtgatgactgggaggaggagaaaaattacctctttatcttgcatgaacatcttaattttcaggtattgggcgtcaggcaaagataattaaagctatgtccatgagtcttatcccttgaggccttgtccgcttgatattttctttgcctaactcacttttaaaattttattatttttatttttttgagacagtgtcttggtccgtcgcccaggctggtgtgcagtggcgcgatctcggcttactgcaacctccgccccccgggttcaagagattctcctgcctcagcctcccgagtagctgggattacaagcatgtgccaccaagcccggctaatttttgtattttttagtagagacggggtttcaccaggttgaccaggcaggtctcgaactcctgacttaaagtgatccacccacctcagcctcccaaagtgctgggagtacaggtgggagccaccgtgcccagccctaactcacttctgaagttgctgctacttgcactgatttcagtttttttttgtttttgttttttgttttcaaggtggagtcttgctctgtggcccaggctggagtgcagtggtggtgcgatcttggctcactgcaacttccgcctcttgggttcaagtgattctcctgcctcagtttcctgagtagctgggattacaggcaggagccaccatgcccggctaaaatttttttgtatttttggtagagacggggtttcaacatgctggccaggctggtctcgaactgctgacctcaagtgatcttcccgcctcaggctcccaaagtgctgggattacagacatgagccaccacacccggcccacgatttcagtaatttctttgtgttcagtaaaactaaaaaatgactctgggctgggtgcggtggcctgtaattgcagtgatttgggaggccgaggcgggtggatcacctgagctcaggagttcgagaccagcctggccaacatggtgaaacccccgtctctactaaaaatacaaaaattagccgggcgtggtggcaggcgcttgtaatcccagctattcgggaggttaaggcaggagaatcgcttgaacccgggagaagggggttgcagtgagccgagatcacgtcattgcactccagcctgggcgacgagcaaaactcggtctcaaaaaaagaaaaatcattctgtcattctggccgctgtttgaagaatgcgaataatgcaacagggagatcagatacaagactggtaaccgaggtgtcagagttgagactcagtttcgcagattgcattggcaagtgaccaagtgggtggtgccacggttgacaaccctatttcttacatcactgagtggatgtacaaggattaaaccacactggggaagaaaagtgctcaaccctgaggcaccctcacacacctcggctcttgtgaacactagtgttcctgccgaagcacgcctacttaccccgctgagcagagcctgagcctgcaacctccagagacctggggaaagccacatactccgcttcccgcccccggcaagggcgtgtcagctacaaggggcgtgtcatctctaggccccgccccgcgctgcgtgcccacgttgcgccggcctcgcgccagtccgctgggctgcagggactgcggcgcctgagggagtcgctgacgggcacgctgactggaggctggcggacaggcgacagcgacctgcggcaggtgagctgtccgcgccctcccggggccttccttccgcccggcttctcggaccgcgctgcgtccttcgcgggccctgcctcggtccaggcct

SEQ ID NO: 15207 - DNA, 2300 bp, Homo sapien
tcaaggggcacttcctatagagataagggcattagaggaagggcagagccccggtcaatgccaacagcccgggaaacagccaagccgggctccaatctctgccggcatcccctgtctgcaccgccgacgcccccagctacgaccccgggggtcacctcgcccagcatagccgtgacgctgggagagggtgggcccaacggggacgccaaagagagccattcaggcctccccgcgcccccggggagacgacttctggagagcggcgtccgcggtttcgccctcccctgacagcccctccacgcccttcttcgtccttctgcccggcctcacccagcttccggccgcccccggccgggtctcccctcagaccggcgcaggggacccaaagggctgtggcccggccaagcccaggtccgaaggcctggaccgaggcagggcccgcgaaggacgcagcgcggtccgagaagccgggcggaaggaaggccccgggagggcgcggacagctcacctgccgcaggtcgctgtcgcctgtccgccagcctccagtcagcgtgcccgtcagcgactccctcaggcgccgcagtccctgcagcccagcggactggcgcgaggccggcgcaacgtgggcacgcagcgcggggcggggcctagagatgacacgccccttgtagctgacacgcccttgccgggggcgggaagcggagtatgtggctttccccaggtctctggaggttgcaggctcaggctctgctcagcggggtaagtaggcgtgcttcggcaggaacactagtgttcacaagagccgaggtgtgtgagggtgcctcagggttgagcacttttcttccccagtgtggtttaatccttgtacatccactcagtgatgtaagaaatagggttgtcaaccgtggcaccacccacttggtcacttgccaatgcaatctgcgaaactgagtctcaactctgacacctcggttaccagtcttgtatctgatctccctgttgcattattcgcattcttcaaacagcggccagaatgacagaatgatttttctttttttgagaccgagttttgctcgtcgcccaggctggagtgcaatgacgtgatctcggctcactgcaacccccttctcccgggttcaagcgattctcctgccttaacctcccgaatagctgggattacaagcgcctgccaccacgcccggctaatttttgtatttttagtagagacgggggtttcaccatgttggccaggctggtctcgaactcctgagctcaggtgatccacccgcctcggcctcccaaatcactgcaattacaggccaccgcacccagcccagagtcattttttagttttactgaacacaaagaaattactgaaatcgtgggccgggtgtggtggctcatgtctgtaatcccagcactttgggagcctgaggcgggaagatcacttgaggtcagcagttcgagaccagcctggccagcatgttgaaaccccgtctctaccaaaaatacaaaaaaattttagccgggcatggtggctcctgcctgtaatcccagctactcaggaaactgaggcaggagaatcacttgaacccaagaggcggaagttgcagtgagccaagatcgcaccaccactgcactccagcctgggccacagagcaagactccaccttgaaaacaaaaaacaaaaacaaaaaaaaactgaaatcagtgcaagtagcagcaacttcagaagtgagttagggctgggcacggtggctcccacctgtactcccagcactttgggaggctgaggtgggtggatcactttaagtcaggagttcgagacctgcctggtcaacctggtgaaaccccgtctctactaaaaaatacaaaaattagccgggcttggtggcacatgcttgtaatcccagctactcgggaggctgaggcaggagaatctcttgaacccggggggcggaggttgcagtaagccgagatcgcgccactgcacaccagcctgggcgacggaccaagacactgtctcaaaaaaataaaaataataaaattttaaaagtgagttaggcaaagaaaatatcaagcggacaaggcctcaagggataagactcatggacatagctttaattatctttgcctgacgcccaatacctgaaaattaagatgttcatgcaagataaagaggtaatttttctcctcctcccagtcatcacccgtagcatccggttaagaggctctccacctcgctcattttggtctaactggatttacacaaactcactgtgcacgtgcctggggcgggc

SEQ ID NO: 15208 - DNA, 2300 bp, Homo sapien
atcctgatgtagagcccaactgtcctgtgaagagagtcagctgttaaaaggaaaccaaaaaatcaaggtagctctagctgtccaattttacaagttttcaacagacttgatgaggggtgagctaaaggcggtcaatgctttattgtctgtaactcactggcactggcatttctagagttgctcacgttcccccttttggtgactcacagcacttcaacatgttgccacagccaaggaaaaaaggaaatcaagtcagacaatggaggaatcacaggatttccctcttcacatccccaggtagatgaggtcattcaatgagtgtgtttccaaggctccacaaattcccacaccctcaccagtgtttaaacctgaatgttttatctgataactttttctaatttcaccaagtaagcttatatatgtcttaactgtgaactcctgataagcacaaattttgtcttgtgataatttatttttttcttttttgagacagggtctcactctgtcacccaggctggagtgcagtgatgcgatctcagctcactgcaatctccacttcgtgggctcaagtgatcctccaacctcaaactccccagtagctgggattacagacacgcgccaccccgcccgtttaacttttttgtatttttagtagagacggggtttcaccatgttggccaggctgatctcgaactcctgacctcaggtgatccgcctgcctcggcctcccaaagtgctgggattacaggagtgagccactgcaccggccagcgtttctttcttcaatcacactccaccttgtctggtttgtagcgccatcaacaaaacacagtacgtaaggatggacagccacaggccacgacaaccggctcatcagaagcgattttttttttttttttttttttttttagatggagtcttgctctgtcgcccaggctggagtgcaatggcgtgatctcggctcactgcaacctctgcctcccgggttcaagcgattctcctgcctcagcctcctaagtagctggagctacaggctcacgttaccatgcccggctgatttttgtatttttagtagagacggggtttcactatgttggccaggctggtctcggactcctgacctcaagcaatccgcccgccctggcctcccaaagtgctggaattacaggcgtgagccaccgacccggcccagacgcgatttaaatggcatgacacaggcaggcctcgtgcaaagactgcaaggaggtcccggcagcttttgcagggcaattaatccacccagagcactgcgctcagaaagtaataggtaaacccgcgtccggactaaccggctgcccccacacttgatccctcccagtccgactctgctccagggcgtaccagggttcactcgtgaagtcacgacacccactcaaggggcacttcctatagagataagggcattagaggaagggcagagccccggtcaatgccaacagcccgggaaacagccaagccgggctccaatctctgccggcatcccctgtctgcaccgccgacgcccccagctacgaccccgggggtcacctcgcccagcatagccgtgacgctgggagagggtgggcccaacggggacgccaaagagagccattcaggcctccccgcgcccccggggagacgacttctggagagcggcgtccgcggtttcgccctcccctgacagcccctccacgcccttcttcgtccttctgcccggcctcacccagcttccggccgcccccggccgggtctcccctcagaccggcgcaggggacccaaagggctgtggcccggccaagcccaggtccgaaggcctggaccgaggcagggcccgcgaaggacgcagcgcggtccgagaagccgggcggaaggaaggccccgggagggcgcggacagctcacctgccgcaggtcgctgtcgcctgtccgccagcctccagtcagcgtgcccgtcagcgactccctcaggcgccgcagtccctgcagcccagcggactggcgcgaggccggcgcaacgtgggcacgcagcgcggggcggggcctagagatgacacgccccttgtagctgacacgcccttgccgggggcgggaagcggagtatgtggctttccccaggtctctggaggttgcaggctcaggctctgctcagcggggtaagtaggcgtgcttcggcaggaacactagtgttcacaagagccgaggtgtgtgagggtgcctcagggttgagcacttttcttccccagtgtggtttaatccttgtacatccactcagtgatgtaagaa

SEQ ID NO: 15209 - DNA, 2300 bp, Homo sapien
aacacattagtattgtgctgtgcagaaaggacttctgtgcatatgcctgctattacacttgttgaacccaatttctacaaactttcattcagatggagggattcagtcttcttatcatataatacatacagaaatacaaatatttaaatatttatctaaattaatagtcacatatgccatttatacagttagtgagttacagccaagtgacagttgtgatgggaggctgtgtctggggagttacatactggtgaggaaactagaaaacatggctgtcgggccggcactgtggctcacgcctgtaatcccagcactttgggaggccgaggcgggtggatcacgaggtcaggagatcgagaccatcctggctaacacggtgaaaccccgtatctactaaaaatacaaaaaattagcggggcgtggtggtgggcgcctgtagtctcagctactcaggaggctgaggcaggagaatggcatgaacccgggaggtggagcttgcagtgagccgagatagcaccactgcactccagtctgggcgacagagtgagactctgccacaaaaaaaaaaaaaaagaaaacaaggctatgaaaatttaacacattgactgggcagggtaatgcatggtgatctgttttctcttcgctccaatcctgaaaggtttctttgaagagctggagtgtctagaaagctttcctagaaagctagtgtacattttgctaagtaatcactgtgtcacttagattttctgctctttaagtgtggttatgagatgtgttccaaacaatttgttactaaccatgaagttgatgaatgctttgcctttaaaaaaataagtttgggtggggtgcagtggctcatgcttgtattcccagcattttgggaggctgaggcaggcagatcgcttgagtccaggagtttgagaccagcctggacaacatggtgaaaccctgtctttactaaaaatacaaaaattagccaggtgtggtggcgtgtgcctgtagtcccagctgctttgggggctgaagcaggaggatcacttgagcctgggaaatccaggctgcagtgagctatgatcacaccactgcactccagcctgcgtgaaaaagtgagactgtctaaaaaaaaaaagtttggccaggcatggtggttcatacctgtaatcacagcactttgggaggccaaagtgggaggattgttgaggctaggaggtcaagaccagtctcggtttgattgggttaaacattatccctgtaagttggctctcattctgagaagttgtttagagtagaagagagggctgcatttacagctaattgctagtaatttcacatcatctgcaatatattttctggacactctgcccgactagtcctatgggacgttgtcattcatgtgcaaatcaggccctatatactaagggaggaaaacagttgaggacctcctttttttaggcactcttggtgccttgtgcattaagatagtgagtcagaggataagaaggaagcagattccattccccttaccactctttgggtgtaggcagggcctgctggtagtgctgggaaagccgaccatccttctttgagcaagtccaatagctgctgctgctagttctgtcccaccataggcacagtctatgtaggatgagccaaccatatgtggagttactggttcttggtctgggcttgttcctttccccaatttcagtccccaccagaatctgggcagtcattgtgaagaagcctaggaataataccttactctataggcctgtggaaacgtgtaaagataccttgcaggcccagagtgagaaattggagccaccttgttcgattgaccaaaggcttgtcctatggagttactaattttacaggaagtttatgttaacatactttctatccattgcactaccatttctgaggcacaatatatttcagtaggcagaaagatagaactgcttagattttaaatactcaatacatgcttgacacagtttagtctatttctcttcagttactatggcagtgggtgctatagagatgtgcagaccctattgtgacctccctttggtatagggatgctctggagcccctggcttcattgtccactaaggtctggcaggtctgattgcctcttttcaggcactgagtggtggggtatgccatcctcccctgctggaaccagccttggcctgccctgttagtcatcaaaaatagatctcaccagggaacaatcttctcaggttgttgtgtaatttgagtgagccaaggtgagtgttttagggacaagcagcatcaac

SEQ ID NO: 15210 - DNA, 2300 bp, Homo sapien
atatgtgtgacacagcattaaaaggatttaccagcctggtcaatgtggtgaaatcccttctctactaaaaaaatacaaaaatcagccagtcgtggtgccgtgtgcctgtagtctcagctacttgggaggctgaggcaggagaatcgctgggacccgggaggcagacgttgcagtgagccaggatcgcgccactgcactccagcctgggcaacagagcaagactctgtctcacaaaaaaaaaaaaaaaaaaaaaaaaaggatttaaaactgtcaggacagcaactatatttttatatggtatgggctgggcgcagttgctcctgcctgtaatcccaacactttaggaggccgaggcaggaggattgtttgaggccaggagttcgagaccagcctgggcaacatagtgagacccccgtctctacaaaacaaaaccaaaaggtacaggtgcctgtgcatacagaccagcagggacatgtggagatgggctgcagtaggactaattttcttttccctcattttttttaaaaataagttttattgacataatttacgtaccattcaattcacccatttaaagtgtacaattcagtggtttttagttattcacagaatcgttcaactgttgctacaatcggtttcagagcatcttcgttaccccagaaggagattccatgttccccatttcccctctcccccagacctaaacagctactaatgtactttccgtttctatgggtttgcctattggggacatttcatataagtgaaatcatacagtatgtggccttttgtgtctggcttctctcaccaagcatgttttcagagttcatgctgtagggtgtcagtgcttccttcctttttatagccgaatcgtcttccattgtctgggcagcctacggttttgtttatccactttgttgatggacatttgggttgtttccactttttggctattatgattcatgctgctgtgaacatttgtgtacaaatttctgtgtagacaggttttcatttcttttgggcagataactaggggtggaattgctgggtcatctggtaactctaggtttaaccttttgaggaactgccagactgttcctcaaaaggggaacaggggctggcagttcttcaaaaggtttgcaggggctgtcccctaccagcagtgtatgagggttccagtttttctacataatgcctattactgtctttttaaattttagccatcctagtagataggaaatggtctccttgtggttttggttttcatttcccttatgaaaagacgctcagtagtttttcatgtgcttttggccatttgtcttttgagaagtctttgttcaaatccttttaaaaattgggttgtctttctgttattgagttgagttctttgtatttcttaatacaagtcctttatcagatctatgaattataaaatgtgatggtatcctttgaagcacaagagtttttcattctgatgacatccactttaagttttctttcttttgttgctttgcttttggtgtcatatctaagaaaccactgcctaatcgaaggtcataaagattgatgcctgcattttcttctaacagctttttgatctctttcagttttcaaacttccatggtactttatagttgaacccaagagcttggacttggttcctctggccctgcccctgatttgttaaactttatattcaaacttatgtgccctccatcccctgcaggtgctgggctgtctgggaaacactcctttccctgtattttttgttccactgaaactgatttttgtctcattttattacttttagctaaggtaactgaaccccacttcccaagtcctttatgatgctaagtaagagcaaaagcttcccacctttctgagctgtgctcagagagtttggtgacagaaatgagggaaaagatttcacttgactcttcttccccctgacccccacctcaacaaacaaaccagaagggcacaggccagagcacagcttgcctggcagtccagtcctcatgcatgggagctcaggcctggtgggaggggaggcagagggcccagccgtggcccttgggtgccagcagtcctgggggagggaggaagcagacctgcgacgggaccgaggaatggaggggtggtcgggtgtgtggatggcagagtgacagctagggagaagccggatgtggaaggggaggaactgtgtggtatgcccaggcccctgggcccagccctggcttggcagcccttgctccctgctgagggccctgcctttccttcccctgaaacagctcccggag

SEQ ID NO: 15211 - DNA, 2300 bp, Homo sapien
agtagagacggggtttcactgtgttggccaggctggtctcaaactcctgacctcaagtgatctgcctgcctcggcctcccaaagtgctggggttacaggcatgagccaccacgcctggccagagttcttaaaatgacctacaaatctcaacatgacttggatccagcctgccccactgacatcctcacctttctgactctctcacccaaggcaatccctccctctggaatgcccttccagaatagaatgtcttttcaatttcatgcccctgcctcagcatcgcctcctctgagaggccttttctaaccaacctgtctagtggcaccaccccgtaactctgttagggcgtcccttcctctccttcacagtcctgggcattttgtggtttccttgtatactgtctgtaacaaaggaagtacctgagcaagtagccacccagtgggttcttcttcctggctgcccagatagagccaatgtatcaagacaggggaactgcaatagagaaagagtttaatccacacagagctggctgaatgggagaccaaagtttcattactcaaatcagtctccctggaaattcagagcctagagtttttaaagggtaatttggtagataagctgccaaggagtagggagtgctgattggtggggtgggagatgaaatcacagggtgttgaaggatgcaagaactggttgagtcagattacagctctaggtggccttggctggtgcatcagactgcagggtcagaaaaacacctaagagtaccaatcttaggttttacaatagtgatattatacctaggatcaactggggaggtttagaatcttgtggcctctgggtgcatgactcctaaaccgtaatttctttctttctttctttttttgagatggagtctcagtctcttgctcaggctggagtgcagaggcataatctcagctcactgcaacctccatctctcgggttcaagcaatttttgggcttcagcctccctagtagttgggattacaggtgcgtgccaccatacccggctaatttttgtatttttaaatagagacatggtttcaccatgttggccaggctggtctcaaactcctgacctcaagtgatccacctgcgtcagccttccaaagtgctgggattacaggcgttagccactgagctgggccctaaactataatgtctaatcttgtagctaacgtgttactcttacaaaggaagcctggttctcaggcaacaagggggtttgttttgggaaagggctgttaactatctttgtttcaatattaaactataaactaagttgctcccaaagttagttctgcctatgcctaggaatgaacaaggacaacctggaggttagaagcaagatggagtgggttaggtcagctctctttcactgtcataattttctgttgtaatttttgcaaaggcagtttcaagcgcagggacagtgaccgtgtggttcaaggttttatgtaatgcacctcccaaactcaataaatattagtcgcataaaagaaaaaatgcagccctggaggaagatgccctgccctgttgctggcatgagtgaagaggaggcgctcacagggacggttctttccctattctccagcctcgtgtacattgggcaaacaggccccgaccatcccacgtgctcagccccagctctaggccaaatcgcctccgctcccactgacgtcatcacggcgcatcacgtgcctcccgagaccccaccccccaccgtgacgtcccgggcctcggccctggtccaaagtctacccgcctccttgtgacagaagtgcgactgccagctgccgaggcgttcggtcctgctgttgcggccgctgccccagggctgcggggacggtgagtcgactggacgcattcggagacggcttcgcgcgggagccctcctccccgggggaagggtctgggcgccagctctcctcaggtcggggcgtgacctcggaccgtggcgccccctccccgcccccgcccgcggcgcctgggcggtgcatgccgggcaccgtagtccccagcctctcagagcgggttgtggtggggggggtgaccgggcggactacaagtcctagaagcctctgggcggtggggtgggcggtgggttggggggtttcgttgtgcgcgcaaagccgcgcggggctgagggtcttgttctgccggcgcctgtccggacccgggcccctctccgctttcggccggcctcgggcaccgggcttctggaggtaaagcggggccggcggttggggcgcggcatggcggggcccgtcctcccctca

SEQ ID NO: 15212 - DNA, 2300 bp, Homo sapien
tacttgggaggctgaggcaggaggactgcttgagcctaggagttgtcacagtgagctatgatcatgccactgtactccagcctgggtgcctgatcaagatcctatctcaaaaaaaaaagaaagaagaatccagagttttattttattttgagagagttttgctctgtctcccaggctggagagcagtggtgtgatcttggctcactgcaacctctgcctcctaggttcaagcaattctcctgcctcagcctcccgaatagctgggattacaggcgtgtatgccgggctaatttttgtatttttagtagagacggggtttcactgtgttggccaggctggtctcaaactcctgacctcaagtgatctgcctgcctcggcctcccaaagtgctggggttacaggcatgagccaccacgcctggccagagttcttaaaatgacctacaaatctcaacatgacttggatccagcctgccccactgacatcctcacctttctgactctctcacccaaggcaatccctccctctggaatgcccttccagaatagaatgtcttttcaatttcatgcccctgcctcagcatcgcctcctctgagaggccttttctaaccaacctgtctagtggcaccaccccgtaactctgttagggcgtcccttcctctccttcacagtcctgggcattttgtggtttccttgtatactgtctgtaacaaaggaagtacctgagcaagtagccacccagtgggttcttcttcctggctgcccagatagagccaatgtatcaagacaggggaactgcaatagagaaagagtttaatccacacagagctggctgaatgggagaccaaagtttcattactcaaatcagtctccctggaaattcagagcctagagtttttaaagggtaatttggtagataagctgccaaggagtagggagtgctgattggtggggtgggagatgaaatcacagggtgttgaaggatgcaagaactggttgagtcagattacagctctaggtggccttggctggtgcatcagactgcagggtcagaaaaacacctaagagtaccaatcttaggttttacaatagtgatattatacctaggatcaactggggaggtttagaatcttgtggcctctgggtgcatgactcctaaaccgtaatttctttctttctttctttttttgagatggagtctcagtctcttgctcaggctggagtgcagaggcataatctcagctcactgcaacctccatctctcgggttcaagcaatttttgggcttcagcctccctagtagttgggattacaggtgcgtgccaccatacccggctaatttttgtatttttaaatagagacatggtttcaccatgttggccaggctggtctcaaactcctgacctcaagtgatccacctgcgtcagccttccaaagtgctgggattacaggcgttagccactgagctgggccctaaactataatgtctaatcttgtagctaacgtgttactcttacaaaggaagcctggttctcaggcaacaagggggtttgttttgggaaagggctgttaactatctttgtttcaatattaaactataaactaagttgctcccaaagttagttctgcctatgcctaggaatgaacaaggacaacctggaggttagaagcaagatggagtgggttaggtcagctctctttcactgtcataattttctgttgtaatttttgcaaaggcagtttcaagcgcagggacagtgaccgtgtggttcaaggttttatgtaatgcacctcccaaactcaataaatattagtcgcataaaagaaaaaatgcagccctggaggaagatgccctgccctgttgctggcatgagtgaagaggaggcgctcacagggacggttctttccctattctccagcctcgtgtacattgggcaaacaggccccgaccatcccacgtgctcagccccagctctaggccaaatcgcctccgctcccactgacgtcatcacggcgcatcacgtgcctcccgagaccccaccccccaccgtgacgtcccgggcctcggccctggtccaaagtctacccgcctccttgtgacagaagtgcgactgccagctgccgaggcgttcggtcctgctgttgcggccgctgccccagggctgcggggacggtgagtcgactggacgcattcggagacggcttcgcgcgggagccctcctccccgggggaagggtctgggcgccagctctcctcaggtcggggcgtgacctcggaccgtggcgccccctccccgccccc

SEQ ID NO: 15213 - DNA, 2300 bp, Homo sapien
ctaggtgctctcctggggctggcaggggcatctgtccctttaccggtgcaatggggagggtgcacacggttcaccagctttcgggctagctgggtaggaggtgatgctgccccggtctggcacccactcccccgggcctctcctaacccataggacagtagtgctcctggcttgtgctgcccagaggctacctggctttccctaattcaccgaccccaggattaaccccatggtggttggtatcaggggatgaggccagagccctttgagctgtgcccctcacaggggtagggtcatggcctcagccatcccggtaccatctgtgcccagccggggactgggaacctggtttctccatgaggagccatcccagggcctgcaggagggactagaagccagaggactctgaggctccgcttcctggggactgcagggggatcagaatgtcccaagcttgggacagtctgggaaggcagtggccatcccatccagatgagtacatccctctctccttgcctacttccctcctaccagccgtcgcggaggccactgatcctgtgtggtgttcaccccaggacgtgggaggctgctctgtccctctggccttagtttccacatctgtatggtggggttggggggcatgagtcagcttctgttggccagcttactgccccctgtgccccaaggcagccccacccggaggaagctccctgcttccctcctggtctccacagccctcatcagccctgtttgtgtcaggggctggatgtggcaaaacttgcaaaaccgcattcatggcagttacacatctgcacgcagggttccctcgctgcctggggctgggcaggtaggtgtccggtgggaagcgggccctgcctgcaggactcagcccagccctcaaaacctggcacccagctggcacccaggccacatccctcagcggcacagttaattgaaaatgcagctttgaggagtgcaatgtctggggaaagactgttcccagaggggcaggagcatctggggcctctggtggctcccagggtccccatgggaggagccctgtgccctccactcccaagtctcagttgtgccatctgtaaagtgggggccgccagggaggctggaggaaggtgacgggacttcaggccttggaatggggctgagtgaggggttcacatggccaccccatccctctccacgctccacccgctggctgcatccaccaggcggtgtttctgggtcacatttgctgcaattcaggtgctaatgggggcaggaggctgcagggggaggggccggtgtctagtggggcagatgtttctcaatggagaatgctcacagcggcctgcagagggggtctggtgtggcctggggctcctggggttgggatttacacagtgagcctgggctttggggcacagctgctgctgacagagggtcttggggtctgggaaggtgcttaaagcccggcccccatgcctgagctcccacacccctgtttagggacacccagatagggtgtctcctgcaggaaattccccacataattcatttatttaaaaaatattttttgccgggcacggtggttcatgcctgtaatcccagcactttgggaggccaaggtgggcggatcatgaggtcaagagatcaagaccatcctggccaacatggtgaaaccccatctctactaaaaatacaaaagttagccaggtgtggtggcacgtgcctgtagtcccagctactcgggaggctgaggcaggagaatcacttgaactagaaggcaaaggttgcagtgagcccagataacgccactgcactccagcctggtgacagagcgagactccgtctcaaaaaaaaaaaaaaaaaaaatctaaatagcctcccacccataccccctgatcgagggcaggccccaggagccaggctggatttctgggtgtgctgggcctgggagggccaggaagtcaagctggcattaggggagtgggcctgaggggtggcggtaggggcacctcggcggcttgaagctccaagtctgggcctgggacttggcagggccccgagaacccctcaaatacttgtggggctccctcactggcccttgcgcaagagcagcctccgtttcctgggacaggcctccccacccctgcagggcctcagccaggacatagcaaatcccagcgcctccctctggggctcctcagttcccagtcaccaaggacctctggagcctgctgagctgacacacacaggaaagggctccaggctcgctctgtctcccccacctgtcctggcctttc

SEQ ID NO: 15214 - DNA, 2300 bp, Homo sapien
attacaggcgactgccaccacgcccggctagtgtttgtatttttagtagagaacgggtttcgccgttttggtcaggctggtctcgaattcctgacctcaggtgatccgccagcctcggcctcccaaagtgctgggattacaggcgtgagccactgcgcccgacccgaactcagctaattttcttaaaatgtaaatctctgtagaggcgtgttctcaaagtcctgggcctaggcaatcctccctcctcggaccccgagtaggtgggattacaggccaccgcgccagcccgggagggcattttccatcttgcaaggctatactcgtcctccgggtttccgaaattcgctcccaaccccagccgttctcacagcccccacccggctattgctcttctgtcgccccacgctaggtcagggccaggaaaagaggaaagactcaacaaatagtgtctcaacgaaggaggctggggccagggggcgcaaggagccggaccaaggtcacctagagctgctatgatcgcgccttaccgcccccgggcgctcgaagcgggctaaagcctcactagctgtcagcaacgtcaaccggaagcgccatgtgccggtctgtaaacaccgcccggtcgccccgcccccggctccgcccccggcctccccggcccagcgcccgcccccgccgcctcttcattgggcgaccagctttgtttaccttatatggccaggtcctaacaccccgaggctgtccattggtcgaggcacgacctcactcagctgacgtcaccgggaccaaacgatgcaaataaaccgaggcattctgggaaagggagtttggggccgctccggaactggctctgccgggccttggcgcccgcccgctaagggccgagatttccggcaaagagcacgagattttgcgtgggaaagcgggagaactgctgggagggggaccccgaagcaccagaggctgctggccccgccagcctgtcccaggcgccgtccagagggtcatggggctacagtggggcaggcccagagccaggctaggaaggacccatgccacgagtgggcgatgagagattgagtgaggagagctaggaggctagctataggcggtgacgtgcggcggagcttttaagtggctcattcattcattcactgaacgagtatttgtcggcgcctacagtgtgccgggcctttcagcctagaccagccgatttgggccaaaattcctagagacccctctcttaagggcgtgcctactatttaacacagagcgatgccaatcacagaggggttcagggtccctaggtcttagcaaagacgcctgtggcccggcgtttgcgcccatgcacagatctgtatgccccaccttgggaccccaattcgtgccagagcaggggcacgggtgccaccgagagcaatgagggcgacatggacgtgcctggctctggtcacggtctggacagctgcgcacagtaggcacttagcgttcagtcacagtccccggggcatggcaaagacgtctgtggcctggcgtttgcgcccatgcacagatctgtggccccggcctctgggctcctaattcccgccagagcaggggcgtgggtgccaccgagagcaacgagggcgacgtggacgtgactggctctggtcccagctcaggcgcctgcacacattaggcactcagttttcagacaccgttcctgggccttggcaaaaacgcctatgcacgaacctgaggcccccgcctgcggacctccatccgtgccagagcaggggccgggtgccacccagagcaacgagggcgacgtggactcccccaaccctggtcacggcccgggcatccacacacagtaggcgctcacagttcagacacggtccccaggccttggccaagatcctgtggtcaggcatttgcgcccatgcacagacgtggcccccgccagcggacccccatccgtgccagagcaggggcacgggtgccaccgagagcaacgaggacgacgtggacgcgcccggctcgggttacggcccggacatccgcacagcgggcgctcggtgctcagacacgccccttcccgggcttcgcgtcccctagggtgccggccccgctcccccggggcgcccggcgcaccgtggggactacatatcccagcatgccgcggcgccggcggagcgaggcgaggcgcggtgagtcagagccgcacagtaaatatttgtattagccggagccggctcgctaatggtggacgcgtgaggcggaggcgcgggcggaggagggaggccggagcgggcagcgcggcg

SEQ ID NO: 15215 - DNA, 2300 bp, Homo sapien
gattacaggcgcgcaccaccacgctcaactaattttttgtatttttggtagagacagggtttcaccatattggcaaggctagtcttaaacccttgacctcaagtgatatgcctgcctcggcctcccaaagtgctgggattacaggcgtgagccacagtgcctggcctgtttttttaatattttattttttaaaatttttatcctttttagagatagggtctcactctatcacccaggctggagtgcagtggcatgatcatggctcactgcaacctcgacctcccaggctcaagctatgctcctgcctccacctccagagtagctgtgactacaggggcgtgccatcacacctggctaatttttacatttttggtagagacagggtcatgacatgttgcccagtctgttctggaactcctgggtgcaggctatctgcctgcctcggcctcccaaagtgttaggattacaggtgtgagccactgcgcccggccaacatcaaagaattatatgagaggatatgtgcagagccctcagcatgatgcctggcacataatgctcagtaagtgtggatcttggttgtggggcagggagatttaatcaggctcctccaagacctggacctgcatcataatcacacaagtctcttggctgccgtactcatttggcttcccaagttcccctgacaagaggaagtctgaggccaggtgcagtggctcatctctaatcccaacactttgggaggccaaggcaggcggatcacttgaggacgggagttcaagaccagcctggctaacatggtgaaaccctgtctctactaaaaatgcaaaaattggctgggtgtgatggtgcatgcctgtaatcccagctactggggaggctgaggcacgagaatcgcttgaacacgggaggcaaaggctgtagtgagctgagattgtgccacttctctccagactgcgcgacagaacaatttaaaaaaaaagaggaagactggatcctggactgtggtctctggaagggtataagaagcatttccacatggactgtggtgaattgaccattggagactcagtctgccttgccctccctagctgctttcttggtacagcaggcttgacttgggaaatcactctgctcagaatccaagttcctcaactgaaaagtaggtaaaaagcgatctatttgcagagctgtgtgtgactcaaaagccagggaacaccttgcacactgcgaggttttcattctgaaagcgattcttgcaatcttgcccgcagcgccatttcatgcggctctctctcctctgtgcctcagtttccctgtgtgtaaaatgtgggagagtctactgccttccgtggaggctgtgaaattatgtctttaaactaattggtccagacgtggggccaaagtatcgggattacaggtgagccactgcaccgggcctcagccttgtcagggggccggaggttgcttaaccccctggatcccagcttcctcatctgtaaaacgggctgatgcctatacagctctcagaaccacacctggttcagaagtccccaaatggtagtcctcaaattctggccaaggccaaagcaggtgcttcacttcttccgtgcacaccctgcaagtgggctccgggtggcaggtgcagctacgccctctgccggtcggggcgggagacaaactcaggggagtggggagaaccacagcgactcagggagctatttcagagggggcaagtggaaggcgctggggctccaggagagtctgtaagcgaacagatgaggaaatgaccaaagagttaatatgttagtgcagcgcttggaacgcagagggaaggaccatttgccctgtggttggttggttccttccctctgaatttaggtccatttggtttgtcccggagtgcttgtcaacccgtcagagggcctgggaacggagcatcctgggaaagatagttcccagacgggcttcccgcgctgcttcccggcgccttcggcggcgagaggactccatttcccgacgtgccccgggaccgggaggcggagggccgccgtggcgtcggtccccgggccgagccgggggtgggggctcgaggcgcctccgcggccgtggacgagcgtccgtgcggcctggtccgggccatgtccgcgtgaggaccccgccgctgtcgccgctcccgttccggccctggcccctctgcccggcagcgccgcgcaccatgggctccattctcagccgccgcatcgcgggggtggaggacatcgacatccaggcgaactcggcctatcgctaccctccgaagt

SEQ ID NO: 15216 - DNA, 2300 bp, Homo sapien
aggccagggcaggcaaatcacttgaggtctgccgtcaggagttgaagaccagcctggccaacatgggaaagtctgtttctactaaaaatacaaaaattagggccgggtgcggtggctcacgcctgtaatcccagcactttgggaggccgaggcgggcggatcacaaggtcaggagtttaagaccagtctggcaacaaggtgaaacccccatctctactaaaaacacacacacacacacacacacacacacacacacaaattagctggccgtggtggtgcatgcctgtaatcccagctactcagaaggctgaggcaggagaatcgcttgaactcaggagacgaaggttaccgtgagcggagatcacaccattgaactccagcctgggtgacagaagacgactccgtttcaaaaataaataaataaataaaaatacaaaaattagctcatgcctgtaatccccactactcgggaggctgagacaggagaatctctcgaacccaagaggcagaggttgcagcgagctgaaatcgcgccactgcactccagcctgggcgaaagagcaagacggtcttttttaaaaaaaaaaaaaaaaaaggaaccaagtcatatgctgacagggaaatgcatgacagtgcagggttaccggatggaccctcagcactcaagaacagggtctacgtgatcaacacggcgcagacaatcaacaactcacacctgcaggagacgagaccaactgggaagaactggaaacacctcacagagaatccaggccagccgagggggctcacgcctataatcccagcactttaggaggccaaggtgggcaagatggcttgaagccacgaatttcagaccagcctgggcgacatggcgagaccctgtctctacaaaaaatacaaaaagtggccaggcgcagtggctcacatctgtaatcccagcactttgggaggccgaggcaggcgaatcacctgaggttgggagttcgagaccagcctgaccaacatggagaaactcccgtctctactaaaaatgcaaaattagctgggcatggtggtgggtgcctgtaatcccatctactcaggaggctaaggcaggagaatcacttgaacctgggaggcagaggttgcggtcagccgagactgcaccactgcactccagcctggggcaacaagagcaaaacgctgtcttaaaaaaaaaaaaaaaaaaagtagccaggcacagtggtatgtgcctgtagtaccagccactcaagaggctgaggcagaaggaccatgcgagcccagcaatttgaggttgcagtgagctatgattgggcccctgggccactgcactccagcccaagcaacagcgtgactctgtctccaaaaaacaaaaaaaaaatcctattgctcacacatgggtatccacacatggagaagaaacacgggaaggagaccctaggtccctgatggggcaggaggaagggaccaggcctggggaagtgttaggggcggggccgccctttcctttgcctcaagaagaatgacacacatgtggtgtgtgcgtgcatgagctgtgtacatttgtatgtgcaccagctcaggaccaagaggagcaggcagcgctgccaagggggtggaggaaaaagaaaaggagactgtgagtgggaagtgggaaggcagctgtggaggtgaaagaacgcaggtggaaccacacccaccaggctctccctccacacctgctgaggtcagcgccttcaccccctttcccgctggccccaaggaaagaggggcagacaaggcccacactttcaaacatacaggaaacgaagcttggctaaggcccccaagctcatcagcggtggagctggggcgcacaccccgactccagagcccacttgtttctcagtctctgtgctgggcacctcccctcctgcagccgggggaccacggggacaggagtcagtggtgtcatcgccagtgacaatgggcactgttcacacacaaaaaaccacacccaaggggcttccccagcagaatggctgaaaatcctcctgtgggctcacagagcccgacagacgccacagggtcccaaggttgtcctggaaatcccggctatgtggaaccaacacactcaaggacccagggcctcagggcagtcctcgaacaccactaaaacaaaggcatccttctcccctggtttactgtcacccccagggggactggagcccagcagttcactgcctccctgcccgagggattcggactctgggtggcttgcaggtgtccgggcaacctgcacagggagacaacagccacag

SEQ ID NO: 15217 - DNA, 2300 bp, Homo sapien
atttgcgctttatccttgaaacccatgcggtagcgtggtattgaccccattttacaaggaaagaagccgaggctcggagggaggagggcctgagatgaaagccaccctggtcactggggtggggacgtgtgcccctgccctgcttccgctgcccacttcacggggggacagcaggggagaggagacatcctatgtgtctgttggttctgagcattgctgttcaggggcgggtgcttggctgcgggctcagggttcccttgtgctgggccaggagtagtcccacctggacatccgtgggggtggttgctgcagacatggaggggcttgtcccttcctcatgggtcttagtcagtgaggcctgtggtcggtcttgggaggcaggaggctctcccctcacccaactgcccttgcctgggctgggcctgccaggcctttcctatttgatgtttcatccatattttgtttttgtttttgagacggagtctcactgtgtcgcccaggctggagtgcagtggtgtgatctcggctcactgcaatctccgcctcccgatttcaagtgattctcctacctcagcctcccgagtagctgggattacaggcatgcgtcaccatgcttggctaatttttgtatttttagtagagacagggtttcaccatattggccaggctggtctcaaactgctgacctcaggtgatccgccacctaggcctcccaaagtgctgggattacaggcgggagccacggcacctggccttgttttttttttttttttttttttttttacacctttattgtgttataattaccatctcctgcagctcactcgtgttaagcgaatgattcgctggcttttagaatgctcacagtggcacagccagcatctgttctttcagtaaatcttcattgagaaataaatgattctttttcttcccagaataaacagatgcatgtgtccattgctgttctgtgccagacaccgaggatgtcatggtgactggagaggcagggtccctgccctctatggagggagtcagggagcctgatggtggccggtggctttcctggttgccagggtatgagcaatagaagcccaggggcgaagtgcttcctgaggcccagagaaggacgtggcctgtagagagtagggcgagacccacagagcagtgctggggagcaggggtctgagaggatggcactgtgctgggctgactgctggggccctgggggccgtggggaagagggtggccttcagcctgtgcacagcagggggtgggatgaacgcaagaggaagcttctctttggactcaagccagcctcgtggtctcccttgcttgccttttgtgtttgctggggccaagtccggtgccttcttcagaaagttacagggagttgcccagtgaccagcacttcccctcagaggcacgcacccgggagaactgaaaacgcggttcaggcagacacttgcgcaccggtgtccagtgcagcgctgctcaccgtagccaggacacaggcccagcccggtgtccgtcgcaaaggaacgcgtgcacagcgtgtggatatccacacagtgcctgttatttggccagaaaaaggaaagcagcaccgatgcgtgctgcaccgtgggtgaactttggaaacatacctagacacagaaggtcacctgttgtgcaattccatgtaaatgacaggtccaaaaatggcaaatccctggagacaggaagcacatggtggctgccgggggctggaggaggggatggggagtgtgtgggtgctgatggctacgtgtggggtttccgtttggggtgatgaaaagttctggaaatggatggtggcggttgcatgacattatagatgtactttactcaacgctgttgaaacgtagttaaaatggcagattttgtgttgtatctgttttaacacacacataaaaaaggtgccaagcctggcatccgccttccctgccatctcgaggcgtgtcctctgagctctgctgctgcctcctgctcctgcctgctttgtccagctcatttgttgaccgactccaggcttccaggcttggctgtgtgggtcctgaccattcttggcaactctctcctcagctgaactttgacctggaccggggcgtgtttccagtagtcatccaggctgtggtggacgaaggagatggtgagtgcgtcctcttccgtcctcctgggcgtgcaggccgtgcagggaggaagcacgtcttgagggaggagtgcttgcagcagtgatgaagcaggccaggcatagggccttgggcttcccacagggcagggtg

SEQ ID NO: 15218 - DNA, 2300 bp, Homo sapien
ggggacggagcccctggctggagtgaagggtgctggatagatactgaagagcttgtaggggctgctggagtgtttttataagggggagtcagttttaaaaacaggcttccaagcggagaagcagtgctagcaccctgcggctggcgtgtggaggccggacggtgggagcaggtctagctgcccatggttgtgggctcgcaggctggagcccggccccaggcctctgcacagcccccgctcccctgcccagggagtggccagtgccccagggcacccaccacaccactgcctaccactcagggccccagctcctttgcgtgcaggtcaagctgccaccatggcccttctttgaagactgtgagggtggagggaaagcccgtgttctagcccatcagtccctgccccgagaaggctgccacccatgggccctgcagctgctctgacctgcctgggtctggccccatcccagtgtgggtagaggggtgcccagggtgtcagacgggtgcttgcatgggccagatgggctccccctctgtacctcccagaagagccagcgcttgtattgatgtctggtctcggggaggggctgcagcaaggggagcctctcctcctctgcccctgcgtcccacgggccctgggcgctggctgggcttggctgcctaggggtggggccctctttgggtgagaggacccttcccctcgctgccctctcgccttctcacatggtcgctcactctggaatctggacttcccctgctgcttgcagctgtcccatgtgacccctgacccactggtggccacaggaggagagagaggtgccctctctgggtccttattctccacatctgaggccaccacggacctaacaggtgagtttccaatgcccaccctctccctctctcttctcctgcctgcctccactgaaggcagccttctctgtgccagcgagctcggcctcactgcacggctctcccgaggctgtgccccagccctgggcacccatgctgtgagtgcaggcaggggggttcatgtgctcagcaaatccattcccctggtggggaggaaagtggccctgggccctgctgctggtgaggtgagccttgccatcatggagttcagggcacctcgctctgccttgggctgtttcggatgcttctgagccccagagacatctccagtacaaacacaaggtaagtggtaagtacctcaggcccttgtggaatcgggattctgcctctgtcatcaactgccagttgtacttaggcaagttatgtccctctctgagctccaagttcctcatcgtaaattggggaaacccctcttccccccacagtacctggcacagggtgcccggcttggaggatgctggaaaggtccagccccggaatttaagtcactttctgcccagcaagctgggtccacagagccccagagctcccggtcgtccgccctgacccagcgtggactcggggactggggcactcaagccctgccaagccctgctccccgtgctgtcctggatcgagcctgccagcagggtggctaggtcgggacagctgtcgtgcatggcaggcgaaggccatctccctccgggcttgggtccggtggcgctggcggagcaaggctccggggcatctctggctcgtgtggtcgtgccaagggtgccattgcggatggacggggccatgcgggccgggtcggcctcctggggagaaacgggtgggcgcaaggggatcggcgccatcgagggtggagaaaccgcagggaatttcggctgtccgctttggggcgccaaggaagatgttcgtcgcccacaatgtcaaccttgagccaccacggcaccgaccagtcgtctaggctctcccgtcggaggcggggccgccgcccagggtgtgcgactattgggtgacggctgacgcgcaccgccctcctttgcacaccgcccgcagcacctctcgacgacgcaccgcggcgctgcgaggggctcggtcccggggcgcgccggcgattggcgggggaaccggacccgggggcgcggccgcccgcggattggcgaggcacggcgggggcgggctcgcgcatgctcttaagtggcagcggcggggacggggtcagtgccaagatgtcgacggcggcggttccggagctgaagcagatcagccgggtggaggcgatgcgcctagggccgggctggagccactcgtgccacgccatgctgtacgccgccaaccctgggcagctcttcggccgcatccccatgcgcttctcggtgctggtgaggacgggcgagggcgcgggcg

SEQ ID NO: 15219 - DNA, 2300 bp, Homo sapien
atcttttccacccacacaccacagatagagccatgccaggtcgcaggggcaagtaggtgaggtcatgactgggaagtcacctgcctccatcctgggcctcggcctctgaggaggtttcactttggagttccctgggcttatgggccccattctgtacacagagcaggctcctccccgtggctatgtcaccttcaacagcagtggcgagaaccccctggaagaagagggcctctgctgccgggatgtcacctcccccatcaatgagcgggatgtggagagcagcagcagcagcagcagtcggggtacgtgcacccccacccatccggcccgtggctcaggcaggtcctggagctcctgtgtgcccatccccacttatcccctgggcctggcgctggacacagccatccagcagaggacaggaaaggggtaggtgtggacggccctggttcttgtgaggaatgggagaagcttctggtccagcatccccgtgcggcttaagggagccgttccacagcaacaggtttagctccttgcttgggagcccctgaggctttcagggcaggccccagtaggaatgtctgttataactgcacctccgtgcagcagctgtttccatagtgcccaccgtgtgccaagcactgctccgggtgcttgggatttatcagtgaacaaaaaagacagaagccctgcccgtctgtatagaggggagggtttaggacaggcaggaagtttgaaatataaggaagcaaccgctgcaggccccaaggagtgccctggtggaggcggctcagcccggggcacgcccatgcgcagcacctcggtgagggctgcaggcggacgccctgtcttcccgccctcagaggaacatgctttctgtgccaacctggggcccgtccagagcagcagcagcagcgagggcctggccagagcccaggggctcagcagcgaagcttctgtggagagcaacgaggtacggattctttctttcttggtctcccatagccggtccctggctgggatgcctgacatcccccagttactttaagatgagcatgtatgtaagaagcagctgctgcacgtgtgtgctgcactgggacgtgctgtgtccagggtctggcttctcagacgacagcgaacgcaccggaagcccctgtgtggcgggtggggggtttcacgaagcctctcaagcccctgtgtggcgggtgggggtttcaccaaggctctcaagttagcccgcgcactctttcagatgcacgcctctcactgcaggactcggatcatgcctgtaaaagctcagctcgcaaacaagctaaaagttacatgaagaccaagaatcctgacagccagtggcctccccgcgctgcaactgacagggaaggctttctcgctgagtccagcccccagactcagagggccccctactcaggaccccaggtaagaccgcttgtgaaactggaggttacactcagagacggcactttttgtgacttaggaggcatgtgttgtgtatatgacgtgccaggcgctgctaggagaacagaatggcggtggcatccccatggcctgttaggctccacaggctcacagccggctccatggctggcagccccgctgcagcgcttctactctgttcctctccacggaaaggacctgtctccctgctttccatactggagttggcctccctgagcctggggagaagaaaagcacacttgacctcagagctgcctgcaggagtctgacaagatgtggttgaagcagagacaggaactacacacagtgtgtgcttggtgatggttacagctgccaccatcctcctcctttctgtggtccctctgaccacacattaccttagggatcagaggtgtgactcacagctcagctgtctcacctgtgtctgctgagttctcctaccctgtgtgggcagaagaggcacggagaggagaggcagagggaagctctggttggttatttggtttgtttgttcgagacggagtctcgcactgtcatctgggctggagtgcagtggcgcgatctcggctcactgcaacctcctcctcctgggttcaagcgattctcctgcctcagcctcccaagtagctgggattacaggcacccgccaccatgcccatctaattttttgtatttttagtagagacgggatttcactatgttggccaggctggtctcaaattcctgacatcgtgatccgcccgcctcgacctcccaaagtgctgggattacaggcgtgagccaccacacctggcctggtgccatgcccggcctggctggttatttgt

SEQ ID NO: 15220 - DNA, 2300 bp, Homo sapien
agaggctgggctttcagtgcctctggggaatgacctcccgacgtcactgcccacctgccctttgctaatctgtgtacaatagttagagacaatataaagcccctggcagggtccatggctgcgtcttgcccatagtaggatgtgatcatcttgtttttggaaaagggtcgtctcctcacttccacccccttatgttccacacacagcctaactctgtctcctggttctcatttgatattgtggtgcagcgacctctcttcctctctctgcgtgcctcttccagttcccagtgagccaaagcaaagcattgctgaagccccaggtctccggttcccaagttgtggccctcacttagacatacccagcccatggagtgctggtgcaccttggtacagggtggtctgttgcgctccctccacaggaggctctaggcataggcagctgggtatgcagtcagtacggcccctcaaagggtcacgtttggaattctcaggctcttaagtctttgggtgtcctgttaagatgcagagtccataaccgctccatagaggagcagggggaggcgtttgtgttgtgatgggattttgacactagctgaggtggaggcttgctgatagtaagcacaggatggggcctgaggggagctgggggcatcagaaggaaggggtggggctgaacgaggagtggtaagagagccccagggagatgctctgctgttgtgtaaaggaagatagtgttaggacgagctgggtgcattcgagccctgctgcagaggcatctccatgcagcccccctggccaggggctgccactgaaccctggtatcaggaccttctggaatggctgcccaggtgtgcatcccagagtcactgagggctgccaggcaatggaaggtagttgcctgctgtggtctaatatgtgaatcccggctgggcgcggtggctcacgcctgtaatccagcactttgggaggctaaggcgggtggatcacgaggtcaggagatcgagaccatcctggctaacacggtgaaaccccatctctactaaaaatacaaaaaactagctgggcgtagtggcgggcgcctgtagtcccagctacttgggaggctgaggcaggagaatggcgtgaacttgggaggcggagcttgcagtgagccgagatcgcgccactgcactccagcctgggcgacagagcgagactctgtctcaaaaaaacaacaaaaaagtgaatcccgtaaaagggacagatcctggggttcagtcaccagttgttatcccctctgcaggcaagaactggggaagggaaagaaggcctgtgggcgttaaccatgtaggatcccaggtaaccatgcaagtgggtattattttaaatgtgactcccttgtcccaaccccagagtcgcagctaggaagcccacagttttttcccatgggaaaatgcattgccagaattttaacagcaatcagtgagaaagatgggattctttggtcacagatttttcaagaatgtttctttaaggtgaggtgacaaaggatgaatcagtggcggtgggacttgtccacggtggagtcccttctttcctcactgctcctctccacccagcagtgggctagtagatgccaggcctgtggtggtcagggtttttcaactgtggctgtgttgacaatccaggctggatcattctttgctgtgggggctgtcctggacactgtgggatgtttagcggcagccttggcctccagcagcccttccctgcccagttgtgagaaccaaaaatgccttcacacattgccacatattccctggttgagtgccatctgcctatctggtggtgtgaaagagcatagctggccttgggctaggaggatgcgaaatcagagcaaggagacgaaggctcagggcctcacaaggcagtgtacgagcaactgtcagcatttttctgcctgcctgcctccaatccccacaacgtccagggtggcagataacttctgcttcctgtcaactcatcccgcctggcctagcctcgccaccagctttggtgaaccccacatgcgaggcggctggccatgtctagcatatcttgcgtttgtttaggagagagttagatttgaataagaagaatggtggtggctggaccccgctgatgtatgcctcctacattggccacgacacaatcgtgcacctgctgcttgaggcgggggtgagtgtgaatgtgccgaccccagaagggcagactccactgatgctggcctccagctgtggcaacgagagcatcgcctactttcttctccaggtgagctac

SEQ ID NO: 15221 - DNA, 2300 bp, Homo sapien
caagaggttgtcaggttcctagagttggtggagaattctcttttacctggtgcctgcggttggaaggaggagcaggtactccacagttaatgcctcaccatatgtgctcctctttactggtgtgatagcaggctcaccagatttagcatggttgggactgcccaaagcatacattatttcagcaaataaatttgtctgagttactcccggggttgactgcactgggttatcagtctgctagtgcagtggtgtagcaggggcaggaccagcctgtttcatgccctggaacaaccagccaggaaagatctaacccttgggccttcctcctcagtgatgtccgagctcagcgatgaagccagcgagccggaactcctgaaccgcagcttgtccatgtggcacgggctcgggacacaggtcagcggggaggagctggatgtccccctggatcttcacacagctgcttccattggccagtatgaagtggtgaaggagtgtgtgcagcggtaagagatctcggggaacttcctctcacattttgagcagcgcagtgatggcttcgatcccacgtgatggggctttgcacacagttgtggatgtttaatgcgtgtagaataggttaacctgcttatctcaggcagctgtcagtaagtattgatgctgagccctgacaaagaggccgtttttattcctaggaagaaaaagagggagtaaactttgatcagaagcttataaacagtcattctttaaccagactaattttattcactaattgcagaaatgcccaaacaaacaagcaaaataaaaataaagacagaaagtgatggcctggtgcggtggctcacacttgtaattccagcactttgggaggctgagatgggcgggtcacttgaggtcaggagtttgagaccattctggataacatgatgaaaccccatctctactaaaaatataaaagttagctgggtgtggtggcatgtacctgtaatcccagctactcaggaggctgaggcaggagaatcgcttgaacccgggaggtggaggttacagtgagctgagattgcgccactgcactctagcctgggcaacagagtgagactctgtctcaaaaacaaaaaaaagaaaaaagaaagtgatccctggccttcttttcccggagggttcattcgatccctgtgatccctgttcccctctagcttctgccatggaggaggagagaggctgggctttcagtgcctctggggaatgacctcccgacgtcactgcccacctgccctttgctaatctgtgtacaatagttagagacaatataaagcccctggcagggtccatggctgcgtcttgcccatagtaggatgtgatcatcttgtttttggaaaagggtcgtctcctcacttccacccccttatgttccacacacagcctaactctgtctcctggttctcatttgatattgtggtgcagcgacctctcttcctctctctgcgtgcctcttccagttcccagtgagccaaagcaaagcattgctgaagccccaggtctccggttcccaagttgtggccctcacttagacatacccagcccatggagtgctggtgcaccttggtacagggtggtctgttgcgctccctccacaggaggctctaggcataggcagctgggtatgcagtcagtacggcccctcaaagggtcacgtttggaattctcaggctcttaagtctttgggtgtcctgttaagatgcagagtccataaccgctccatagaggagcagggggaggcgtttgtgttgtgatgggattttgacactagctgaggtggaggcttgctgatagtaagcacaggatggggcctgaggggagctgggggcatcagaaggaaggggtggggctgaacgaggagtggtaagagagccccagggagatgctctgctgttgtgtaaaggaagatagtgttaggacgagctgggtgcattcgagccctgctgcagaggcatctccatgcagcccccctggccaggggctgccactgaaccctggtatcaggaccttctggaatggctgcccaggtgtgcatcccagagtcactgagggctgccaggcaatggaaggtagttgcctgctgtggtctaatatgtgaatcccggctgggcgcggtggctcacgcctgtaatccagcactttgggaggctaaggcgggtggatcacgaggtcaggagatcgagaccatcctggctaacacggtgaaaccccatctctactaaaaatacaaaaaactagctgggcgtagtggcgggcgcctgtag

SEQ ID NO: 15222 - DNA, 2300 bp, Homo sapien
agagcccaagatcgtgcagtgcccttccctcactttgcaggtgagaatcccaccctaacagccctggccaacgaagcctggataagaaaccaaacgagctgagggtcagttcagagtcccttccatacctccctcaagccttcactgggcatgtctcttccacgccaaaggcctcctgcagggtgaggccgtgttctctatttactggagacttgcatatctgacatccccagaggtctgaaggacaatgagaaccagaccaagcgtgacggaccacttgaggccaggagttcgagaccaccctggccaaaatggtgaactcccatctttactaaaattacaaaaattagctgggtgtggtggtgggcgcctgtagtctcagtactcaggaggctgaggcaagagaatcgcttgagcctgggaggcgattgcagtgagccgagctcaagccactgcactccagcctgggcaacagagcgaaattctgtctcaaaaaaaaaaacaaaaaaaaaacactaaagtgaaaactaaaatgtcccatcccgagtggtgtggtgtaaagtagcattagagataagacgttttagttttcattcaactttttggttctgtccattctgaaaatgctaagtatctgttacctttacagtgaatcctaaagaaaatgtggtacttagacacaatggagtactattcagccataaaaaaagaatgagatcctatcatttgcaaaaacatggatggaagcggagatcgttatgtttagtgaaataagccaggcacagaaagataaatattgcatgttctcaattatttgtggttatctaaaaatcaaaacaactgaactcatggacatagaaagtagaaggatggttacttctagtgtaaccaaggctgggaagggtagtggagggtggggatgcttaatggatacaaaaaaaacagaatgaataagatctagtatttgatcaagccactgcactccagcctgggcgacaaagcgagactccgtctcaaaaaaaaaaaaaaaaaaaaaaagatctagtatttgaccgcacaacagggtgactatagtcaatataatctaattgcacattttatttatttattattattttttttgagacataatctcactctgttacccaggctagagtgcagcggcgtgatctcggctcaatgcaacctccgcctcctgggttcaagcgattctcctgcctcagcttcccgagtagctgagattacaggtatgagccaccatgccagcctagttttcgtatgtttagtagagacgaagtgtccccatgttggccaggctggtctcaaatccttgacttcaggtgatccgcccgcctttgcctcccaaagtgctaggattacaggcgtgagtgagccaccgcgcccggctgcacatttaaaaataattcaaagagtataatcatattgtttgtaacacaaaggataaatgcttgaagggatggagacccccattttacatgtgattattacgaactgcatgcctgtatcaaaatctctcatatacgccataaatatatacacctactacgtacccacaaaaattaaaaaatttttaaaaatcttaacaaatgtgatgctggtggtaactgtcacgcccacagaggaggtctgtgaaagcacccaggcaccccctctcgccccgtggaaccgcatcgcaaaggtagctcactggccccggggcgggtccctggccgacaaacccgtaactcacagcagtgacgcttcccgacgccccccggccacatccccacaggaacgctacggcgcacagggcattactgtgcccccaccacaaccacataaagaaaatgtgggggctcggtcctccagtcacgcggcgagcaagtgcagcgcgggacgcccgagcgccgggtctaggcgggctgcaggtgccggcaagtgctggggccgggccgccgcggaacccacctgtgctgggcctcaggccttgcgccgccctcgggctgccgtcgccaaccccccccaaacagctcgccgccacgctccctcgccggggcaccgcccccggcacccgccccggaagtagttgcgggagggcgcggagcacgccgggaagctcgcgggtcggcaccgggacagctcccgggcgccgtggaatgcacacgtcccgcacccggaccttccggtcagcttcccggctcgctgtctgatgcccgcggtagccaatgagctagtggtgtttgtcctgctccgtccccgccctccaggggaaccaatcccattgcaggagaggcaggacg

SEQ ID NO: 15223 - DNA, 2300 bp, Homo sapien
tcagtttccttctagttatgcaagctcctgttagtgccaggcactgtgtgtgtacgtgtgtgtgtgtgttcccactcatgcacacatgtggagcctgcaggtatataatgtatatagtgatatatacataataatatacaaatatatgtattgatataaatatacctatgtagatatatgtacatgttatatagaatgccatatgtacgatatataatgatatataggtatattttatatataccccatatagcataactattctcttcatttcataggctcagggtgtttagtaaatagcaacagtggactctgaatcagggggaatttcaagtcctactaccctttactgccctttaccaaggaacagaagacaccttgcttttttgttttggagacagggtctggctttgtcgcccaggctagagtgcagtggtacaatgatagctcactgaagcctcggcctcctgagctcaagtgatcctcccacctcagcctcctgaataactgggactacaggtgtgtaccaccacatctggctaacatttttattttttgtagagatggagtctccctgttgcccaggctggtctcaaactcctggcctcaagtgatcctcttgcctcagcctcccaaagtgctgggattacaggcatgtgccatcgcgcctggctgacagtttggagtcactaagtgatttttttttttttttggagtcactactctgaccagcccctgcatttatatcttagagtcttaaaggagatggtcctgttattcagggggctggggagcttgagcttgagagctggggggtgagggtcctctagagccagtgtcaggagaactctgcagctcgagaggccgctgtggctttggccctgcagtcagtgcccgttcatccccaatcagggcagcggcaggagatgtgaattgggggctgcttgcttcctctgtacttctgggaatagggcaggtgcttggtgcactctgaactgggagcagcgggttggggacgcatctggtgcacacagccagcgggtgttttttgtaactagagctctgttccgcaattcagggcacagtatttcttagggcaacagaatcgtcgggatgaagagggcctccagagactctgataaacccttcaggcggacaagacaataggggagggaacggcattaccggcagaaggaagagcatgtacagtagctcaaaggaatgaaccgcccaacaggtttaagggaagaaagtgtcagttgctggactctccggtgaaaacggaccagacaatgcagggccctgaacgccaagttgaggagctcagagcatccagaaggcgaaggggaggctcggagccgcctctgaataacggccttccggctccgtctcggggtgggtttctcagctgcagcctgttagccccgccacagccccgccccggttctcagagccccgcccccagccggcctgccacgaggctgccggttgttatggcaaccagacgccaacagcctcccgggtcgagcttttaaattttaaagctgtggaagtggaaagcccatcgctcctcctctcacccacccccagcccgtatttccccgcgttttgttcaactccctgcaggcgcagcaggcccgaggcccctcacctcaggcctctgcctccactccccgcgctgtcctgacagcgctataaacagcctccagcgcgtcactccgctcgcgtccgcccctcgggccgcgccgcaggtacagaggctgtccccttcttcagcactctccctctcagcggagctttacattactagactgcctccgccttccccccaccccgcccagctcctctttcgggcctttgcgcgtcctgcctctcctgcaatgggattggttcccctggagggcggggacggagcaggacaaacaccactagctcattggctaccgcgggcatcagacagcgagccgggaagctgaccggaaggtccgggtgcgggacgtgtgcattccacggcgcccgggagctgtcccggtgccgacccgcgagcttcccggcgtgctccgcgccctcccgcaactacttccggggcgggtgccgggggcggtgccccggcgagggagcgtggcggcgagctgtttggggggggttggcgacggcagcccgagggcggcgcaaggcctgaggcccagcacaggtgggttccgcggcggcccggccccagcacttgccggcacctgcagcccgcctagacccggcgctcgggcgtcccgcgctgcacttgctcgccgcgtgactggagg

SEQ ID NO: 15224 - DNA, 2300 bp, Homo sapien
cttcatggctacctggctcatcccagcacctggcgagtacacaggaactctggtttactaaactgctaaactacactgctacaggctacagtggggagtgggagggaggaagatggcccatcagtgcctgagcaagcacacaagctggacctcgtgggagggacaacccaggagacaatgagcaaatgtggactaagcgtgccaacgcaggcctgtgttgccagtgctggaggctgagacagaggttcccatgaggccaggagtttgagaccagcctgggcaatacagcaagaccccatttctggctgagcacagtggctcacgcctgtaatcccagcattttaggaggccagtatgggtggatcacttgaagtcaggagtttgagaccagcctggccaacatggtgaaaccctatctctactaaaaataaaaaaattagctgggcatggtggcaggtgcctgtaatcgcagctactccagaggctgagacaggagaatcgcttggacccgggggagcagagatggcagtgagccaagatcacaccactgcacactccagcctgggcaacagagtgagactccatctaaaaaaaaaataataataaagaaaagaaaacagtgtagaggcactaacccacttccaaaatggagacggggcctagctccagcgtaacttctctcaggtgttctgctgagaacaattaacctactgaatgggagggcatgggcaccgaaccagatcatctcccagaaccaggacatgcacccacccatcaccttgaaggaaatctcccatcagcccagccattcctagacctaggtttgaaataaccccacacaagagagatccccagggcagctaagaactctggtgggttcaggtggaacaatttgcatgtgattttattttgctgcttcatttttacaatcaattacttcagaaactcttctggatgattttttcttgtttttttttttttttttttttgtaatgtgggatctctactaaaaaattagctgggtgtgatggtgtgcctgtggtcccagctactcaggatgctgaggtggaaggatgacttgtactctagcttggggtatgaatttctgagccccaacattatcatgattgataatttaaatattgtttcattgctgtaacagtgcattccactctagccttgtatttaaatagcaggatgcctcagtggtgctgtctttagccagcccatattcaacagtagctttccaacttttttttttttttttttgggacaggatcttgctgtgtcacccaggctggaatacaatggtgccctcactgctcactgcagcctccacctcccgggctgaagcgatcctcccacttcagcctcccaagtagctgggattacacgcacgccactgtgctggctcatttttgtatttttagtagaatgaagtgtgcagttaaaaatggttaaaagaggtcaggcacagtggcttgtgcctgtaatcccaccactttgggaggctgaggcaggaaagatagcttgaggccaggaacttgagacaagcctggaagaccaactatgttgtagagactctgtcactacaaaataatattaaaaaaaattaactgggcctagtagtatgtgcctgtcatcctagctacttgggaggctgaagtgggaggatcgcctgggccagggaagtcgaggctgcagtgagctatgatcgcaccactgcactgcagcctgggcaacaaagcgagacttcacctcaaaaaaaaaaaaaaagtacatatttttctatgaaaaacattccctgaagcatgtttttgaggatgctaactgaacatacctgttttcttgacagccagttctggtgcctgcagaattggccacagaacctgggtgcagacagaacacaaggacaaaggatgcatcctctcaggaaggaagagaccctggcaggccttttgaaagctctggtgaggtcagcgctcttcttgggatggccgaggagccccccaggtggctggaaggcgaccttggaagcctgtctttcaacaccaaaggatcccagggtcctccctgggacccacaggccgaagccactctctcctgccatgaaggagacccaaaggcagagcccctcagcactgcctcacaagaatctgtgaaccgccgggccctccgacaggagagaaggaagatgatagagacggacatcctccagaaagtcacccgggatgcctgcggcccgaccagcagtgacaaaggtggggtgaaggaggcgccctgccacgctgcggagtcag

SEQ ID NO: 15225 - DNA, 2300 bp, Homo sapien
aattgatacctggctgggcacacctgtaatcctgacactttgggaagctgaggcgggaagattgcttgggcccaggagtttgagaccagcctaggcaccatggtgggacttcatctctaacaacaacaacaaagattgatgcccattattatgttgtcagaaagaagcaggcaggacaagggatatttggggttggacgttgttgggggccctcttgggggagggtgggcgcaagcacttggcatctcttccagttttatcttgaacaacttctgcctttatttattttatttatttattatttatttatttattttttgagatggagtttcgctcttgttgcccaggctggaggacaatggcaggatgtcggctcactgcaacctgcgccttagcctcctgagtagctaggattacaggcatgaaccaccacgcccaggtttctccacgttagtcaggctggtctcgaactcccgacctcaggtgatccgcccgcgtcggcctcccaaagtgctaggattacaggtgtgagccaccgtgcccggacgactttgctggctttaaagatggaggaggcggccagaggagagcggagcgggtgtggaacagtgactgggaaagtagcccagaggctgcagagtcgccgcacgctcgcgcggtcaccgaggtgctggactacgttacccacaatgcgtgcctttgaggaccacattaaccacagtgcacgtcgcggacccgcccactcggccgtgttgccacgcccccaacggccggcttagccaatggtgccacggctacgttacccacaatgccgcctgcgggcccacccgcacggcctggtttgcacccctggtttagggtcttcggccccggctctggcgtccctggctgccaagcctgaggcccgcagtcctactcccgccgagacccgccgctccggtcctgccccgaactgcccacggccggcagcgcttccagtgagtgcggggggcgcggggacgcgggtcccggccgaagcttcgatttcgcggcccgcgccagcacccgggtctgtgccgcggcctcgggtaccgctcaccctccacctgagggatgagacgggaaagcagcccggcctgggggtcccagctctcccaggaccctggaattggggggctgtcgtgaccacccacgcgggggtgcctgacggggccgcgtaggggcttcagggttcgccagacctggacaccggggatcaagttgaggcagagtctgcagaaaggccctacttttcatcagatttccaaaggaaccccttccatataggacccactctaatcatggaaaataacgattctcgagctctgaccgcaaacatcccttttagattgtttttgtttgagtctctctctgtcgcccaggctggagtgcagtggcgctatctcagttcactgcaacctccatctcccgggttcaagcgattctcctgtctcagcctcccgagttgctgggattacagatgtgctaccaccatgtcgggctaatttttgtattttttgtagagacagggttccaccacgttgaccaggtggtcaactcctgaactcacgtgatctgccctcctctgcctcccaaagtgcggggattacaggcgtcagctactgcccccagccatcccttttagttctgtcagcaacctgtgtgtgtaggtcctgttatcatctctgtttgcccagtgaggaagcaaagcccagagcccttcagtaaattacccgggaattaacagggggttaataacaaagatgacattcatccacttccttttccttttccatggtggggtgagctggccttggaaccagggcaggggcttcccaggccaaagggcttatccagccccagggctgcccttcagatggttttatcgtctctccacagggccctgaaaaaaactctcttcctgtgtctggccagaggtatagagagagacaggttcaactctaaggcctgaaaaggaacaaggcccaccggaagcaatggccactgtccctggcctccagcccctgccaaccttggagcaggacctggaacaggaagagatcctgattgtgaaggtggaggaggacttctgcttggaagaggagccctccgtggagacggaggaccccagccctgagactttccgccagctcttccggctcttctgctaccaggaggtggctgggccccgggaggccctgagccgcctctgggagctgtgctgccgctggctgcggccggagctgcgcaccaaggagcagatcctggagctgctggtgctg

SEQ ID NO: 15226 - DNA, 2300 bp, Homo sapien
tgtccactgtatgcctctcatggcaagctccatgaaagcaggcacctgccaccactccatcacccgagcgcctagttaagggggcagttgggaggactcaacgtgcagcgtttatgcatttattatgcctggatgaatggtcttgaatgagttacaaccttgagggttaatgtcccccattaacagatatggaaactgaggttcagggcgcgcaagggaaccgcccgcagtctcgacgacaaggacgctgccaccgggagactgcagccccttcctccgagcccctggcagtgccgccacttgaggagaccctccaggccgccaacccaccccctctagagcgcccaggaatctgcctccggggagggcgcggggcgctctgggaaatgtagtcctgccagcttcctgaatccggcgtccccaaatttgtttccggcgggctgagtcctagccgatgctttgggaaagacgcgcgagattccgggggtagatccgggatgcgaggcggggcgcgcatgcggggcggagcttgtgcggggcggggcgtacgttgagtgtacgcctgctgtgtatgctgcgttgctgctcacccgaactcggtgctgggactctttcctgggcaccccaggcagagggaaactccggatcatgttcaaccaaagaggaaaagcagcgagaatccagcataggagacgggccttaggatgcccaagttaggattaggggcaaactacgttaacctggtagttaggagctgaagttctggaatcaaagatttgggttccaatcccatttctgtacttcctgtttgaccttctctggggggttcaatacttaaaactctcagagcttcagggttttgttttgttttgttgaaccggtaggtctagttatagtacctctattactaaatgaggaagaaacgaagtacaaatgtgttttgcttgcttgatgctcaagaattgatgcgaccgggagcggtggcttactcctgtaatctcagcactttgggaggctgacgtgggtggattgcttgaggccgttggagaccagcctgggcaacatggggaaaccccatctctactaaaaatacaaaaattagccggacctggtggttcgtgcctgtaatcccaactattcgggaggttaggtaggagaattgcttaaaaccgggcggcggaggttgctgtgagccaaggtcgagccactgcactctagcctgggcgacagagtgagaccctgtctctaaataaataaatacatacatacaagaattgatacctggctgggcacacctgtaatcctgacactttgggaagctgaggcgggaagattgcttgggcccaggagtttgagaccagcctaggcaccatggtgggacttcatctctaacaacaacaacaaagattgatgcccattattatgttgtcagaaagaagcaggcaggacaagggatatttggggttggacgttgttgggggccctcttgggggagggtgggcgcaagcacttggcatctcttccagttttatcttgaacaacttctgcctttatttattttatttatttattatttatttatttattttttgagatggagtttcgctcttgttgcccaggctggaggacaatggcaggatgtcggctcactgcaacctgcgccttagcctcctgagtagctaggattacaggcatgaaccaccacgcccaggtttctccacgttagtcaggctggtctcgaactcccgacctcaggtgatccgcccgcgtcggcctcccaaagtgctaggattacaggtgtgagccaccgtgcccggacgactttgctggctttaaagatggaggaggcggccagaggagagcggagcgggtgtggaacagtgactgggaaagtagcccagaggctgcagagtcgccgcacgctcgcgcggtcaccgaggtgctggactacgttacccacaatgcgtgcctttgaggaccacattaaccacagtgcacgtcgcggacccgcccactcggccgtgttgccacgcccccaacggccggcttagccaatggtgccacggctacgttacccacaatgccgcctgcgggcccacccgcacggcctggtttgcacccctggtttagggtcttcggccccggctctggcgtccctggctgccaagcctgaggcccgcagtcctactcccgccgagacccgccgctccggtcctgccccgaactgcccacggccggcagcgcttccagtgagtgcggggggcgcggggacgcgggtcccggccgaagcttcgatttcg

SEQ ID NO: 15227 - DNA, 2300 bp, Homo sapien
ccctagtagctgggactgtaggcacacgccaccatacccagctgatttttgcactgctttttttttttttttttttgagacgcagtctcgctctgtcacccaggctggagcgcgatggtgggatctcggttcactgcaagctccgcctcccagattcacgccattcccctgtctcagcctcccaagtagctgggactacaggcgcccgccaccacgcctggctaatttttttgtatttttagtagagacggggtttcaccatgttagccaggatggtcttgatttcctgacctcatgatccgcctgcctcagcctcccaaagtgctgggattacaggcgtgagccaccacacccggccttgcactgttttttaatttttaagacagggtctcaatctgtcacccagactcaagtgatcgcagctcactgcaacctccaccctcaggttcaaacgatcctcccacctcagccccccaagtagctgggattcaggtgcatgtcaccatgcctggctaatttttaaattttttttgtagagatggggtcttgctgtgttgcctaggctggtcatgaactcctggcctccagggatccttctgcttcagtcttgctctgtcacccaggctggagtacagtggcgcaatctcggctcactacaacatctgcctcccaggttcaagcaattctcctgccttagcctcctaagtagctcctaagtacaggcgcccaccaccacgcctggcaaatttttgtatttttagtagagacggagtttccccatgttggccaggctgttttcgaactcctgacctcaagtgaccctcctgccttggcctttcaaagtgctggaattacaggcttgagccaccatgcccggcctcatttttgtactttttgtagacattaggttttgctagtctcaaactcctgagctcaagtgatccacccacctcagtctcccaaaaccctggattataggtgtgagccaccgctccaggcacatttttgtcttttaatgactcagcatttctcaaattttcaatgacaacatccctgtgaggtgctattatcaggcccacctaagagatggggaggggcgacaggctgccaaaggtgaggccacacgcccaggcacgcgtagcactgtgggtctgtcctgccgtgggccctacctctcactcacccaccaccatgatgttgaactcaaaccccatcttcatagccttgatcttcagctggtccagcacagcctcaatgcccacaggaccaagcatctcgcagggtggggtgctggggctggagggctgcgaggacaggcagggagagggggagcgcctcagggggtccatgggggccaagggttcgagatgcctgtcaccaggtgggtggggagaagggggtcactggggctcagaggagcccacattgacctctcctatctgaacccctatttgagcttggccgttggccaaccccctccacacttcatgcctctggtgtaccctaagtgcctgtagtcccaggggtgtggcaagggtgcctgtggggagctgtttctgcagggtgcctcaacacccatccagagaggctccgctgcccaagggtctgccctgtccccacctacagcccaggcaggggcctctcaggtcgcttcccccagcagagcctggagggccaggcaaagtccaggatgggtgtttgcagccaggctggagtcctggaggggcttcagggagtgtgtatggggtgaagtggctcccgtcccagcaggaaacttgggcagggggctcaggaggaggtgcccccactttccccagggggacacacagcagagttgatagagagcgagaaagacggcacaggcatgaaggtgacggagacagagagagagagaccaaggtcaggcagggaagatggctgggagggagcggtgcgaagagcccacggggggcagagagagagagaagcagcctgctgtgacacctggtggacgtgggtcctggtggagcttccaggagctgccttgtcctggcagggcctggtgtgtgtgatgggggaggggagagggtgacagttaaccgaagaatctgagctccatctgcacttgctgtgacccccacctggaggcttctctgcagcaggagcaggagctgttacccttctaatccccacaatgaccccagcctaataatacaataatccccaagtagaaccaggggcccaaggccccctcgtcagctgggctcccacctccaagctgacgccctcaaccactctgctggggtgagcaaacccaggcc

SEQ ID NO: 15228 - DNA, 2300 bp, Homo sapien
aggaagaactggcagaaggtagtggacagcaaagggcagaagtcggcctggggctcaggaaagctggaaccacggccacctttcttctgtgaatacggttttacttagacacagccacgcccatctgtttacctattgtctgtggcgactttctcactgcaatgaaaagttgcatagtagttgcaacagagaacttaggaccagcaaagcctaaaatagggaccatctggccctttacagaaaacacttgccagcctgagtgtggtggcgctttgggaggctgaggcagctggaccccttgaccccaggagttcaagacaatcttgggcaacatagggagacctcatctctacaaaaagtaaaaaaattagcccagcatggtctacgtacctgaagtcccagctactagggaggctggggcaggaggatcacttgaacccaggaagtcgaggctgcagtgagctgtcattgtgcctctgcactccaacttgggtgacaaagtgagaccctgtcccaaaaaagaaaaaaaaaaaagaaagaaaagaaaggagaaaagaaagaaaaaagaaagagaaaacatttgccaatagcaaggacacaggaatgcctaagccttgtgaagtcaagtaccaggaaacaagaaagaattaactgtgtgagatggacttggtataagaaacagcttatcaggctgggcatggtggttcacgtctgtaatctcagcatttagggaggctgaggtgagaggatcactagaacccaggagtttgagaccagcatgggcaacatagtgagaccgtgtctcaaaaaaattttaaaaagggctgggcgcaggggctaacgcctgtaatcccagcactttgggaggccgaggagggcagatcacgagatcaggagatcgagaccatcctggctaacacagggaaaaccagtctctactaaaaataggaaaaaattagccgggcgtggtggcaggcgcctgtagtcccagctactcgggaggctgaggcaggagagcggcgtgaacccgggaggcagagcttacagtgagccgagatcatgccactaaactccagcctgggtgacagagcgagactccgtctcaaaaaaaaaaagaaaaaaaggaaaaaagaaaaaaaaaggccaggcatggtggctcactaatcccaacactttgggagaccagggttggtggatcacttgaggtcagaagcttgtgactagcctgaccaatgtggtgaaaccccttctctactaaaaatacaaaattagcgtggtggtgcacaccggtaatccagctacttgggaggctgaggcaagagaattgcttgaacccaggaggcggaggttgcagtgagccgagatcgcgccactgcattccagcaagggcaacagagcgaggctgtctcaaaaacaaacaacaaaaaaagaaacagcttatcagagagacagtaaggcaggggtgaggaccacagtctggaaagcacatggcctatttaaagagggcatctcaagtcagggtgataacctctaagatacaccggaaatctagatgtttctgtaaaccagaaaaaggcagtagagggtgagcacacagactcagagcggcagagactctgccacctcctcacctgaccctctcttatctatcagcttggggtagtaacagcacttacttcacagggcttgattattaaacaagttaacatctttgggctcctagaacgatgccatgtgcagagtcaggactgggtaaatatttgctaaagcaatctcttcatgtttttgacgctgcaacttaaaacacatggcgccaatcgtggacacggatatcccgctagccagctgtggggcctgggtttgctcaccccagcagagtggttgagggcgtcagcttggaggtgggagcccagctgacgagggggccttgggcccctggttctacttggggattattgtattattaggctggggtcattgtggggattagaagggtaacagctcctgctcctgctgcagagaagcctccaggtgggggtcacagcaagtgcagatggagctcagattcttcggttaactgtcaccctctcccctcccccatcacacacaccaggccctgccaggacaaggcagctcctggaagctccaccaggacccacgtccaccaggtgtcacagcaggctgcttctctctctctctgccccccgtgggctcttcgcaccgctccctcccagccatcttccctgcctgaccttggtctctctctctctgtctccgtcaccttcatgcctgtgccgtct

SEQ ID NO: 15229 - DNA, 2300 bp, Homo sapien
atttgcatataacctgtgcatatactctatactttaaatcatctctggattacttataatacttaatatatttggcctggcctggtggctcacacctgtaatcccaccactttggaaggccaagttgggcagatcacttacttagatcaggagcttgagaccgtcctggccaacatggcgaaaccccacctctactaaaaatacaaaaattgggccgggcgcagtggctcacgcctgtaatcccagcactttgggaggcagaggcgggtcagctgaggccagaagtttgagaccagcctgactgaccaacgtggagaaaccatgtctctactaaaaatacaaaattagccaggcgtggtggcacattcctgtaatcccagctactagggaggctgaggcaggagaatcacttgaacccgggaggcagaggttgtggtgagccgagatcacgccattgcactccagcctgggcaacaagagcaaaactccatctcaaaaaaaaaaaaagataaaaatacaaaaattggtcgggtgtggtggctcatgcctgtaatcccagcactttgggaggccgaggcaggcggatcacaaggtcaggagatcaagaccatcctgggtaacacggtaaaaccccatctctactaaaaatacaaaaaattagccggccatggtggcacgcgcctatagtcccaactactcaggaggctgaggcaggagaattgcttgaaccctggaggcagagattgcagtgagccgagatctcgccactgcactccagcctgggtgacagagcaagactccatctcaaaaaataataataatacaaaaattaccccgctgtggtggcgggcacctgtaatcccagctacttgggaggctgaggcaggagaatcgcttgaacccaggaggcggagcctgtagtgagccaagatcatgtcaccgcacacccgcctgggtgacagagcaagactatctcaaaaaaaataaattggctgggtgcggtggcatactcctgtaatcccagctaatcgggaggccaaggcaggagaatcgcttgaacccaggaggcagaggctgcagtgagccaagatggcaccactgcactctagcgtgggtgacagagcaagactccatctcaagaaaaaattgtatacatatatttatttaatataatgtatgctaggtaaataattgttacattgtatagggaacagtaagcaaaaaagtctgtacatgtccaatagagatgtgatttgtttccaaatattttctgtctgtggttggctgaagccacagatgtggaacctgtggatacggaaggccagctgtactaggactcttcactgtccttattttctctattttactacttgaaaatatcagctaatgtggggctctgcatcgagcactgtgctgtgtcacctggtttattcctcatagcaatcctaaagtgggtattattgctttttccattttacagatgaggaaacggaggcctagagaagtttagccattagcccgtcacacacctaatgtatccatgtcccaatgctgccgtaacactaccacaaactctgtggcttcaaacaacacaaatgtattgccctatggttctgaaggtcagagtctaaaatgggtcgaccaggctgtgttcatcctgaaggttctagggcagagtccatcttttgccttgtccagcttctagagggtggtggcattcctgggcttgtggtctcccatccctccaccctctgcttccaggctcacgtctcctcctctgactctaatcctcctccctccctttttttttttttttttttttgagacagagtttcgctctttttgctgaggctagagtgcagtggcgccatctcggctcactgcaatctccgcctcccgggttcgagcgattctcctgcctcagcctcctgagtagctgggattacaggcacctgccaccacgcccagctaacttttgtattttagtagagactgggtttcaccatgttggccaggctggtctcaaactcctgacctcaggtgattcacccaccttggcctcccaaagtgctaggattacaggtgtgagccacgatgcttggccttttttttttttttttttttgagacggagtcttgctgtcacccaggctggcaggctggagtgcaatggcacgatgtcggctcactgcaacctccgcttcctgggttcaagagattctcctgcctcggcctcccgaatcactgggatttcaagcgtgcaccaccacacccagctgatttttgtgttttcagtagaga

SEQ ID NO: 15230 - DNA, 2300 bp, Homo sapien
tccgtatccacaggttccacatctgtggcttcagccaaccacagacagaaaatatttggaaacaaatcacatctctattggacatgtacagacttttttgcttactgttccctatacaatgtaacaattatttacctagcatacattatattaaataaatatatgtatacaattttttcttgagatggagtcttgctctgtcacccacgctagagtgcagtggtgccatcttggctcactgcagcctctgcctcctgggttcaagcgattctcctgccttggcctcccgattagctgggattacaggagtatgccaccgcacccagccaatttattttttttgagatagtcttgctctgtcacccaggcgggtgtgcggtgacatgatcttggctcactacaggctccgcctcctgggttcaagcgattctcctgcctcagcctcccaagtagctgggattacaggtgcccgccaccacagcggggtaatttttgtattattattattttttgagatggagtcttgctctgtcacccaggctggagtgcagtggcgagatctcggctcactgcaatctctgcctccagggttcaagcaattctcctgcctcagcctcctgagtagttgggactataggcgcgtgccaccatggccggctaattttttgtatttttagtagagatggggttttaccgtgttacccaggatggtcttgatctcctgaccttgtgatccgcctgcctcggcctcccaaagtgctgggattacaggcatgagccaccacacccgaccaatttttgtatttttatctttttttttttttgagatggagttttgctcttgttgcccaggctggagtgcaatggcgtgatctcggctcaccacaacctctgcctcccgggttcaagtgattctcctgcctcagcctccctagtagctgggattacaggaatgtgccaccacgcctggctaattttgtatttttagtagagacatggtttctccacgttggtcagtcaggctggtctcaaacttctggcctcagctgacccgcctctgcctcccaaagtgctgggattacaggcgtgagccactgcgcccggcccaatttttgtatttttagtagaggtggggtttcgccatgttggccaggacggtctcaagctcctgatctaagtaagtgatctgcccaacttggccttccaaagtggtgggattacaggtgtgagccaccaggccaggccaaatatattaagtattataagtaatccagagatgatttaaagtatagagtatatgcacaggttatatgcaaatactgcctcattttatatcagggagtttatagcatctgtggattttggtacccacggaggtgctggaaccaatcgttgaggattccaaggacaactctatgatgcaggcacacctgtcctagctgctcaagggtcgtgggatgcaggtaggttttctcccccttccccctccctcccacccaccttctctcccatctctctctctttcattcacgaagtcagcagtggccaagcacacaggtgttcccagctgcatatctgggatactgaggaaaggtaagaagtctcaggagtgaagaagccacaggccggcgtcttcctccctgggcctccagcagtggggagccagggagcgcacctgctgggcctgggccctctcccctgggctgggcggcctctgctggccctggggagggcggggctggttgccaaggcctcaggtggtgtggagccggaagcaggaagcagcctgtgctccccaggacctgcctggttgggggaattggaggcttctaggaggtaggtgggggcctgggggctgggctgccagggggagagagaggggagatgacagtggctggggagaaggttgtcagggtaaggaccacagggctgggcaaggagagaagctgggcctggggccgagggagaagtggagtgggagggggtggggaagctggcgctgggccaggagcgggcagtggctgggctgtgggaagcctggatgtggtccccgctgagctgagcccaggatcctgatgcagcctctgggggaccggggcaggtggcacggtgcacgccaagatggctgtgtccacagaggagctggaggccacggttcaggaagtcctggggagactgaagagccaccagtttttccagtccacatgggacactgttgccttcattgttttcctcaccttcatgggtaagtgtggctgtggcctctgggtcctcccagccccctgccctgggctccaggt

SEQ ID NO: 15231 - DNA, 2300 bp, Homo sapien
cttctccaccctgccctgccaagtcccctgcatgcccaccgctctccatcctccctcctctccctcttcctcccgtggagacagtatttctttctgtctgtccctttggcccagacccagcctgaccaacgatgagcatttcttaggctcagctcttgatacggaaacgagtgtcttcactccagccagcatcatggtcttcggtgcttcccgggcccggggtctgtcgggagggaagagaactgggcctgacctacctgaactgactggccctccgaggtgggtctgggacatcctagaggccctacatttgtccttggataggggaccggggggggcttggaatgttgcaaaaaaaaaagttacccaagggatgtcagttttttatccctctgcatgggttggattttccaaaatcataatttgcagaaggaaggccagcatttacgatgcaatatgtaattatatatagggtggccacactagggcggggtccttcccccctcacagctttggcccctttcagagattagaaactgggttagaggattgcagaagacgagtggggggagggcagggaagatgcctgtcgggtttttagcacagttcatttcactgggattttgaagcatttctgtctgaacacaaagcctgttctagtcctggcggaacacactgggggtgggggcgggggaagatgcggtaatgaaaccggttagtcaattttgtcttaatattgttgacaattctgtaaagttcctttttatgaatatttctgtttaagctatttcacctttcttttgaaatccttcccttttaaggagaaaatgtgacacttgtgaaaaagcttgtaagaaagcccctcccttttttctttaaacctttaaatgacaaatctaggtaattaaggttgtgaatttttatttttgctttgtttttaatgaacatttgtctttcagaataggattgtgtgataatgtttaaatggcaaaaacaaaacatgattttgtgcaattaacaaagctactgcaagaaaaataaaacacttcttggtaacacagctgtgccgcaggagtcctgcttccctcgtcctcggcgagatgggtgggaggagaaggcagcggcggggccggggtgggttttcgggacctccgcgtccggggtgagacggacttgggagtggcggcgaggtccgcggcagggttggaaccacgaccaatggagccaagcgggccaatagggaggaggagcggggacagactgtcctgccggccaatgagtgagcgcgagtggagcagagcgccctatcatatcctgggggcgccccgggagctccgcccccaagcgggcgccccaggctggtgccggccgcgtccctggccagccggagcaagcctgactcgtgcagccgccggccgcgtccctggccaggcggagcgagcctcactcccgcagccgccagtctggttccagggctcccgcaggtttcgggggccgaggcggaccgacaggcgccagccaatcgcgagcacggagccggcctgggggcggggtggtacccgctccgccaatcgggtgggggcggagccagacgccgggggcggacgggaggaccggaggaccgaggacagaaagattggtggacaggagcagcggccggtggggagggcgctcggcggcggcctgcggccatggccaccgtgatggcagcgacggcggcggagcgggcggtgctggtaaggcgcgcgggccagcgggcgggccggcggggcggcggggccgggcgcgaccgccgggtctgtcccgcaggaggaggagttccgctggctgctgcacgacgaggtgcacgctgtgttgaagcagctgcaggacatcctcaaggtaacgacccgcgccctgccccgccgggcgtggcggccctccctcctcatttccctggctccacctggggccgcgcggctgcgtcctgagcgcctacagtgtgcggctgccgcggctttcaggcagggccccgcctccgcgaactcgagccgacctcattatataagtacctgtgtgcgggcaggggcgggtcccgacgagggtgctagcaagggcctgagtcccgcccggcctcgggtcggggaaggccgccttgggagcagcggcatccaatctgggagccgaagaattctgcctctgcctggcagtgtgacttcagccaagtcactgaacctccctgggcctcccttttctcattggcaaaagggagataacagtacccgcttcgcgaggctggggtgtagataaatgagccaggc

SEQ ID NO: 15232 - DNA, 2300 bp, Homo sapien
ggacaagtgtcagcaggattggcgtgtgggaaagctcttgagctgggcactggccccccggacgaggtggctgtgtgttcacacacacacacacacacacacacacacacacacacaggctctcgccccaggatagaagctgcccagaaactgctgcctggctttttttcttccgagcttgtcttatctcaaaccccttccagtcaaggaactagaatcagcaacgagagttggaagccttcccacagcttcccccagagcgaagaggctgtagtcatgtccccatcccccactggattccctacaaggagaggccttgggcccagatgagccagtacagactccagacagaggggcccttggggccctccaacctcaggtgatgagctgagaaagatgttcacgtctaagcgtccagtgtgcacccagcgctccatagacgcctttgtgaactgaaaagagactggcagagtcccgagaagatggggccctggctttccagggagtgcagcaagcagccggcctgcaggtgagcatggaggcccggccctcaccgcctcgaagccatgccccagatgccactgccacagcgggcgctcgctcctccctaggctgttttagtatttggatttgcattccatcccttgggagggagtcctcagggccactagtgatgagccaagaggagtgggggttgggggcgctcctttctgtttccgttaggccacagactcttcacctggctctgaagagccactcttacctcggtcccctcccagtggtcccaccttctccaccctgccctgccaagtcccctgcatgcccaccgctctccatcctccctcctctccctcttcctcccgtggagacagtatttctttctgtctgtccctttggcccagacccagcctgaccaacgatgagcatttcttaggctcagctcttgatacggaaacgagtgtcttcactccagccagcatcatggtcttcggtgcttcccgggcccggggtctgtcgggagggaagagaactgggcctgacctacctgaactgactggccctccgaggtgggtctgggacatcctagaggccctacatttgtccttggataggggaccggggggggcttggaatgttgcaaaaaaaaaagttacccaagggatgtcagttttttatccctctgcatgggttggattttccaaaatcataatttgcagaaggaaggccagcatttacgatgcaatatgtaattatatatagggtggccacactagggcggggtccttcccccctcacagctttggcccctttcagagattagaaactgggttagaggattgcagaagacgagtggggggagggcagggaagatgcctgtcgggtttttagcacagttcatttcactgggattttgaagcatttctgtctgaacacaaagcctgttctagtcctggcggaacacactgggggtgggggcgggggaagatgcggtaatgaaaccggttagtcaattttgtcttaatattgttgacaattctgtaaagttcctttttatgaatatttctgtttaagctatttcacctttcttttgaaatccttcccttttaaggagaaaatgtgacacttgtgaaaaagcttgtaagaaagcccctcccttttttctttaaacctttaaatgacaaatctaggtaattaaggttgtgaatttttatttttgctttgtttttaatgaacatttgtctttcagaataggattgtgtgataatgtttaaatggcaaaaacaaaacatgattttgtgcaattaacaaagctactgcaagaaaaataaaacacttcttggtaacacagctgtgccgcaggagtcctgcttccctcgtcctcggcgagatgggtgggaggagaaggcagcggcggggccggggtgggttttcgggacctccgcgtccggggtgagacggacttgggagtggcggcgaggtccgcggcagggttggaaccacgaccaatggagccaagcgggccaatagggaggaggagcggggacagactgtcctgccggccaatgagtgagcgcgagtggagcagagcgccctatcatatcctgggggcgccccgggagctccgcccccaagcgggcgccccaggctggtgccggccgcgtccctggccagccggagcaagcctgactcgtgcagccgccggccgcgtccctggccaggcggagcgagcctcactcccgcagccgccagtctggttccagggctcccgcaggtttcgggggccgaggcggaccgacagg

SEQ ID NO: 15233 - DNA, 2300 bp, Homo sapien
gttcaagaacatcctgggcaacatggtaaaaccccctctacaaaaaattagctgggcatggtggtgcacacctgtggtcccagctactcgggaggctgaggtgagagaaccgcttgagtcagtgaggcagaggttgcggtgaactgagactgcctctgcactccaggctgggtgacagactaagtctctgtctcaaaaacaaacaaaaaggaactgcctttggagttgggtaaagaaacatgtgagaaactgtttcaatgtgattgttatagttagaaggtaaatgaacctagttcttgcctgacttagttatagacctaggacagttgtctagggcaatttctgcaagaaattgcacctttatttaggtatgaaggcagaatgagatgccagtattacacattataagaagactgaactaaggatccttagaatattttcaaagcagctcagactccaggtaacacagaaagaaaggcgaagggagactcctggtgagtactactcactgatcttctgttccaaaaaatttcacaaagaagcatttctttccgcgaggtttcttcaagtcctttggtggattaacaatctggaggataaaaggggggaaaaaggttggctggcaacacagcagcccactttctagtggctccacattgctctacagttctacgttgctaagaaaaaagtaaattaaaaggacttacttacaaataaatttatttatatacaaaacagaacccaaggcctagtacttgtctaaatctcccatttttctattgaggtgtatggaaatgtgtagatattctagaagttcccaatatttaacatgtagcacagtgctcagtagacacaatatcccttttactgcagtggccctgttttacaagcagttaaaactaagatcaacagcatcccctgccccccaccaccccacccctgctccaatgtgaccccattattactgaaaaaatgcagacgacactctttgaaatacttcctgtgcaggaagggttgacacaggacatagtgaaaacaaaggacaaccgaggcacagaaaacaccatattgcaaagagaccatctaaagacacctcccgggctccaagcaagaatataaaaacacaacatttggaaagcaatgatggatcacctcatgcaaaatctggaatgccaacttctgcaaagaggcactggagtagcacatatggtaacatggaaagaagatttaaacttagttgggacaaaaatactttggcttttcactaacctacatttagactttcttcctggataatttatattttcttctccttttgttacatttaagcataaagctaaattcagactagaattatttccggggttaaaaaagaaacttcataaacctcctctaaatccagaaataagggtttagagaagatttaatgatctggtgtatactgcattgccttttaaaaaataaccgatactaggggaaaaaaaattctaagtgccatctgaatgagcccaatttaactcaatactagaaactgagaggaatgcatcttacattctccacctcttcaaacccaacttcagatctcttcctttagtagcaagacactcacctttcctggccaaggaggatatcggccgagtttccccctagagaaaacacaaagagtcaacacttgccctgcaaaagccagtccatctccttcaacccactcaatacgcaatttattttcctaaatctctgctggcatcctcaaatgccgaaacaaaagctttcatagctgggcccaacaccctcagaagtaaaatgcaaaattgtatacttatgtgcacaacgcatatccattcttctgttgacaaggaatacagaacaacacaactgtcaaaagtcacttgtctagagcttcttaatgacgggggtgggaggacagcttcctctgtaaacacagactttccctccctaagtctggtttaattcaacaggagacctgcctggctttgacaaatgctaatggaagccttcctctgggtggagaaacaagctacgcagctcgagggaggcggcgacaaagtcttggttcgggcggttgtctgggacacagaagcagaccgcgggaggcacccaagcgtgcactggtcactgccaagccatcggttgtaaaggagaagtccccccgccgtttcttcgcggggcaacgccagcagtccggtttagacaaccccggctgagccggccgcacaggtcggctgcatcgcaacctgggctttgaccgaatggcaccggccagatctcgcaggtccggt

SEQ ID NO: 15234 - DNA, 2300 bp, Homo sapien
aaatactttggcttttcactaacctacatttagactttcttcctggataatttatattttcttctccttttgttacatttaagcataaagctaaattcagactagaattatttccggggttaaaaaagaaacttcataaacctcctctaaatccagaaataagggtttagagaagatttaatgatctggtgtatactgcattgccttttaaaaaataaccgatactaggggaaaaaaaattctaagtgccatctgaatgagcccaatttaactcaatactagaaactgagaggaatgcatcttacattctccacctcttcaaacccaacttcagatctcttcctttagtagcaagacactcacctttcctggccaaggaggatatcggccgagtttccccctagagaaaacacaaagagtcaacacttgccctgcaaaagccagtccatctccttcaacccactcaatacgcaatttattttcctaaatctctgctggcatcctcaaatgccgaaacaaaagctttcatagctgggcccaacaccctcagaagtaaaatgcaaaattgtatacttatgtgcacaacgcatatccattcttctgttgacaaggaatacagaacaacacaactgtcaaaagtcacttgtctagagcttcttaatgacgggggtgggaggacagcttcctctgtaaacacagactttccctccctaagtctggtttaattcaacaggagacctgcctggctttgacaaatgctaatggaagccttcctctgggtggagaaacaagctacgcagctcgagggaggcggcgacaaagtcttggttcgggcggttgtctgggacacagaagcagaccgcgggaggcacccaagcgtgcactggtcactgccaagccatcggttgtaaaggagaagtccccccgccgtttcttcgcggggcaacgccagcagtccggtttagacaaccccggctgagccggccgcacaggtcggctgcatcgcaacctgggctttgaccgaatggcaccggccagatctcgcaggtccggtccccggcgcttctgctttctgggaagccccaacaagaccccggggaccggtcgtccggggaagcctcgcggcaccggcggctcccttcacgggggccgccagtatctgggccccgagtgcagaccccacccggccggcctcggggatcaaagccggtgcccgacgtggccaccctcggcctcggtcccccgggactggactgccccttccgcctggcgccgctcgcaagcgccggcaccttctcttcccctctctccgcgacctggagcgcataaaaaggcagctccagggccggcagcgaaccccgcgcccaggcgggtagctccccggcgcgtctcggttggcccggccgctcggactcaccacaccaagtcgccgagccgcagactcacagccgccatcttaccacccaaccaccgccgacgcacgggccgccgggaacagcaagtcgccccggcgccgcccattggagtgggcccgaccacgtgacgggggccggctgtcactggccacgccgctactctgacgtcaccgcgcccgccggggatcattggtcgaccgaggggcacgtgacgcgagcgccgcggtctccgcgcgccggagcgcagagactcccggctccttccccctcccttcggctcgtgacaacgaagcgcccgcggtctgaggcggcggcggcggcgacggtgcgaccggctgagcgcgagagggagccggcctcgcggctcgccccgcccccgggtcttggactccgcgcccctcccctctcggcgcttccgttacgcccgttggtccggcgcgggccccggggccattcccgagcccgaggcgctggtcggccccgtcgcagcgccagtgagctaccctgacggagctcggcgcggcctggaactcagcctccgccgggtctgggctcccgcgcccggcaactctgcttggccgcaggccgggaggccccggtgtccgcgcccgtccgctcccgccgcccgtgttctttggagcgctcctcccgacggccgctttcggaggcgccgtctgagcgcggggtcccgcgccgcaagttctcctggggcgaccggaggctgctcccccgaccccctggtgtccccggagtggctgcgcggacgtcgagttggcatttcttcgcttcctcctgggccggcgcgcggcgcggcacaccaggctcccctgggctcggggacccggccatgggccgaggcgcgggccgcccgcccgctgggagcca

SEQ ID NO: 15235 - DNA, 2300 bp, Homo sapien
actacgcccggcatctgtcttcctgttgtcacaactttttcaaaagtgcaaaactagggcaaggctaacgagagagcccggacccgacaacgacacgcacctttgtccccagcgccgacgcgggccgcagacgtccccccgcggcggtcctcatgccggtccccgggcggcggcgcagctagcggtcggctgctaagccgtggctcccagcgggcgggcggcccgcgcctcggcccatggccgggtccccgagcccaggggagcctggtgtgccgcgccgcgcgccggcccaggaggaagcgaagaaatgccaactcgacgtccgcgcagccactccggggacaccagggggtcgggggagcagcctccggtcgccccaggagaacttgcggcgcgggaccccgcgctcagacggcgcctccgaaagcggccgtcgggaggagcgctccaaagaacacgggcggcgggagcggacgggcgcggacaccggggcctcccggcctgcggccaagcagagttgccgggcgcgggagcccagacccggcggaggctgagttccaggccgcgccgagctccgtcagggtagctcactggcgctgcgacggggccgaccagcgcctcgggctcgggaatggccccggggcccgcgccggaccaacgggcgtaacggaagcgccgagaggggaggggcgcggagtccaagacccgggggcggggcgagccgcgaggccggctccctctcgcgctcagccggtcgcaccgtcgccgccgccgccgcctcagaccgcgggcgcttcgttgtcacgagccgaagggagggggaaggagccgggagtctctgcgctccggcgcgcggagaccgcggcgctcgcgtcacgtgcccctcggtcgaccaatgatccccggcgggcgcggtgacgtcagagtagcggcgtggccagtgacagccggcccccgtcacgtggtcgggcccactccaatgggcggcgccggggcgacttgctgttcccggcggcccgtgcgtcggcggtggttgggtggtaagatggcggctgtgagtctgcggctcggcgacttggtgtggtgagtccgagcggccgggccaaccgagacgcgccggggagctacccgcctgggcgcggggttcgctgccggccctggagctgcctttttatgcgctccaggtcgcggagagaggggaagagaaggtgccggcgcttgcgagcggcgccaggcggaaggggcagtccagtcccgggggaccgaggccgagggtggccacgtcgggcaccggctttgatccccgaggccggccgggtggggtctgcactcggggcccagatactggcggcccccgtgaagggagccgccggtgccgcgaggcttccccggacgaccggtccccggggtcttgttggggcttcccagaaagcagaagcgccggggaccggacctgcgagatctggccggtgccattcggtcaaagcccaggttgcgatgcagccgacctgtgcggccggctcagccggggttgtctaaaccggactgctggcgttgccccgcgaagaaacggcggggggacttctcctttacaaccgatggcttggcagtgaccagtgcacgcttgggtgcctcccgcggtctgcttctgtgtcccagacaaccgcccgaaccaagactttgtcgccgcctccctcgagctgcgtagcttgtttctccacccagaggaaggcttccattagcatttgtcaaagccaggcaggtctcctgttgaattaaaccagacttagggagggaaagtctgtgtttacagaggaagctgtcctcccacccccgtcattaagaagctctagacaagtgacttttgacagttgtgttgttctgtattccttgtcaacagaagaatggatatgcgttgtgcacataagtatacaattttgcattttacttctgagggtgttgggcccagctatgaaagcttttgtttcggcatttgaggatgccagcagagatttaggaaaataaattgcgtattgagtgggttgaaggagatggactggcttttgcagggcaagtgttgactctttgtgttttctctagggggaaactcggccgatatcctccttggccaggaaaggtgagtgtcttgctactaaaggaagagatctgaagttgggtttgaagaggtggagaatgtaagatgcattcctctcagtttctagtattgagttaaattgggctcattcagatggcacttagaattttttttcccctagtatcggttattttttaaaaggcaa

SEQ ID NO: 15236 - DNA, 2300 bp, Homo sapien
ctgaattcttattttaatgggttttttggtttttgtttttgttttcaaaataggcagacctatcatccacggaaatgagaattctgtcttcccttttccaaaaattgcatttcttatttttgtttcctgtcttactgcactggctagaactttcaggttttaggcaatatattcttattatctaatagtggtagaaatgtaccatgtttctgatgttaaggggaatgcctctaggttttggtgcaatgttcatttgagatttttttttcttttttctttttggcggggggacgagtctcgctcgctctgtcgcctagctggagtgcagtgacataatctcggctcacggcaacctccgcttcccgggttaagcgattctcctgcctcagcctcccaagtagctgggactacaggcatgcgccaccacgcccggctaattttgtatttttagtagagtactgggtttgaccgtgttggccaggctggtctcgaactcctgatctcaggtggtccacccgcctcggcatcccaaaatgctgggattacaggcttataccaccctgcccggccaagattcatgtttttatttaagttattaaaatctcattcaattcctcacaaattcagaatttttaaacaggaacttatgttaaatttttatcaaattattccctggaatcttaaatacgctttaaagatcactttgtcttaaaaatacacacgcagtaaatgacagtccgtgcagctaattcttggtacttcagggaaactgatctcccaagaaaaatcaggctgcgggacgacccagtacgctaaacaccgacttgcaaccgaaatctctaaccaccacaatgccttggggaaatgcgtgtcgactcgccacctttgccagctggcagtgactcaacaagagcccgacaccaagtctaagtcaatccttaacactgtggagtctgtgatcgggactgggatcttttgcaaaattgtgattctacctggtctgctgaagtttgggccgacgctgcgctcaactgcagttaacacttcccagttcatggttcagttttaaagtgtccaaactacgcccggcatctgtcttcctgttgtcacaactttttcaaaagtgcaaaactagggcaaggctaacgagagagcccggacccgacaacgacacgcacctttgtccccagcgccgacgcgggccgcagacgtccccccgcggcggtcctcatgccggtccccgggcggcggcgcagctagcggtcggctgctaagccgtggctcccagcgggcgggcggcccgcgcctcggcccatggccgggtccccgagcccaggggagcctggtgtgccgcgccgcgcgccggcccaggaggaagcgaagaaatgccaactcgacgtccgcgcagccactccggggacaccagggggtcgggggagcagcctccggtcgccccaggagaacttgcggcgcgggaccccgcgctcagacggcgcctccgaaagcggccgtcgggaggagcgctccaaagaacacgggcggcgggagcggacgggcgcggacaccggggcctcccggcctgcggccaagcagagttgccgggcgcgggagcccagacccggcggaggctgagttccaggccgcgccgagctccgtcagggtagctcactggcgctgcgacggggccgaccagcgcctcgggctcgggaatggccccggggcccgcgccggaccaacgggcgtaacggaagcgccgagaggggaggggcgcggagtccaagacccgggggcggggcgagccgcgaggccggctccctctcgcgctcagccggtcgcaccgtcgccgccgccgccgcctcagaccgcgggcgcttcgttgtcacgagccgaagggagggggaaggagccgggagtctctgcgctccggcgcgcggagaccgcggcgctcgcgtcacgtgcccctcggtcgaccaatgatccccggcgggcgcggtgacgtcagagtagcggcgtggccagtgacagccggcccccgtcacgtggtcgggcccactccaatgggcggcgccggggcgacttgctgttcccggcggcccgtgcgtcggcggtggttgggtggtaagatggcggctgtgagtctgcggctcggcgacttggtgtggtgagtccgagcggccgggccaaccgagacgcgccggggagctacccgcctgggcgcggggttcgctgccggccctggagctgcctttttatgcgctccaggtcgcggagagaggggaagagaaggtgccggcgcttgc

SEQ ID NO: 15237 - DNA, 2300 bp, Homo sapien
ccattgttaaatatattggattctcttaaatgtttcaaatggcttagtaacagcagaacattataatgattataaaacaaccccaaatctaagtggtaatagagtacagatttgactcactttatcctgtagtcctattttttaccttcttgggcctggagagtcacttaagcaactgaaaggagcagttttgccatctaggattgaagctgcagtctctcagacttggactgagataaggttatgtgtttactgcctggacagggggagtaggacctggttgccaattcaaggatgaccttcctgcatcccattggttaacttgctgattcccttcttatagtgagactgttccggttctatcagtgggggaatctgtaagccttcagctgggatttatttccacaacccagcgcatcacaaatatcctgagggccttggagatttcttttagggaaatctcctttaacatcttagtacgtgttgggagatggtcttttgcagcgccagcctgttacactgctaatcgttttgccgcctgattagaattattttaactcttcatttgtagatattttgttcccttatgtgatgttataagttgattttgtgatcataattcgacaaatgaatattggatatatacaaatacgtctacatgtatgtggatatatacgatatatgctaattttcctgaattaactcacatttgtgattgatttacaaccaaaatacagtgagtttttttgaaacctgccaaaataatacataggctggaatggcaaagtattatttataaagaaggataataaacatgagctttaactttgcaacattaaagtatgaaactttacaaaacagtgcaatactgattaaagaatctctaaataccgtattaatatgacacatggacttcagaaacaggccttagatatctgtgatgttgctttgcaatatatgccaaatcagcagaggaaggaaggattgtttagtgattgatgctggaagaaaccaagttacagcctctcctcatactttatagcatagcaaattcatctggggttaatgaagtaaatgtgaaaaaatatctataaatgaccatataggctgggctcagtggctcacacctgtaatcccagcaggagttcaaaaccagtctgggcaacatggcaaaacaacgtccctacaaaaaatacaaaaattagcacgcctgtagttccaactactagggaggctgaggtaggaggatcgctttagcttgggaggttgaggcctcagtgagctgagattgagtcactttattccagcctgggcaacagagtgagaccttgtctcaaaaaacaaaaaacctatatacacaagttcttctataagatctggttggagacgaacattctaggcataaaagaaatgggaggagtctcaaaggaaaagagcctagttttaactgcatacaaagttataatttccttggaaggagggtcgcttgaggttgtgagcttaagaccagcctgggcaacatagtgggtcagcatctctacaaaaaatagaaaaaattagccaggcatggtgggatatacctgtagtctcagctcctcgagaggttgaagtggtgagaggtttgcttgagcctgggaggttgaggctgaagtggctgtgattgggccactgctctctagcctggatataacagcgagaccctagctcaaaaaaaaaagaaaaaagttaacatttctttcatcatacctcactctaagcaacactaaacagcaaataacaaaacaagaagaagtacttataagagatatgacagattttgtatatctataatgtataataatttatgtataatatcaagagcgcttacaagtcaataagaaagtcacaatttattcaaccattccctgattgattgtcatttgattgtcattttggttgcttccatcatttttcttgtataaacaaggctgcaatgaatatctttatttattggtatggtagaaagttcacactagaatatgaactcttttaaaaagcaggacacaaaattgtatacgaagtaagcagaaaacatgtatggcatgtattagcatattcatattctgtgaacatttggaattctgtattcaaaatctattttgaccattcccaagtgattttgaaggtctttggcatgtcataatttgttattttgtcaaggccagtgtttgggtgtgagagtggtgcacagggcaggagtgtgtaactttgttaggaagtgagcctagccacaccctcctgagtcactggttctttactat

SEQ ID NO: 15238 - DNA, 2300 bp, Homo sapien
cccaggctggagtgcagtggcgtgatatgagctcactgcaacctccccttcccagtttcaagagattctcctgcctcagcttcccaagtagctgggactacaggcaggcgccaccacgcccagctaattttttatttttaggagagacggggtttcaccatgttggtcaggctggtcttgaactcctgacctcaggtgatccccctgcctcgacctctcaaagtactgggattacaggagtgagccaccgcgcccatccaagttaacatttttaatatgtgtcccctgccccgggacctgaaagctcccaaagagaaagccccttttgtgttgttcttttcccttttctcatccgtgtacaacaagcagagccaggcacactgaggctgtgagagtgatgggaaacatgtgttgaatgagtaaatgactccactgagcaatacatcctcccccagaaaaatgcacatttggacacacacattttgaaagcaactttagggctgggtgcagtggctcacacctgaaatcccagcactttgggaggccaaggtgggaggactgcttgagcccaggaattcaagaccagcttgggcaacacagcgagaccccatctctacaaaaaacatatataaatataaaggttttaaaaattagccaggcgtggtggtggacacctgtggatccagctactcgggaagctgaggtgggaggattgcttgagccccaaaagtcaaggctgcagtgagctatgattgtgccaatgcactccagcctgggcaactgagtctcaaagaagaaagaagaaagaaagcaagaaagcaagaaaggaaagagagaggaaggaaagaaggaaggcaggcaggcaggcacaactttaggaggaatcacacctctatttacgcctagtggtccattattggaacgtgacgcctgtgggagttatctcctactgctcaaggtcactgccaaggtatgatttatcaattcaaaaaattgcaacctcaggcataaatgggttaagcccacccatagaagccccattaagaataaggttggctgggcacggtggctaatatctgtaatcccagcactttgggaggctgtaggccggcagatcacttgagcacaggagttcaagaccagcctgggcaacatggtgaaactctgcctctacaaaaatttttaaaaattagccaggtgtggtggtgtgtgccatccgggcttcaggtcagattaggtttctgtctaagggcagcctcctccactggcacacagtctgggccaggacatgctggcagaattgtgcaacgtcgttgttctgagccgcaatcgagcagcttttatgaccagctatgaagcgctcttctagtgccagggcctggagttattgaagtttcaaaggagtttttgtccacccgagatggcaagcggagagcagattcaggccagggcactgcgctcagcgctttgcgtgcattacctgcagggacatccccacaggcctttcggatggggtggtggttatcaccgtttgacaaagaagtaaactgtggctgggagcagtaaaacaccttgcccaggagtgtcagccaacctgggggtggcagggcttgaactcaggccggcgccctcggcagttcagcccccttccctcaattgccaccatctgagtgcaattcgctagctactagggcacatgaatccgtgcgggtctctgccgcacctgtcttgcggggcccagctgggtgtccgccaaagcaccaggagcgccgagttccgcggtagcgcagaaccaggtgaaggcctcggccagaggcgcgccgggcccgaggagggtggggctgcgagcgctcgccccggcggcctttgcgccccagtgcctgcccggcctccggagtcccccggctgggggtgggcggcgtccggccaagacccagtgtccccacccccgcgtccaagccccgcccgcgcggtggcccctcctcgggaaggtaagcaccaccttctcggggagcggcccgcagagccagtggccggcgggcgccccgcccccagcgagtagggacccggagccactgccgcgccgcagtccgggctccccgcgccgccgctcgctcacctgcgctcccgcccgcccctcggtgcgcgcccggcccgccagccgccgccgcccgcaccccgagcgccaccatgaactcgctcttcaggaagagaaacaaaggcaaatacagccccactgtgcagacccggaggtgaggaggcgcccacagctccgctccgggacgctcttgcccctgtgg

SEQ ID NO: 15239 - DNA, 2300 bp, Homo sapien
ctgggcagagctgggcatttcctggatgagcccgggttaggacagtcatccctggatcccatgtcccccacctactcacccttgtgttactccaggagccatgggctatcatttgctgccaccttgcgacagggatgggaactttgtgtcccatttccgcccttgattacctaagccaagagtctgctgggcacctgctgcctgcctgccaggtccccagtaagatccttcccaacatgcgggcagctgaataaggcagccactgcccctgccctcagggagctcacagtctcctgagagagacctccaggaacccacagatatataaaacgaataaatgcaatattagaatgtgatgcaggctaggaagggaagagaggtgattttcacagggtgcagtgacatacttgaaatatatcaggggttgtccatctccctggccacctctgacttcccctgcttgaaggggtgaattcaccccacggtggcacgtagtaggtgctcagtaaatgttgaatgagtgaatacatggatgacagcactgtccagagccaatttcttgggtcttgtaggctaaacagatgaggagtggcaaggcaggacttctgggagcaaggttggtcccctgggagtcctgggagggctgaaaggggttaagtgtgagttaaaatgagagtgatggacaaatgtcactctcccaagggaggcccccttactccctgttttatttatttatttacttatttattttgagaccgagtcttgctttgttgcccaggctggagtgcagtggccaggtaacagctcactgcagctttgaacttctgggctcaagggatcctcctgcctcagcctcttgagtagctgggaccacaggcacgtgccaacacgcctggctaattttttttttttttttttgcgacggagctttgttcttcttgcccaggctggagtgcagtggcgcagtctcggctcactgcaacctccgcctccttgattcaagcgattctcctgcctcagcctcccgagtagctgagattacaggtatacgccaccatgcccggctaattttgtattttagtagagacggggtttcctcatattggccatgctgttctcgaactcctgacctcagctgatctgcctgccttggcctctcagtgtgctgggattacaggcgtgagccaccgcgccctgcctaaactaaaaaaaaatttttttgtagagataggttcttgctatgttacccagggtggtctccaactcctgggttcaagcggtcctcccgcttccgcctcctaaagtgtttggattacaggcgtgagacatggcgcccggcctcttacctgttttaaattgtcctttctctccgctggctccttgagcccctttcctgcttatttttctctcgttagagtttttcactacctcacacatcatatatttgccttatttattgagtgtctgtctccccaccgtagtataaactccacgagggcagggattcgtgcgtgtggctcaccggcggctctccagcgcctggacagggctgacccccagcaggcgctctgtgaaggtgtgcagagtgggcgaaggtgcatgcgcgggccgtggggcggggacaggtggaggagccagtcagacccaagtgcagcgggacgagggcgaggttaatctgagcaagaaaagcgtaaattctgcttatctacaaatgtaaacagtactgtcggccagacgcagggtccggggcgggtcggcccggactcagggtctgcttggaggcagagctagattagggcggggtcgtcctgtggcctaccattccccgaggctgagggccttggagggcggggccagtgaagggggaggggacttcctgaggtgtgaccaatctagagaaaggactgggctgagggcgtggtcaaacaagcgacatctaaaaataaggggcggggctagaaccagggggagttcgcctggggcggggccagagtggggcgggaccagttagggggcagggccaacctgggcggggccatggccggggacgtgggcgggaccaggtcaggggcggggccaggccaggatctccgctgtcccgggtcctggagctctctcggcccggcaggtttcgctcccgcccctccggccttccacagctgtcctggccgcagggtgttcaaggcgggacacaccaggctagagatccgcgatcgggccccgcctcaggtactgcgctccaggccaggcgggcgcgggtaagcgctcagctcccgagccaggcgggcttccagggcact

SEQ ID NO: 15240 - DNA, 2300 bp, Homo sapien
agcagtggagaaacaaggaagccaatgaagggccgtaacagggatcaagtggtagttgggctgggtatggcctggggattgagggccatagatggatttgagctctgttgggggatggtcatttctgttaaatgaaacagactgtttgcaaaggcttgtggggattgtattgtcagaaccctgtccagcttcagctctgacaacagggagattcctagggctgttaagttgtcccagctacactcaggccccaggaggttcctggggcatgagggggaatctagcagccaggttgggatggctagggagaaagagcctgactatctgcagttgcccctgctggtgagtgagcttcccaccttccccggatccaggtacctgtctgaggaggaggtgctggacactgagaacccatttgtgcagctgctgagtggggtcgtgtggctgattcgtaatggaagcatctacatcaacgagagccaagccacagagtgtgacgagacacaggagacaggttggatggggaggctgttggcaacaaccctctcgagaaccaggaccagtgggctgggcggagctgttcttaagtctttcaacaagtattgagcagctactttgtgcccagcactattctgggtactggggattcatggggaggaagataggcttatattgaatatataggacaaaaaatagttatagaatatgctgaaaagaattgataagtgctcagaaacaaaaataaagttaggggaaaggggagagatggggaccggagctgtgggtacaggaagagaaaagtgaagagaaaaaaatcttcatggacctgcaacatcggcgtggcccaggagcttgtttcaaagccccacaccctcagacctgcagaatcagaggcaaggcccaagagtctatgttttaacgggcctccatggtgactctgaccgacactcaaggttgagaaccactgggatgcagaatactgggatggggacaggataccatgaccattttagagtgggcagtaagctaggtgtggtggctaacacctataatcccagcactttgggaggccgaggcgggaggatcggttgagcccaggagttcaagacctgcctgggcaacatagtgagacctatctctacaaaaaaaaaaaatacaaaaattagccaggcatggtggtgtgtgcctgtagtcccagctacttgggaggctgaagcatgagaattgcttgaacctgggaggtggaggttgcagtgagctgagatcatgccactgcactccagcccgggcaacacagcgagactctttgtctcaaaaaaaaaaaaagagtgggcggtcaaggaaggcctcactaaggaggtgatctgacaaaggagcaagctagagaaaagcacagttcccagccagagggaacaggaagtgcaaagtggctgcagggtggtgaggggacacccaggagctgaggcaggaggaggaagaggctggggagggcatgctggctctttggattttgttctaagaacaggggaaaccattagagggtcttcacctggaggctggcatagcttggtttacctgtaagaagagaccccccggctgccctggggagactgggatgtgcagaggggaggcagggagacgagcaaggaggctgctgtgcttcccagggaggtaccaggtagctcagaccagtgggaagtggagttaggcaagaagcaggaggcctcccaaggggcggtgatcagccaggctgcttttccttcaggttcctttagcaaatttgtgaatgtgatatcagccaggacggccattggccacgaccggaaagggcagctggtgctctttcatgcagacggccaaacggagcagcgtgggtgagtcctgggagctgaggccccccggccggggctcagtcctgctaggaggaacgttgacccaatgacagccaccctctgactctacctgctttctgggatgttgacacctatctgtcccccctcccagggccccctcaccttcccacaggatgagggttctgagatctttgccgattccaagaactcatcatcttcagctttaggcctcacctttcctgaaccctagataggatacaaggaaatggtcacaaagtgagcagggagaagatcttggttccaatcccagcttagccatcgatgacttgtctacccacctatgccgtagacaagtccctcggcctccctgagcctcatttctagcccctgtaaagagagtgttttggtttgctctggttgcataaccagcacaaatttagcaacact

SEQ ID NO: 15241 - DNA, 2300 bp, Homo sapien
ctccccatgaatccccagtacccagaatagtgctgggcacaaagtagctgctcaatacttgttgaaagacttaagaacagctccgcccagcccactggtcctggttctcgagagggttgttgccaacagcctccccatccaacctgtctcctgtgtctcgtcacactctgtggcttggctctcgttgatgtagatgcttccattacgaatcagccacacgaccccactcagcagctgcacaaatgggttctcagtgtccagcacctcctcctcagacaggtacctggatccggggaaggtgggaagctcactcaccagcaggggcaactgcagatagtcaggctctttctccctagccatcccaacctggctgctagattccccctcatgccccaggaacctcctggggcctgagtgtagctgggacaacttaacagccctaggaatctccctgttgtcagagctgaagctggacagggttctgacaatacaatccccacaagcctttgcaaacagtctgtttcatttaacagaaatgaccatcccccaacagagctcaaatccatctatggccctcaatccccaggccatacccagcccaactaccacttgatccctgttacggcccttcattggcttccttgtttctccactgctctctcccacctggtcccactcaggatcagaacaagctttatcatcaacaaatactttttttttgagactcaaataatttttaagataattttaaataattcaaatcatcaatcttgccagggcgtggtggctcacacctgtcatcccagcactttgggaggctgaggtgggtggatcacttgaggtcaggagttcgagaccggccaggccaatatggtgaacccactcccccgttccccaccccatcccgtctctactaaaaatacaaaaatcagccgggcgtggtggcacacgtccgtagtcccagctactccagaggctgaggcaggagaatcgcttgaacccgggaggcagaggttgcagtgagccggtatcatgccactgccctccatcctgggcaacagagcaagactctgtctcaaaaaaaaaaaaatcatcagtcttgatgagttgatgtttctgacaccccactcctttttcagtccctcatacacacaagcccccctgagcctctgagcctttgtgcgtggggttcctttggactgaaacgctcttcctccagttctgaccttggctcacttagtgattcatcttcaagttcccactcaaaggtcacctcggagaggcgtgttccagatcaccctccctaaaatcaacactatttacaacgggttcaccccgttggttgctttgctgcacacacagcaatcagaatgtatgttagctatttacccggcttttgttgatttttctagtaatgggggagggctgttaaggcaaagactgtgttgttcacggctatctcaccggggcgcggcacattgcctgatacaagcaagtgctcaatgatactggatgatgaataaactctgcaaggaagcgattcctatccccattctgcagaggaggaaacaggggctcagcttggttaagtgacttgaacacggaggcacggctacaacccaaatctcaggccctctgccctcgacagcacggggctccctgcctcctcacccggtgaccagggtcccgtcgcggcggatcccgaactgcgcgttctgcagccccccggagctgctcacccgccgctcgtcgctcaccacgttccccaggcactcgcccgagttcatgcggaagaagccgccgttctgggcgacacggcagtcggccgcccgcgccgtctcctccacggtggcgcgtcgtctcgccgcgcagccgccgggtccaccgggctccagcaccgagaaggtgcgcaggggctcaacggcccgcgtcaggtggccggccaccgcgcggtccctgaagtgcgacacgaaggtgcgcacggccagaccgccggcgccgggagtcgcgggaggcggaggccaactctcgtgctcgcggttgccggcgcgcacccgtgtgcagtcccgggggaggcgcgcgcgcgcgcgtggatagggcagtagcaagtcgtcgtcgcgggaggccctgcggggacgggcggccgtgagctcagggggctgtcctcgtgagctcggaggacaggggggaccccccgaaccaggctggcccagggagctgcactcaccccgagtcgaggccgccggacgcttcccagaggaagccgaatagtgcaagccggaggagaagccagcgacccg

SEQ ID NO: 15242 - DNA, 2300 bp, Homo sapien
gggcccaccctactccagaatgacctcatcttaactaattacatctgcaaagacccaatttccaaacaagttcacattctgaggttctggtaaggacatgagtttggggggacactctctaactgagttcactaaccctcaccgtggactggctcaaaggagcagtggctcaaagaggggcctgagatcaagcaccagaagtgctgactgtggatgaaaaggggctggcctggcccctatctgtgtccccccatacctgtggtagtgagggagaaggaaaagaaaaatccgttggggaaaattctgacctcagaagtggcctgcctgaaaagtcatagaaactggcaaaaataaagcaacctgggaaaaaactcaggctggacctgcacggagataagcagacagggtccagcgcagaagccctttgttctttgcataattagcaggctcccgggaaaaagtttcctctccttttcaggcatatacacagtgggctccatggaaaccggcacagggaggagggggccttatctaaaacaaacccacagttacacaaacaagagaagcagcgatttgcacttgcctagagacatacccacagctgcataacataaggggagctgcacaggcagttttactggtaagaagttactcagttaccaggaggagagcagtgtcctataaaagttttttgcggccaggcacagtggctcacgcctgtaatcccagcactttgggaggcggaaggaggcggatcacctgaggtcaggagtttgaaaccagcctggccaacatggtaaaatttcgtctctacccaaaatacaaaaattagcagggcgcagtgacgtgtgcctgtaatcccagctactcgggaggctgaggcaggagaatcatttgaacccaggaggcagaggttgttgaggttgcagtgagccaagatcgcaccattgcactccagcctgggtgacaagagcaaaactctgtcttaaaaaaaaaaaaaaaaaaagctttttgcattcagctgtaacccgacaatccactcggactcccgtctccactttggagagctttcttctttcccttattaaacgttcgctccaaccccacccttgtgtccacgctccttagttttcttggaggtaggacaaagaaccccgggactagttcagacaaggagaaactgctatattaaggtgcactggcaagaccgcaacagtatcaagccaattagacttgccgtggctcctggaatggcccacgcactgcactggcaccaagacaccacccaaccctggacactgcactgggacaggaggcctgaagagaagaatcctctcaaaggaagcttgaagtacatgctacaaaataaactggcttctatactcagggccagcttcatgggctcactcagaaggtccctggcttgctgcaaccatttgctctgaccatcttgaaattcttaatagttttctgggttttttagtaagtgtccccacgttttcattttgcattgagtcacacaaatcatgtagctgggctgtcttcaaaaatgtcaaggtagtaaaagacaaaaggctgaggagccttccagatgaagagatcaaagagacatgacaactaaaagcaactcctgggttacagggtcaggggcggacaaaaaggaaaagaaaaaaaaagacattagagggacaattgaaggttagctgtggatgacatcacagaaatgtcaatgggagttgtcctaatgatatttgccctgtggttaagaaaatgcccttgttcttaggagattcatggcgaggtatggggtaaaggatcatgacatctgcaatttggttgccattggttcaggaaaaaaaaaaaacaaagtacaaatgattgagtaaatcaggcaagcctaaaccactgctaaacatgaataacagttctacgagagttctttatgctctccttgcaacttcctgtaggtttgagattacctggagataaaaagttaacatcaccagcaccgcccgccagcccgccagccgaaaagagcgcaggtaattcagtccgagctgaaagcggccaccctgggacttgagtcacgtgaggcgagcccacatgacccgaggccccggtccaatatggcgacctccacgggtcgctggcttctcctccggcttgcactattcggcttcctctgggaagcgtccggcggcctcgactcggggtgagtgcagctccctgggccagcctggttcggggggtcccccctgtcctccgagctcacgaggacagccccctgagctcacggccgc

SEQ ID NO: 15243 - DNA, 2300 bp, Homo sapien
gatgaaccttgaaaacatcacgctgagtgagagaagccagacacaaaaagccacgcattgtatgattccatttatatgaaatatccaccgtaggtcaaaccatagacacagaaagttgattcatggttggtaggggctggggaggagggaatagggagtttctgcaaatgggtatgggatttcttttcagggtggcaaaaacattctggagatagatagtgatggctgcacaactttgtgaatatactaaaaaccactgtgaaactgtacacatttaaaaggtgaattttatggtatgtgaataatatctcaataagcctcttactaaagatttttcaggattaaaacgtctaaaaacactccgggggtagaaaaaagaacaatgacgaaattaaaaggtggagaagccctaacctagcatctgcacatagggagcatcacatacacactttagtggtgttcttttgattattattacagatctgtaatctgtttgctgaagcccttgggaccaagtatgtttctgaattcaaaattgttgggattttagaaagataatgtggtgcacatacatacaacagccccagcaaggtttgggacagcacccaggaaaccaacattaacatttctgcaaggaaacagatgcgcattcacactgaatgaaaccaataaggacgctaggtcctcactctctgctgtggtttgaatgtgtgccctaaagttcgtatgttggaaccttaattctcaatgcaacagtgttgagagatggaatctttcatgaggcctctgccctcatgaatggattcatgctgttattgcaaaagcgtgtacctgataaaggaatgagtttagcttctttctcttctctctctccagctctcgtgcccttctgccctccaccgtgggatgatatagcaagaagacccccaccagatgcaaccccttgaacctggacttcccagcctccagaactatgagccaaatgaatttcttttctttataaattactcagtctcaggtattctgttgtagtagcacaaaactaagacactgcccagtataccagctacatgtgactatcaagcccctgaaatatggatagtctgaattgaaatgtgcttagcctggcatggtggcttacatctggagtgccagctccttgggaggctaaagcgcgagggtcccttgagcctaggagctcgagactgcagtgaactatgaccacatcactgcactccagcctgggcaacagaatgagaccctgtctcttaaaaataaaataacaaaataaaacaattgtgttgtgaacataaactactcatcaatttcaaagacttagtatgacaaaaataaaaacaaatcatttctatattgattacagatgtaattataatattttaaataactgggtcaaataaactagatcgttaaaattaacttcacctgcttattgctgctttcttagatgtggctactaggaaatttcgaaatgcacacatggctcatctttgtagctccaattctatttcaattggacggtgcccctttaaggaagtttgcctcagttcaaggcagacgtgccctcaaatgagtttgtttcaaatttatttaaaacaaagcctgggtgtggtggctccagcctgtaatcccagcactttgggagcccaaagaaggtggctcgcttgaggccagcggttcaagaccagcctgatcaacatagtgagaccctgtctctattaaaaaaagctacaaaaattaggcaacatggtggcacatgccgattgtcccagctattcaggaggctgaggcaagaggatctattgagcccaggaggtcaaggctacagtgagctgtgatcaaaccactgcactccagcctaggcaagagaatgagaccctatttcaaaaaacaaagaaaaaaaaattcgttttgctttcagagcttttggatttctgggttgaattgcaattgctagatcaaagatctagcctgtgagcctggagaatcagggctgagaaggacagggcgggcagccctctccccagcatcccgtggacagcaggctctacgcccaggactggcctaacctccgctgcctaaccgtcatccccctgcagccacccttcccagagtcctttgcccaggccaccccaggcttcttggcagccctgccgggccacttgtcttcatgtctgccagggggaggtgggaaggaggtgggaggagggcgtgcagaggcagtctgggcttggccagagctcagggtgctgagcgtgtgaccagcagtgagcagaggccgg

SEQ ID NO: 15244 - DNA, 2300 bp, Homo sapien
ttatacataaaaagggtaaggatgttttgctccccaagagccatttttgcccccttgggagcaccactgggaacagaggttctaggggaagcttgtcattgtcattacttctgttaatccttgatcacccctcaagtgggtgctcagtcaacttgaacaaaatctgaggctccaagggagattgagtgacttatccatatatcctcttgattgttggaaagactggatctcatgtggaatggatgccaagtgagaaagccggacaggtgggctggcccagctatgaaaccgcccccctgctggggatggctccgtcccctctctccaggagacaccacggcaactccctccccgacggaggttcacctaccagagggaggcatctacttttggtttgtcatcaccatagtctttatcctcttagctcatcagagcaggacaggctctcaaagacttgaagttcccctcccttaattcacagacgaagaaagcaaattgatggggagtgactcgcccgaggtggagcaggaaagccaggagtcctgaggctgaggtcccagatccctacctgtcccattacagagcgtcgacagagttgggcaggcgatgtgtcacaggcctccaccccagcacacgcaacctggaggcaggggcctcgctgggaactggaggataaatgccgctgccagcatgtttgtatgcccatccctgctgtctgcagatacttactcgtccttcctttccttctgaaagctcgggtttcaaggtctggcttaaggcgtgagctgtcccttctgaatccatagaaagggagtgatggggcaattgtgaaaagcagatgcaaagtgtgccaagccctgagctgagcccagggacactggggagccacatccatgtgggctaccctgtcccgtgggtgctgcctgtggtcctcatcaggggaggagtcttgtttgtttgttgaatacggtctgggtggtggctctccaggttctgcggcagctcccaagtggaggcaatggggtagcatcaccagtgagctcttggtgtttctctgcaagggaccgctttcaaagaaaaaaggtcatgatacggtttggctgtgtccccacccaaatctcatcttgaattcccatgtgttgtgtggaagggacccagtgggaggtaactgaatcatggggtcaggtgtttcccgtgccgttctcgtgatagtgaataagcctcacgagacctgattgttttataaaaaggagttttcctgcagaagctctctttttgcctgctgccatctatgtaagaggtgacttgctcctccttgccttctgccatgatggtgaggccttcccagccatgtggacctgtaagtccatgaaacctctttcttatgtaaagtgctcagtctcgggtatgtctttatcagcagcatgaaaacggactaatacaggccatcgcagagacacacattaaactctcactatggctactttgggaggtgaaattggagggtcactgtggaaatttcctttctagccattgatacttaagcaaaatcatgatggtgtttacttccttgtttgtccttccccctctctaccttttaaatgttttattaagtgtgatgtacaccctggaaaatgggcaggtaatctgctgcttgaggtaccgccccaaatgcagcacacccacattaccagcaccagatccagaagcagaacccaccagcccctaacttctaacagcgaggactggtttttatttacatagacggaactctacaattcgtactcgtcagcatctggctcctttatcaatgttaggatgaaatttatccaaattcttgtgtcactatattttgaaattatctttgaatcctgaagagagttcttagatcccaatacagtaacagctttactttagtcggggaaatacactggtgtgtagggaatctggtgtatgtgcgtgtgtcctactactactaattcttggccccgaggggctcctgggggttccccgggcccctgttagggaaccgcgtccacttctcgccctctcggcccacttcggaggctcggtctgcggctgcgcacagcgcgaggaagcgcggtcacgtgactgctgcgggccagccaagatggcggcctcatgcttggtcctgctggcgctgtgtctgctgctgccgctgctgctgctgggaggatggaagcgctggcgccgggggcgggcggcccggcatgtagtagcggtggtgctgggcgacgtgggccgcagcccccgtatgcagtaccacgcgctgtcgttgg

SEQ ID NO: 15245 - DNA, 2300 bp, Homo sapien
tcaaaacagcaaaagcaaagcagtgcccctggcccagttctgaagccaaccttccttaagcacccagacccatccctggttaggacttgctgtggattatcaggtgactctatctcaggatacagggactgagagggtgtatgcaatatctcagacccagaaactgttgattctgtctaaaaacacagcaataaccacatcccaccctcttgatttaaatgaaagtgtttgggggaataaaagatgaacctttttttttttctttgtcagatcttgagctcatttggttctggtggggaacaacagctatgcgagaacaagtgtattctattagaattaattcccctcttattctcatagctgagcagggctcaagagcctctcatctgaaagaggtaataagatttaatctgtctcctcatctaccttctgcaagtatactttacaaattagctctcgggactcttccaaatggagttttatgagggatttgctaaggtaaacgttttagactttgaacacagttcagatttcaggggcagtactgaaatctgaactgtgttgctaactgccctgcctttcaactcaagacacaataactttgaactaaattaattatatttttgttgttttccactctgtccccacgtctatatcaccaccacccccaatcccaccccgcaggagctaactcctccttcctgtccctgcaagatcaaaactcctcctgcaagccccgctagctctgtctgctcgccttcgtggcagatatcgctattgtacttttatactcatttgtgtgataaatacttcaatgtccacttcttccacgagcccctgagcccctggagggcctggaccacacctagtttttctcaccgttacatctcccttgtcaggtacctggtaggcgcttaataagtatttggtgaacgaatggcttgtttggtgacagtccaaaggctgggggacagagggaaagctccctcctttcggaccccagacgggtggcgctgatggagaggaggcttggataaggcctccaggaccgaagcgcgcacccgtagggcccctgccaaaaagaccttcctgaaggcggaggaactgcgagagtgcctacgttggcccaaggcctgacccgacgatcccagggaccctcgccctaaccggccccgcctcccggtccccaaacccggactcggccccgccctaagctccggatcctggggcccgcccctggccccgcgtcggcagaccgtggcctcgctgctgggcctgcctcaaaccctccacaggtaacgcctcccgaacttgagccacattccgatcccctcctcaaacccctccccgtttcccacgccctggacccctcgctccgtctcggccccgccccaagcccagctaggtctcggcccctgagcccagccccgaccggcctcccagtccctgggtccctcccgacaccggcccctccctaagctccgcctcccagggcccgcctcctgagcgcagcccgcagcccggactcggccccgcctcccggaccctgggcccctccccacgtcggcccgtcctaagctccgcctcccagagtccgagcaccgcctggccatgtgctacgacatagtcaacgccccgccccggccccgcctcctgagctcttctctgggtctggccttagcgccgccctaagacctgtctcctgggctctgctccgagtctcgcctcctgaacccaatggcgtttatccctgccctaatgcccgcctccaggactcttatcctgcccccacgcaaggccccgcctccaggacgccaccaacctggacgcttctgaagcccagcttccaggatcgccctatcctggccccgccccaggacccgccaacctggactctacccaggacctgccccctacccaggacctgccccaacgacgcttatcctggccccaccccaggccccgccctcataacaatcatcctggccccgccctagagtccgcccccacgacgttcctcctgacccccgggggacccccgggccccgccccctctctgcccccgctcactgccctgggcccgccccctcttcagtccaggccgggcttccgcccggtctgccggcaacgctgcggccccgcccacgtcatggcgcccgaggagaacgcggggaccgaactcttgctgcagagtttcgagcgccgcttcctggcggcacgcacactgcgctccttcccctggcaggtgggcggcggggcgagcggagaggcccgcggggctcgcgggagtccaggggcag

SEQ ID NO: 15246 - DNA, 2300 bp, Homo sapien
aaaaaaaaacacaaaaaccaaaacaaaaaaaaccttccccgccacgctcttcatgctctttctccctctgctggctgaatatcgaccaagggcaagcttggcagctatgcagtaatgatggcagagtctcagtcaacttggttcttaattttaggtctcaatgaatctgaagaatgcaatacagaactcccccatcctttgccaaccagaaacatctgaattaaatcattagtaaatttctattgtgttaagaataacattaaatcattggtaaatttctattgtgttaagataatacagttaagggctttatcctttacatcatcttgtagaacccttatattttttatacaaatgtaacgtgcttagcccagtttctgcatgcaataaacactcagtacctgttagctgtattattgagaagtccacctttcccacgaagctggccaatttgccaagatccctggcaagtaacatctccattgatttcatggggtctctttggctcaaagaattaggtataagcctttctgctgtgataagtaatgaagtacaaattgaggaaattagttatcaattagtcattcgatggctggaaaggcaggcagcaggcataaatggtgccagattagttaagccacgataaattttattgctccagaaggaatgggtctttattcattactcctcaaatttatctttattattggcccctggatgtgagacaaggcctggatggagaaggaggtaagaaaccagcctgggcatttgggagatgtgacaaactccaccgcaaaggtgatccctgaagaaaccaggtctaagcaagaagaaaaacggtatccatcttttctcactgccatgtctgtagcttttccagttttgctaggttaagtcctacagtttgcttgcccttttcctattaattatcacaccacactacaaccccacggcatttcatatgtccatacactgcaggaggtggtgcagggtttttttttttttttttttttttttgcttatgtggaagatgtaagaagggggttcacagaaatcaaataatacccactaaaggggaaggcatggaaccttctggtttgtaagtccctgaggcaccacctgtagctttgtatctctcctagtgcctgacttagaaggcactgggagagacaggagaatcacctgcttaagaatttctcatggctttccactgcagcaaatatgaaatccaaactttcaccatgacctctgaggtcttttcaaactgtgatgtctgcctgctcctttacttcatctcctacttccctctcttcattatgccctcagctccaaaaggaattagaggccgggtgcaagagctcacgcctgtaattccagcactttgggaggccgaggcaggcggatcacctgaggtcaggagttcgagaccagcctgaccaacatggtgaaaccccatgtctactaaatacaaaaaattagctgcgcatggagatgcatgcctgtaatcccagctacttcggaggccgagtcaggagaatcgcttgaacctggtaggcggaggctgcagtgagccaaaattgcacctttgtactctagcctaggcaacaagagtgaaacactgtctcaagaaaaaataaacaaacaaacaaaagtaattagatggaagttgatcaaatagatgcccatggggaagtggtcgtcttttgtgaccaaccaaggccctttaagtcacagcttagggctactgctttggtctacctaacactcaacagccacatgccatcaattgattcaggaagatcagtgtgaaccaataaaatggggatccttcctggtctcccagtcttggcctcacccaatctgtccctcactcagttgccagaattgtggggaaaagcaagagagatcagattgttactgtgtctgtgtagaaagaagtagacataggagactccattttgttatgtactaagaaaaattcttctgccttgagattctgttaatctataaccttacccccaaccccgtgctctctgaaacgtgtgctgtgtcaactcagagttgaatggattaagggcggtgcaggatgtgctttgttaaacagatgcttgaaggcagcatgctccttaagagtcatcaccactccctaatctcaagtacccagggacacaaaaactgcggaaggccgcagggacctctgcctaggaaagccaggtattgtccaaggtttctccccatgtgatagtctgaaatatggcctcgtgggaagggaaagacctgaccgtcccccagcccgacac

SEQ ID NO: 15247 - DNA, 2300 bp, Homo sapien
tgacactcatcactaatctatctaagcctatttctactctacaataaataaatcagagcagactcaagctgaacttgattttcagatagatgaatatgttttatttccaatggtaaatatatatatgtattaaaaataatcaaagggcccagcaattacccattttaatgtaacaacagctgatgttactgccttgaatgattgcattcatttgttcctttctggaataaaaaatgaaggagaatagacaaacaattcctgttggtgaatttgcacaaaacagtatattccaacagaatttcccgttaactgccatttatttcttctatcattattgataatttgcttttaaattgagaatacctcttttacaacccatctcatctccctgcatggctagacaattacatttaaattcggcggttttcccattgtgaacagtttctgggggaaatgattatgatgttaccaacccagatttatggtttcattttgctatcactgaaggatgagactagtataaagaaaaaaaaattgcttacatacaaatatattattatcaaagagaatcctaaggaaacatatggtaaaaatcaacccaaattgcaaaatcgctgggaccaatgataaagatatctttctggattttgcaaacttactttttcaaatgatgattaaatattgcgtgctttaaaaagtaatatagttataggcagaagttccctttcttttattctgaggttgaaagaaaccgcagcccgataggattgcaagaggaacccttaaggaatctgctccttgatgggcgctaggaaatacacgtacatctagtacaaaggaatgcacatcacatggccccctgttttggaaagcttacagcatttcttataagaggatccatggtataagtgcaaacacagtcacatcacaggatgggaaaatgaacaggcgcctcagatcaagtgctcaaggctggaatctggccttgtccaatgccacctgcccttcagaaggcagggtggtgccacataaaatgaggtagactgcctggggagtcctggttccttgccagctatgtgaccttgaacaaattacaactcactgaacctcagactgactttattgtacaacaaaaccccctggaatatttgtggaaaaaagaggaagggagaaaggaaggaagggaggaaaggaggaaggaagaaagggagggaggaaggaagggagggagggaaaggaaaaggtaggggaagagcagagtttctcactccagtccagagtgggacccaggaagggagaaatattgctttaatctctctaagcatctgtgaaatggataaacctccagtatctacttccagttgttgaaaagactccatgtaaagtgcttaaaacagcatctggtggaaagtaaatgcttattaagtgctagtgtgtattaaggcgtcatggggcttctggctgtaagacatctgctaggaggacaatccctagaccccttcagcgtccattgcgggagtaggtggccaggaagggggcaggacaggagaggcccagctgtgcggggtgggggcgtcccaggccagccgcacccaccccagccctgcatcccatccagcctggagaactttttgaatcttggatagggctcgatctctgcctggccggaagatttgaagacttgccagaaaacttcctcagagaagaaatggactggggcaagaagctgcctccacttggcgtctctagtgggggatttgtctactttgattggggttgggaggagggcgctggtgctcaatgagtgagcccacctggggactaccaggacgaggacgggcgcaggtgaaagtcctgggctcattgccccagcatccaactttcaccctctgtcccctttaggccaggagaccagggtaccgggtcgcgtgtccgccgccgccgcccgctggaatccagggctgcacgcgtgaccgcggcggcggcggcgctggcgaggggaagggggagggggcgctccctcgcgcaccagattatttttggctccgcagccggggctgctcgctgcttgtcgcgcgctcacacacacacagacacacacgcacacacacacatgcacacattttctcgcgctctctccggctctcctttgtttattttctaatctatatttttactggaagatttcctctttattctctcccgccctcctacaagcgctcttgctggccgtctgggtgcacacaccgctccctcgatcaccccagcccccttcctggtctcccgagcgcggggtttga

SEQ ID NO: 15248 - DNA, 2300 bp, Homo sapien
aatctgctccttgatgggcgctaggaaatacacgtacatctagtacaaaggaatgcacatcacatggccccctgttttggaaagcttacagcatttcttataagaggatccatggtataagtgcaaacacagtcacatcacaggatgggaaaatgaacaggcgcctcagatcaagtgctcaaggctggaatctggccttgtccaatgccacctgcccttcagaaggcagggtggtgccacataaaatgaggtagactgcctggggagtcctggttccttgccagctatgtgaccttgaacaaattacaactcactgaacctcagactgactttattgtacaacaaaaccccctggaatatttgtggaaaaaagaggaagggagaaaggaaggaagggaggaaaggaggaaggaagaaagggagggaggaaggaagggagggagggaaaggaaaaggtaggggaagagcagagtttctcactccagtccagagtgggacccaggaagggagaaatattgctttaatctctctaagcatctgtgaaatggataaacctccagtatctacttccagttgttgaaaagactccatgtaaagtgcttaaaacagcatctggtggaaagtaaatgcttattaagtgctagtgtgtattaaggcgtcatggggcttctggctgtaagacatctgctaggaggacaatccctagaccccttcagcgtccattgcgggagtaggtggccaggaagggggcaggacaggagaggcccagctgtgcggggtgggggcgtcccaggccagccgcacccaccccagccctgcatcccatccagcctggagaactttttgaatcttggatagggctcgatctctgcctggccggaagatttgaagacttgccagaaaacttcctcagagaagaaatggactggggcaagaagctgcctccacttggcgtctctagtgggggatttgtctactttgattggggttgggaggagggcgctggtgctcaatgagtgagcccacctggggactaccaggacgaggacgggcgcaggtgaaagtcctgggctcattgccccagcatccaactttcaccctctgtcccctttaggccaggagaccagggtaccgggtcgcgtgtccgccgccgccgcccgctggaatccagggctgcacgcgtgaccgcggcggcggcggcgctggcgaggggaagggggagggggcgctccctcgcgcaccagattatttttggctccgcagccggggctgctcgctgcttgtcgcgcgctcacacacacacagacacacacgcacacacacacatgcacacattttctcgcgctctctccggctctcctttgtttattttctaatctatatttttactggaagatttcctctttattctctcccgccctcctacaagcgctcttgctggccgtctgggtgcacacaccgctccctcgatcaccccagcccccttcctggtctcccgagcgcggggtttgaaggtcacctcctttccagtccccgtgcgagccgcgctgccgccgcctcctccagccagagtcggtgggactggctgcgctgccctgaagtggttctccaagcagcgcggagggtggcggacggcggacggagcccaggggccgcgtcgggtggggaaacccgaactcgcggaggggaatccctccccctccgccccagccccccagcagcacccgcggtggggcgggggcgctctgccagccccgggaacagcagaggcggcggcactggctggacccacgcgcgcgcctccggggctgaagaaggaaggagtgagccgagccgagcaccccacatctggaggggacagccagccgtgggccccgccccggcgtccggagcaggagaactccgagcttcttgcccaggcagagagagcaggagcggaccgcgcgcccgggattgagagtccttgcgctccagacccccacccagtggccgccagggtccccgcctgtccggaccctcgccgcgcccaggcaggcgcgccagggcggggctgacctgcccgcgaagttgcggacagtgcgtgagaaaccagcacccccttccgccgcctccagcttatggtgagtgtggctgggggtgcagagagcgcacgggaattcgggggtctggggccgagaacgtgaccgcagccgggctcgccgggagttctaggtaagtccaggcggagtcattgcctctgcacccaccctgacctggtgggtcaggtccagaaggtctcatggagggaagcgctaggtccc

SEQ ID NO: 15249 - DNA, 2300 bp, Homo sapien
catccagatgggaacccggaggcgcatctcacagcggaccgttgattaacccaaggtcacctggctctggtttctgacggagcgagaatgagtacccagaggtttccagaacctcagcacaaagggtatccatgatgaacaggcatttccctatcccttctctctcctgtcccctgcataaacaatgcaaaaaacacactcccttcttggccaggacccaaagacctattatcctacacatgtctttctgtgctttgagggatcagcaggggtgccagtgaacttggattactctttggatcaccctgctgcctccagctccccctctgttttgtttcatgactcagtcatcctgtttgagctcatttaccacttgtataggggtacattccttgacttctcagagcaaaccaagcccccatccatgatttcttcttcttttacaatgagctctcatatcacatttatcccagtggaaatttcatatcaatatctgtgattctttgactgttctctctttcccctagactccaggatccttgggatcactggccttgtcatttatgttcctgcttatgtcctatagcctggcacttagtgaggcggtgtgttgtgttgggttttgtttgtttgttggttggttgttgttgttgttgtttgcaagggcccctgcaaagtatcacaaactaggtggcttaaaaaagcagacatccattctcttgctgttctggagcccaggaggctgaaatcaaggtgttagcagggacatgatccctctgaaggcattaagggtgaatccttcgttgccttttccagtttctggtagttgctggcattccctggcattctgcggcttgcagctgcgtttttgaaagctgcctcactcctaacctctgtttacattggtgtctgttcacgtcacctgtcctctatgtgtgtatctctgtgtccagattttcttccgtttgtgaaaccagcagtccttggtttagggcccaactaatggtttcatgactcctgtgttagcttcctagattgcagtaagaagtatcagaagctcagtggcctaaaactacagaaatgtgttttcttacagtgctggaggctggaaatctgaaatcggggtattagcagcgccatgcattcttcaaaggacccagggaagaattcttgctttcctctttcagcttctagtagtcgttagggatctggcggccctcagcttcgagatgtgtcactccaatctctggcttgggtatcacatagccttccctgtgtttttctctgtctccaaacttccttcttcttataaaggtattggtccccagactgggctcggtggctcatgcatataatcccagtactttgggaggctgaggcaggtggatcactttgaactcaggagttcgataccagcctgggcaacatggaaaaattccatccctacaaaaaaaaattaaaaattagctgagcacggtggcctgtgcctgtaggcccagctacttggaggctgaggttagaggatcacttaagcccaggaagtggaggttgcagtgagccaaggtcatgcaactgcactccatcctgagtgacagagtgagaccctgtctcaaaaaaaaaaaaaaaaagaaaaagaaaaaaaaaggtatcagtccctgtatttaggcctcatcttaattccatatgaactcatcttaattacatctataaagaccctatttccaaataagcccacgttctgacattctggggggccatggatttctgggggttgttatccaacccagtgtacaaggcagtacacatttattgaatgcatgaatgaatgataatgctctgggccctggcaagtctcagcctggagaactgagtctgcctgcctgcgtagaatcaagaacaacatgcacttcagtggaatttgggaagggtcagggtctgtgccgacagaaatggaaaaatcctccaagcgcctcaccctctcttaaaagactcctcaagattgctttgctgttctaccctctacagtgtttttaatatgtctatttaaatgcaaattttgactttctgtctgtaatcatataaaatgtttggcactaaaattttaatcaggaatgtaattttagatagaggcggtaatggagtggtaggccacacataacagaatgaagcttccccaacgtggattcccagactatggaagtgctggcctccctgctcccagctgagccgggaaaactctgccccactccaagaggtgcttctcaaagatgattcctgatcccaggcatgtcctgtgtcct

SEQ ID NO: 15250 - DNA, 2300 bp, Homo sapien
taacattagaagttaactttaaaaatagtagggagtggagcatgttcttcatggcatcattattgtgaaataaggttttactttatggttatctcagcatccgttaaatgccactgaccctgtaagaaaggcaggcagagagaacacaaatagaattttgttaactctgcaaggagaaagttaaacactgtgttaatatcatattaaaaacactcttaatgcacagaagaaaaaaaaatccctcctcgttttgttcctggtatgacaaagatggatgatggttacataaggaattggcatgttaaaaaaagacacacttgaaatattgcctctagatatgaagttgtaacgaatgtgaaaatatttgaaagatttattagcattttaatatttgcttaccaatgcataaaatcctaatcagttgtatacaagttgtatactttaactcaaataaagtatccaagaaggacacaggcaggaagccaatgaatatttcactcattgttgatcaaatataggagggatatatgtatattaaattttatttcccatttagatccttcctgtttaaataagtgcttgaggtagcaaagccatcttagtgcacacagcttgcagttctaactgtgaagagaaaggaaaaagaacaaattagtttttctacatccaagagtcatttccccagccaattaattttttggtccctaccaaaatcagcacttaagctgaagatagctagaacctgtgtaactcattcctattaacaacagcaacaaaaaaagtgaaatagatctatgaggacttcttgggaaaataacaggaaaattactttgatgatattattattcaaggtacacatatttaaaaggtgatctctaaatttcaacagagacgacagttgtttttctcctaaaagcaggctgaaacctcagcgcattctcatttagtacgtaacgtggaaaaagagttgagatcctaaagcttcgctcctaaataaagtgcagctgcttctcggagatgaaataggatgaaagcctagctgtttggggcgggaggcgagattgggggcgcggtgctggggtcttcgatgttttaccagtatttctaggtgaagcagcatattggaagtcataaatactgtcccgtggacattctgaataatgcaggagtagcgtaagtaattgggagtgcttatatccgcctttagacatttgattgctcgtgagttaaaattggttgtcaagtgcggactcagggaaccgtgcaaggtgccctattctgtcatgtggtacatatttaatgcctgaaagaacaagggaagggacacgtgcgggcgagagagggcgagcggcgagataccgcagccagctcggagctttgcaagtgcctccgacccgtaggggcgggacccacgcagccccagtatccactgccttcccccagctgcaagagtttgcaaaaacattgggcgtctcatttggcgagcgttttggcgcggacagaggccgaggccggccggggaagccggacccgggccctggcgccgccgtggcctccctttgtgcgcgcccgggtgttgattgcctccttgcacgggctgctcgctctcgcgcccgcgcgctcggggcgttctgcacctgctggcggtcgtgccaggcagcccgggcgagcgaaggcgcgcggcgcgcacgacagatgactggagtcatttacattgctagcacgtgggtgccgtttgctgttgcctcggacttctcccgtgctgtgttttcccggtgaggaaacaggaggcactttgcagccgacaatgaaatcttggcagctaattgcagtcgtgggagatgcccttcaggtacggcgagcgaagaagactctaaaacactgtcagggaaggagagaaagagggagagagggagggagggaagggagagaccaggcagcttctgcagaggcttcctgaagcccactgactccgcgggagggggttgcagagggacgggggcgggcgacagggggaggagtgtgcaaattgacatttttggctgcctgtggcagaggagcagccgtcagccgctgtccaacgttagcgcagacacggtggcggcgtgtgcgcctccggggctgctgattagaataggggacttggccgtggatggaatccgggaaacccaaaccggagatggaaggatgaggctgcgtttgcagcgcgtgaatgggacgcggtatgtaagccgagctccagctccggggacctcggagactgtgctcagggctcgccctgggtgccccgtggtgggggt

SEQ ID NO: 15251 - DNA, 2300 bp, Homo sapien
gctactggcgtctagcgggtggaggccagggatgctgtttaacatctcacaatgcacaggacagccccctatgacaataagttacccagcctaaagtggcaattgtaccaagactgagagttcctgatggggcagaagatgcattactgtcaggctgtgtcttttcccttctccccattagacctttggtgttctttgaaggggccggaagaggttatctcctactctgggcattgtgtagaatagctatataagatcctcaaaataattgaaacggaaagactcccttcggctctttctgccattccagtaaattcctgctaagtatgctctaggaaaactatgaggtgctgtatgatttctgtgacaggaactgtggctttcctgaggaacagtcttcctttcaatgctgttaacttcccccaagtttgtggtctgttggtggttccggtgtgggcaaagaggaatgaatgattgatggactgtgagcctcccaagtagaagtgggctagtggggagtttttttaatatcatattttatatacaactgcaggtcaggccaggctatggatatacagtgcctgaccctagtacagaggaaggatcgattgtgctcaaacagtgagctatccaaataatttatttatgcagcaatgcagctgtctgcttctttggaggtgggcacaggctggaagggttttgtgtgtgcgcacgtgcgtgtgtgtgtgtgtgtgtatgtatgtgtgggcatggggtgcatttgtatgtgtatgtgtgggtatggggtgcgtttgtgtttgtatgtatatgggtgggtatggggcgcatttgtgagtgtatgtgtatgtgtggggtgcatttgtgtgtgtatgtatatgggtgggtatggggtgcatttgtgagtgtatgtgtatgtgtgagtgtggggtgcatttgtgtgtgtgtgtgtgtatgtggactttgagtgcatttgtgtgtgtatatgtgggtgtgggatgcatttgtatgtgtgtgattgtgtatgtgtgggtttggagtgcatttgtgtgtgtgtgcatatgttgggatgtggggtgcatttgtgtgcgtatgtgtgggcctggggtgcatttgtgtgtatgtgagtgtatgtgtgggcatgggatgcatttgtgtgtgtgtgtctgtgtgggcgtggggtgcatttgtgtgtgtgtgtaagtgtgggcttggagtacatttgtgtgtgtgtgtgtatctatatatttgggtgtggggtgcatttgtgtgcgtgtgtgtgggtgtggggtgcatatgtgtgtgtgtgtgtgattgtatttgtgggcatggggtgcatttgtattgggcttggggtgcatttgtgtgtgtatatgtatgtgtgggcgtggggtgcatttgtgcgtgtatgtgtatattggggtgtggggtgcatttgtgtttgtgtatgggtgtggggtgcatttgtgtgtgtgtgtgtgggcatggggtgcatttgtgtgtgagtgtatgtgtgggtgtggggtgcatttgtgtgtgtgtgtgggcatggggtgcatttgtgtgtgtgtaagtgtatgtgtgggtgtggggtgcatttgtgtgtttgggtatggggtgcatttctgtgcatgtgtatgtgtggatatggggtgcatttgtgtgtgtgtgtgtgggcgtggggtatatttgtgtgtatctatgtgtatgtgtgggagttgggtgcatttgtcttggggggcatagggtgcaattgtgtgtgtatgtgtgggtgtggggtatatttgtgtgtgtctatgtgtatgtgtaggagttggttgcatttgtgttggggggcatagggtgcatttgtgtgtgtatgtgtgggtgtggggtgcatttgtgtgtgtgtgtgtgtatgtgcatgtgtgggcatggggtgcatttgtgtgtgtatgtgtgggtgtggggtctatttgtgtgtgtgtgtatgtgtatgtgtatgtgtgggcatggggtgcatttgtgtgtgtgtatgtgtgggtgtggggtgcatttctgtgtgtgtgtatgtgtgggcgtggggtgcatttgtgtgtatctatgtgtatgtgtgggagtttggtgcatttgtgttgtgggggcatggggtgcatttgtgtgtatatatgtgtggatgtagggtgcgtttgtctgtgtgtatttgtgtgggcatggagtgcatttgcgttgcgggggtgtggagtgtgtttgtgtgtgtgcacacgcacatggttctcatggtcctcccgttttcaactgaacctgtaattagctcctcagag

SEQ ID NO: 15252 - DNA, 2300 bp, Homo sapien
atagttacctctcttctatgctcaggaaactaagagtctaaagctgtaaatttgttgcctgaatgatggaattaagtctcctgccttctggtccagtggtctttctattttacaacactaaagagacaatttgatctgacacaggccttacctaagtaagtaagagctctcccctcctgttgattgctaaaggaaagcagacgggagagacacgtccgtctcacagtgatgcttctgtcctccccggtaacttctcagaaatgtggtgttgaaagtcatcgtcaaaagctaaagttagaaacagtatcgggctgttgagtaagaggggtcagtgcgcagctgttatgggagctttttgaattgtacaacgtggccactttgatgcatgagaatcaattacagagaaaccttgtcaagatggccaaaattcagccttaaataattgaattctctgccaaaccctgtccgccgtcgttatctagaaatgcaattatgcagctaaatcaagcaactaaaattagtgtagtgtaaaaacaccttggctatctgaaagtggaggaattgacatttggatttagaaaacgccaatagttggatatgtttggcggtgtttgaagctctctcccagtttcaacaaaatctatatcaagtgtcctgtttagagtgagcagtggaatgtggccagtgaatgtttcattttgaaggtgattttcagtgattcctgggacttgggcattatttgagtggattcacttcatcagaacttcatattattgctttcaaaattgtggaactacacacacccacatgtctttctaataagaagattagaagactgacaatttgattgttatctgagccttcagtctcaggtcaaagccttcaatctgaaaccaaagatgtgtctgtaccaatcatcaggaaaacagggaatacatgataaaagtggctaatagctgccggtactgcacacatcatgttatggttctaggacttcatttaatgataacacagccttttgaagtagggactattattatctcagttttccaaatgagtgaacagggttcagagaggctaagtaacttgttcaagatcacacagctagtgattatactgacacccaagtcagtataattccaattatattaattaatatattaattcaattggaattaattccaattcatgtcatcccctaggaatttatctgctcctatgtaacatatcccaaatgattgcttgggtattttcaaacaccagaaagatttcaaatctgtgcttgaatgtattttttatccatagttttggtgcttgttagctatgccttgaaactctgagaacaagaagacatctcttgttaatgtattgcatattaatatatcacagatgaaagctcaaaataaagaatgtcgttaaaaacacaaaataaaaggcatagaaaatgttattacagactgaaatacagcagtgaaaacagtgttgtggttaggaatcgggctctggaatgtgtttgtagcttcgcactgccttgtacgagctatgtgaccatgagcaaaccatttaactagtatcagccctgtttcccatttgttatatgggactgataatagtactgacttcagagacttgttgtgagaatgaaattacataacacgtgtaaataatttaactctgtctctctgcgtagcacacattgtgcaaatacaagctggctggtagttttatcttatttacaaattgccactttaaatttgaaatcagagagagagcgggaggaaaactagactgaatatcttcttattttttttctatcagtgccaaacgttgcccacattaacctgctggatttgaattttaactcggaggcgataatcacattaatttacatttctcagtttatttttccctaaaaatcccatgtagaccccatcccttgctcttttggccaaattcagtaggatgagcttatatctcatagcctggttccctctgtcacttggtctcttggtctctctctctgtctctctctctctctgagaactaaattaatgaagagtatttggttagtcatgttaggcaagctgttcccaaaatagcaccttccattttggtagcttcaactttgcagctgctgtgtctcttcgtcgtctgggaagaaaactttcacattaagagttgctgatgcggattttctttctttcctctcccggcgttgatgagtgcttggctcctgacagaagggatttggctcccagctttgtagttcggaagaagttgggtctatagatttcccccta

SEQ ID NO: 15253 - DNA, 2300 bp, Homo sapien
aaatcagataatgtttaacctaaggggcaggcgaagtcccactgccatcacctctgtggtgtgatttcaggaacccagtcaggctgcttccccaaatacgatgaccaatgtctgagatgataccaatagagatggatttcttcgggatatggattgctttcatttttgattttctccactcttcaagggaaaacaaagatgtgataaatattcattccagctttttcatttgttattggctggcaccagggcctctgctgtgagctcagacaggccatgcctgaatccggtcccatcacaggtgtgtgatgctgggcagctcttttgtttaactcctgaaagtcagaggtctcttgtaatgcatgctacatggatttgttatgtggattgaaatagctgatgggtttatagatttagagcagtatattgagttcttgagcagatatctcagttctgtcccttaatagttgggtgatcttggtcaaaccttctgtacctgagtttcagtgatgtgctggaaccagcttgcactggttcacgaaggctgattgttgtatactcataaattttgtgagcaggttgttacattgttggcagcttaaaattggccacggtgggagcatttacactagagaaatcagcaaacactacacagcagggctctgcccccacctccccaacagagaactgattcaccagcacactattcttcagttcctttgtgaatttcttgcaataattataatcagataatttgtgtaaacgtctcagcacagtgcctggcctttaagaaggctctcattaaaagatagttgctacaattactactatactactaccaacaataattaaacaataattatgtcattataagatcttgaacatagtaagtccttgaaaaatctcaaacccttccctatttattcattgttaccccttccctatatattcattattaccccttccctgtatattcattattaccccttccctgtacattcgttattaccccttctctatgtattcattattaccccttccctatatattcattattaccccttctctatatattcattattaccccttctgtatatattcatttttaccccttctctatatattcattattaccccttctctatatattcattattaccgcttccctatatattcattattacaatttctaccaaaggtctaagggaatctgtgtaaacgtcaagactccgagggaacaatttgtctccaatctcacttctgactctgaaacacagtggaactttactccttctcatcaaccataattcagggcagacatctggacttatgcatggcacatgaacagaagccaaatatcatctccaacctcaccatctccatccgattaagtgtttctctttggctgccacgccagctggatgactgggggttctcttcttaccatcatgaagccgtcaacacccatggtgggccctgcaaagtataaaggacagtttatccacagagcagtggcagcatcattgtttatgaaacgataactgcttcaggtagcagcaagttccaacattagcacaacaaaagctttgagctggaccatctgttgccacgtggacagtctggtgggcttgccagagccatttatccgtgtcgagtacatatccacactggccagtcctcacgcagagcagaaaggaaatttaaagaaaggcccatcatttatcactgtagacagctgggctggagtgtgtgtggggaaaagcaagagagatcagattgttactgtgtctgtgtagaaagaagtagacataggagactccattttgttatgtactaagaaaaattcttctgccttgagattctgttaatctataaccttacccccaaccccatgctctctgaaacgtgtgctgtgtcaactcagagttgaatggattaagggcggtgcaggatgtgctttgttaaacagatgcttgaaggcagcacgctccttaagagtcatcaccactccttaatctcaagtacccagggacacaaaaactgcggaaggccgcagggacctctgcctaggaaagccagttattgtccaaggtttctccccatgtgatagtctgaaatatggcctcgtgggaagggaaagacctgaccgtcccccagcccgacacccgtaaagggtctgtgctgaggaggattagtaaaagaggaaggaatgcctcttgcagttgagacaagaggaaggcatctgtctcctgcctgtccctgggcaatggaatgtctcggtataaaacccgattgtatgc

SEQ ID NO: 15254 - DNA, 2300 bp, Homo sapien
caaaaccacaagatgaaggggccagcagtgtgccttgtttataactgaggctccggaactgagggccccctcccgcactcccccagctaccatctctttgcagccctgccaagaagggctggctttctttccccttacctggtgacctattactgtgttgcaaaccacctcaaaatttgtggcagaaatgataacccttttggggccatctgggctgctataacagaataccatacatggggtggctgataaacacattcatttctcatggttctaggggctggaaagtccaaaatcaaggcactggcagattctgtgtccaattcttggtcatagatggctgtctttttgccgtgtcctcacatgacagaagaagtgaggcagctctttggggcctcttttgtaggggcactaatcccctataaaagattataggtttgacaagaggaggaatgtgatcttttgatttttaagggtcattcccccggtttaaatttgaagacaaaactcccaagggtgtgaacaatgccttcctagtgccctccccaccactcaacatcctctggggataactaagagaaccctcagcgaactagagagaaaactatgaatagaatctggtcccaagacacccaactggctctctgtgtactgtcctgggggatttcaggaaacataatctgtttcttaaaaaaaaaaaaaaaaaaaattcttatttgtgtcgcttagtcaccctatcaactctccacgttttatcatcagtaaccatgaaattgatgttgatttaattctattttgaaaagagaaaaaaaagtaatttagacaaaggttgccagctgaggccatgtgtgtgcgtgtgtgtatatgtgaacacacagggatatagattttacatatgtggactttacatatgttcctgtgtgtatatttgtatgttcactgacatgtctgagagtgagcaccactgtgtgtgtctgggcatgtctgtgaacacgtcagtgtggtgtatatccctggcagctccccatctcacgcacagtaaaatccaaagttcttagaatgtcacaaaagttctaaccctggctacctatgtatcctcgtttcctgcggcccatcccctggcttactccattgtggccaggctgacttccatgatgtcactgaatatatagattgagaaaagggccaatattattgactgtactttttctaaaaatgcagtgactcaggcaagagacgtgagaatctgtggtctatcctgctcatcctcttcaggggattcttctgagggctgtgctcagtcacggactcagaggctttctgaaattctgcaggcaagaaaaaacgagcaaacatggagtcttatgtttgccactctgtctcacccccttggtgttggaaacttgatgagcatacgaattaacgaaatcactaccacctaatgaaatcactaccacctattaataataacaagtactggctgggcgtggtggctcatgcctgtaatttatgagctttaggaggccgaagcaggaggactgcttgaagccaggagtttgagaccagcctgggcaacacaacaagatacagtctgtacaaaaaaaaaaaaaaatggtgccacgcaactgtagtcccagctactagagaggctgaaacaggattccttaagcccaggagttcaaggctgcagtgagctaaaattgcgccgctgcactccagcctgggtgacagagcaagaccatctcaaataaacaaacaaacaaacaaacgagtactaagagcatggatgacggtaacacccgtgataataaatacagtagcatgctggttaaatagcaccggctctgatcccacaccccgggttcgaatccaggctttaccacttagtagctgggagagttatttaactcctatttaagtcttttagaggaatgagtttagccacctaggcgggtccccccagcaaacacgcctcgcccgcgaccagagcgaaggctacaggtgcccgccggcaaccctcggacgcatgcgcggcccgggcaggtaggtggagccacggtgcggggcagtcggatggtcgcacgcgggggcggggccgcgcctgcgcagaccgcctgttatggcggccgcctaagtcccacagagacgggagtcgggtgggatcccaggctgggccccgcggcgggtaagtgcctgggagaggcggcgggatagggtagggtgcagggaacctcctggcgccgagcctgactttgaaatccgagctcccacagatcggaggcccagatccctaaggcccg

SEQ ID NO: 15255 - DNA, 2300 bp, Homo sapien
aacataccaagactgtctctaccaaaagaaaaacaatcagctgggtgcagtggcacgtgtccgtagtcccagctactcaggaggccaaggcaagagaattgtttgagcccaggagtttgaggttacagtgaactgtgactgcaccactgcactcccgcctgggcaatagagcgagactctgtctctaaaaataaaaatagcaaagaagtaacaagaggtgggatctaacaccggttctgtctttccattggaaacccagagctctttccatgacccctgcccagggtgaatattgtttgtctgaaggaatccaggagccttgtggattggagcttatgctgtgccattgtctttggatggattgaagggtttgacatgccagggctgggacatgatgacagtcttattctgcctgcctcaggcttcaggaaacaactgctgttagagccatgtgggagcgtttcttgggggtgtttctttggagcgtttcttctagaccaggaaggtgacaaccttcacagtgggatgcatggactggtggtggagtttccagcttcagagctcaccaagaaagagcatgaagctgatggtttgggtcctggagacagggacaaaaggaacagagccttcccccagcacccctttccactggaggttcctcagaggcaataaagcttgatggttagaacatggcacctggcatctgaactcaaaccagcccgaacactcacctctctgagcctcagaatcctggtctgtaaaatgcgcacactactagtacttacttctcaaagttggacttggtaatgtctgtcaagcacctaacatataacagggcaaggaagaaaagctcaagcaatggtagccatcaccaggcgtggtggctcacacctgtaaccccagcactttgggaggctgaagcgggtggatcacctgaggtcaggagttcgagaccagcctggccaacatggtgaaaccccgtctctactaaaaatacaaaaattagccgggcatgatggcaggcgcctataatcagctacttgggaggctgaggtaggagaatcacttgaacccgggaggcagaggttacagtgagccaagattgcaccactgcactccagcctgggtgacaagagcaaaactccgtctcaaaaaaaaaaaaaaaaaaaggtagccaagccatcatcatcatcatctccctattattattaatctctgttgcatttctattaactgtgtgtcttgggagaatggaaattccccaagtaggcgtcctgctcaacagttaatgatggtaaaacagtctcacttgcctaaccacttcgcctaagtgttacttgactgacagggtgggttattttggggagaaaaaaaatcagtcaagctctcgagtgcaccgtccctgaaaggtttctatgacaacacatacctggatgttccagtgggagggtcacctggggaagagttcagagctaaaatcaagagggggccccacccaggtgggggccccacctggaggctgggggaggtcctcccactcctcctatttttctgcctgtgttttcccagccctgactctgtatcccttttaaacctcttcacagccctgtggggtaagtactattattcttacatccattttacagatgaagcaactgaggcttggagaaattaaagcttgcccaaggtcagtctgctgatcacatcttggatcatcttagacctttctgggtttcatttgtcagactagaggagttacactagagtgaggtttctcagtctcagcactgccaacgtgttgggctcagtaatcccatgtcataggagactgtcctatgcattgtagagcattcagcagtcccctcggcctctacccaccggatgccaggagcacctccctgtctcccacccccgaccacagtcatgacaaccaaaactgtctccagctgtggctagatggccccagttaataaccactgggctaggcaatgatctttcctctttccttacacttgtgcattctaagttttttaattttttttttttttttagatggagtctcgctctgtttcccaggctgaagtgcaatggcgtgatgtcggctcactgcatcctccggctcctggactcaagcgattctcctgcctcaggctcccaagtaagtggaaccacagacattttctatttctttgcaagcattttctatttctttgcaagttcacctgtctgttcacctgtgacaccatgcccagctaatttttgtatttttagtagagacagggtttcaccatgttggccag

SEQ ID NO: 15256 - DNA, 2300 bp, Homo sapien
actatgttacccaggctggtcttgaactccttggctcaagcgatcctcttgccttggcttcccaaagtgctggaattacaggcgtgtcaccacacccagccccattcaatatttcatacctatgtttattgttcaatttcatgcaacaatttccctctgagtccctgctgttgtgcattcaagttgttcccagtttttccctgtgataaacaaaatggtagtaagctactttatcattaaatctttgtacctttaaatgttttcagataagttcatagggattggattgctagatcaaagggtcaacttacttttaagatttttaaaatagaaatacccaatttccctccagaaaggctgtgatctttctactgccatcatcaatacatgaaactccttgaagtctttgcaaagaatagtaattataataataaaaacaaggtcattttggtaggtaaactctttccctcttttggttttaacttgcctttccttttcaaagtgtcatctcccatgtttattggccgttgtatttctttgggcaggtcaagggtagtaaaggggattatgttcatggctttggttttaagaaaaaattgctagattttcagcacaggcctcatcaagttcctcaagcaaggtgacaatcacccaggctagagtgcagtggtgccatctcacctcagtgcaaccactgcctctccattcaagcgattctcatgtctcagcctcccaggtagctgggattacaggcaggtgccaccatgccaggctaatttttgtatttttaatagaaagggggtttccccatgatggccaggctggtctcgagctctgggcatcaagtgatctgcctgcctcggcctcccaaagtgctggaattacaggcgtaagccactgtgccaggcctcaattattcttatttactgctctgtgtgtgtgtgtgtgtgtgtgtgtgtgtgtgtgtgtgtgtgttgggggggagggtccccagaggtgacactaggaggtgaatgatttgtttggcagctttctatttatctatgtgtttactttatcttaattctttaattgcaaggactatagcgcttgtgtaatcagagatagggcagcctggattcctggacagcaggaggagagacctcagggttctacaagactccacagaccaagttatcagtgatcagggtgagtggggagaaccaagctgaactctttctctgcctttaaggtctgtactctccatccatccattcattcattatgaggacttggtgatcgcctgttgtcttgatgagcagttctttgtgtctttgattttgtcactgaaagattgcatcctctttccaaatacctctagaaagctgtgggggggctatccatccgtcacacctgagtattaattatcttccacacagcattttatacaacggtagaaaggcaccttcatcatatctagggtctcgtttatacccacgaaggaggtacaatctctgttgtcccaatttcaggaaattgaggatcaggaggcgcagtgacctgctccaggtcatgcagaaggaaccacctctgactcccagcgccctgtttgtcttccggagcgctggggccaggcggaggaaagtagctgggagcaagaagggctggcagggccctgagcgccgagatggggagtgaggtggggagggcgggatgctccttcccttctccgcaaaggaaccccttctgattccgactctggagctccagagaccggatccgagacgcgggtggaggtggagttacactcgcctgcagccctgagggtgtaaatggcccattaagatccaggttaaatcaacctatggagctgccccccagagggtcagggtccccacaacttgacgggggtcctcagccgtctcctccccagtcccaggactccctcccagccctcgcggtccctctggtgggtcccgccccagcccccgtctcccccgcccccggaggctggactctgcccccgccccgcctgccacctccctcctgggggcggtggcccgtggcgggcgcacccattggctgtggcgaaagcgagggccggggctggcggcgctgattggccgggacgctcggcggagccagggagtccggcgagtcgctgggggaagtcgagcagacacccagcgctgccggaactcggggcgcgcatcccgcaagtcggaacccggcggatcggatcccgcagatcggagacggggcctggaggtgagcgcgaggcgccgggtggcttgggacgggcccttccgaggggagccgag

SEQ ID NO: 15257 - DNA, 2300 bp, Homo sapien
gtggttacttggagaagagccattaactaaaattgcaaaattaattttggggaaagggggctggactttcctgatattctcttcctccttttatctgtaagttgatgaataacttaacatagcaaagtgcactaaacttacatacgcggctccatgaatttttacctgagaatgcaaccatgtaaccagcacctagatcaagatctagaccgtccccagcccccagaaagttccctcataccccagtgggtaactgctatttaacatcttcaccatagattagctgagcctattttagaactttataaacggaatcataccgtagatactccttgatgtcaggcgtctccctctgcactgtttgtgaaatcccacaattaatcccttttttaaagagacattgacttgctgtcacccaggctggagtgctgtggcttgatcatagctcccctgcagccttgaactcctgggatcaagcagtcttcccactcagcttcccaagttgttgggactacaggtgtgcaccactacacctggcgcattttaaaacattttttttttaaatttagagacagagtctcactatgttgctcaggctggtcttgagctccctggctcaagcagtcatcctgcctcagcctcccaaagtgctggcattacaggcatgagccgccatgctggccttaattctttttttttttttttttgctttgttttgttttttctctttgagatggagtgtcactctgtctgtcactcaggctgcagtgcagtgctgcaatcttggctcactgtaacctctgctacccggattcaagcaattatcttgcctcagcctcccaagtagctgggactacaggcacacaccaccacacctggctaatttttgtatttttagtagagacggggtttcaccctgttggccaggctgctctcaaactcctgaactaaagtgatctacctgggcctcccaaagtgcttggattgtaggcgtgagccacaataccagtcttgaccttaattctttaacaacagcagtatggactgtgaaggaaacatgttctgtgccacaggagcatatagtagtgagctgtaatcaaatctgcagtgaataacgtggtagtgagctgtaatcaaatctggagtgaataacgtgaacactgggaagagaagcactcacccttactaagcatgcactattggccaggccctgcccttagaaggagagggtgagacctgcctggccagaggccacaagctctggaacagtccccgatgggttggaccccacctctgctcttcactatccgatgtgactgagcaggtgacttcactttgctgtgcctcagtttttccttttgtataattaaaatactgatggttactgcattattccccaaaccttaatgatcaataaacatggagctctgtaatgagggagcttgcattgttctggggatgctgaggagatagaggtaaaataggagatacctgttacgcaggaagaggtgagggaaggggagagggagggcaggggtgcaactgaaaatcagacagccaagacctgaggaagacagggcgggagcccctggctctctgtggaagagatttttggggagtggaatgggcaggagcaggctcttgggtcaggctcatctggcacgttcaaggaaccacgagggggccagtgtggctggagcagagcaggagggggtggcagggaggggagggacatggaggtgtaggtgtaggggggtcctgcaggcctcctggaggccactctgatggcattggctgtcactctgcgatgggggtgtattggttcgttctcaaactgctataaagaaataactgagactggagaatttataaagaaaagaggtttcattggatcatggttctgcgggctgtacaggaagtatagcagcttctgtttgtgggaagacatcaggaaacttacaatcatggcaggaggtgaagggggagcaggcatcttacatggccagagcaggaggaagagagagagcagagaggtgctgcactctttttttttttttcttttggtgttttgcccaggctggagtgcaatggcacgatcttggctcactgcaacctccgcctcctgggttcaagcaattctcctgcctcagcctcccaagtagctgggattataggcatgcaccaccacgcccagttaatttttatatttttagtagagacagtgtttcaccctgttggccaggctggtctcgaactcctgacctcaagtaatcctcccgcctcggcctcccaaagtgctg

SEQ ID NO: 15258 - DNA, 2300 bp, Homo sapien
aacaagagagaagaccgacatttattacaaccagcaaccaacattaatcactttcccatatcagtacataaagcgccatcgcattctttttgttgaatgcaggttattctgcatgatggatatacccaagtttattttaaccagttcccactcatggacaattaggttattttcaatttatatcaatgagacaaattccttcaagtagaattatgctagggatcaatggtttgcgcatttacaattttacagattttgacaaattgctctccaagccatttgtatgaatttcctctcctgccagcaatgaatgaagtgccagttcccctgcatcgtgaatatggccaaatatttcatgataaaaattcagtgtggagaaagcagaggaaaggtgagatagcagctgggaggccgtcaggaggtgggggcaactgtccaggtaggaaacgatgggtacctgaacaaggacaaagtaaggagggagagggtggagcccagagctaccgtggaagtcaaattccgtggcgtggtggtgaaggaagataacaggaaggaggaatcagatttcttgagtttctggcttgaacaaatgagtaggcagtgggtctgttaatggagatgctcaacataggaaaggagataggtgtagtgaagagaagatgatgactgtgagaacgtattgcacttgatatgcaggacaccctgctgaaccagggagaggatttggggatagtgaatcatttgtggaaaccgtgagtgtccatgagctctcccagagatgggtgggtggaaggatggatggatggatgattggatggatggatggatggatgggaagatggatgggtggatggatgggtggatggatgggaagatggatggatggatggatgggaagatggatggatggatggatggatggatggatggatggatggaaaaatggatgggaagatggatggagagatggagggagagaaggatagatggatgaatgaacagacagacaaaaaacagaaacctagactttattgtctttagattgaaccatatgaaattactatttttggccaggtgcggtggctcatgcctgtaatcctagcactttgggaggtcgggggggaggggcagatcacttgaggatcagcctggccaacatggtgaaacaccgtctctactaaaaatacaaaaattagctgggcgtggttgcttgtacctgtaatcccagctacttgggaggctgaggcaggagaatcacttgaacccgggaggctgaggttgcagtgagccacgatggtaccactgcactccagcctggatgacagagcaagactccatctcataaaaaaagaaaagaaagaaattactatttttgttttaaaaattaccaagtgcttacttttatgcaggttgaaatattttggggggaaggatactgatgtctacagttaactttgaaatgcatcaaaaacaggatgtgataaagcacatgtggtaatcatgttaatggtagaggctagtagtgggtatataggtatttaccgtaaaattctttcggctttgctgtgcattggaaagtttcataaaaaatcatgggaaatggtctaggcgccgtggctcactggtgaatattgtcaatttcatgtggttcccctcaatttatgttttatttggtcaaaaagatccttccaggttcccaatctgtagcatcaacagatctgctttgtggagtcccctttggcccttgttctgccccgatttgggggctgggggctgggggctgacgtttctccctctcaaagttcaggttgaattgccctaacgtgctgattactgcaccgaggatgccggtatctggcttgtaataattatagatttcctctgcgatttgatcccattggttgcctcggcaacggcgtaatagctcaaccgaagcgctgtcacggtgatttagaaccagtgtgtctctcctgcagcctccattctgggtgcctccacccccttgccgtcgtcatggtaactgatgagcagcatgtgaccgaaagctctctgcccccccaaccccataccccctccccatcttgtgatcaccctcattacctcttctgggccccctgtggacctgcgttgacccagcatgggctacaatgggggagttgggtaatcgctcccggtaggttcctccccaacccccgaggcggggtcaggtggagcgtgggcgccagagcagcccctctgccttgggtgtcttggagatgacttggcgccccccggagccccgtcatggctgtggctgcgtc

SEQ ID NO: 15259 - DNA, 2300 bp, Homo sapien
cacaaacaagtgctgtaagaacttgcttagagcctttttcctaaacctgtacaccagctcttgccttgtgaatttattcaccacaaaacacatgttcccaggggcccaggcaaagtctccaagtacccagtcccctttcttcagccttgcccacaccctcagccttcctgttaatccaggcgacccagggttacccagaggtccaggtcccagttgttcacttgagcatctgatgtaccccaaacacctgtgtgaaacgctctctgtccaggatgcgtccatagcgcagggtgacgtagaaggtctgtttcccactgtaccgctggatacgcacaaacatctcctgaggccggtccttggtttctgtcaggggaatcacatctgccatgggacagtatgtgtcctgccgccagccccagaagttcagatgggccacccgcagcatggtgccagactcattcagatacaggataccaaccagtctccgtaagaaatagctcatccagcacagcatggtcagggcaaagcccgatatcccactcatgaggcacacggtgttgagagtgaggaggccctgggagtacaagtaatagcctggtggcaaagctaccactgtcagggcagtctgtgccaacttcagtcgtgacaggaacccgaaggttctgatggcatcaaaacggtaaaacatccagaatttctcagtctctgcgtttggtagtttctccttcgagatgggtgaactgctgcccacccacctcttaggatcctcctgcccactgcagcaccacagcccatggagaggcctttcccacacagcttttccccgaaacctacgcacagctcggagaagggcagcctgaaagggagacagtagaccatttctctcatggaactcaaccacattaatcacacggtgaacatctgcaaagcaccatactctaaggcttctgccaatcctgcaaggtaaccgttattgccagacgagggaagggtaaagccagatgctatctcatgtgggcatcacaacagctatctaagatagttatcactatttccactttaccactagggaaactaagcccagagagggtaagatatttaccaaagatcacacagtcagtgagtgcagcagagtcctccttccaccaggcaattccaaataaatacaggaaaggaggtgcggccgtcattaattcaaaacatatccagggaggacaaactctgggctggacaatgtatccacaagggggtgtgaacatttccccaagcaggaaactaaataatcagtgtcttagtggggaactcgagcaacaaatctgtgagatatttattccaataaactttctaattctctgtttgattcatatgctatcttgggtgctggagggaactgctgctttctcttagcctagtctggggaaggggaaacagcggagaaggagaaggagcgaggcagggaggccccaacacgtagcacaagggtattactaggtgggtagtgaagcagtaaaagctcttattccaattctggctccaacagtaatttgtgagcaaattactccacacccctgagattcggtttcttcgcctttcaaaatggggactcagaacacagtgaaccagaggatggtttcagagtcctcaacttagtacctaatgcactgtgagagctcggcgagttttagctactactactgtgcgcatgtgacccaaggagggcaagagaaagcccgggaaaagcgaactgtaacacacgccagagcttcctcccacggatcctcggagtccgaaacccgagcgtcgggcctgcccgccccagccctgaccccgaccccaaagagcatcaccccctcaaggctcgccacccgcctccttaccatggccccaccacctgctgccggaagtaaatcccaccggcccccggaacccctaagagcgcatgctcgaatgtacaaggcgggcgtgatctgcgttgcaccctgggagttgcggtccaggaatcgtggctgccgctactcccaggcgttatgggaacggagtcccctcctcttcccgacgtgccctgcgactcagcggccgaacccggaagttccgggccgagttcctcgtgccaacgtgtcttgtaaggtgcggctagaaactggggacatggcagcgcctggcccagcgctctgcctcttcgacgtggatgggaccctcaccgccccgcggcaggtaagtggcggccggcgggctgctggcagccgacgcggagcccgtgctgttcccagttggggctatcgaccacccagggtaggcgc

SEQ ID NO: 15260 - DNA, 2300 bp, Homo sapien
gaggagtggcctttaaaagtcagaacacggtggctcacgcctgtaatcccagcactttgggaggccgaggcgggtggatcacgaggtccagagatagagaccatcctggccaacacagtgaaaccccatctctactaaaaatacaaaaattagccaggcgtggtggtgcctgcctgtagcaccagctacttggttgcctgaggcaggagaattgcttgaacctgggaggtggaggttgcagtgaactgagattgggccactacactccagtctggtgacagagtgagactctgtcttaaaaaaaaaaaaagagtcagaactgtgaaaatcagaaaatcagaagcactttcctgaatggcatacccagtgactagaacagcttccaccttagcacagataggaaatggcaaacttgacaggaaccaatatcctgaggcccagagacttgtaccaggttggctgtgtgaaactgaggaggttagttcttcactgagtgtgtttccttatgtttaaaacggtaataacaactatcctacctgggaagaaagatggaggaaggttgagagggttcagtgatatgaaaaagggtggcaatgtaaaccctagaccactatggcccacagaccacattgggcagctgtttgtttttgtaataaataaataaaattttattggtacacagccactcttatttatatagggtttatggctggttttgcactaaagttgagtggttactatagaccacatagtcagcaaagacagagaagtatttgctatatggccctttacaaaaaatgaattggggaccggagttttagaccactatgggcttttaacaaacccaagtgtgtgatcactgaatttcagaatcagaaaaagcctttgaagaacttgggagttgagcgtcatcactaggtaaatcaaacctgtggctgagaagggcaaaatgatacgtctaaggtcacacgcatttgacctggacttctggagcacaccattgttaccaccaagcgaaaactatgaggggtgagggtagaagctgaggatagtgagaccattggggtccagtctcaagttgaaatggccagtgttcagtggccaatttctgaaaaggggccaggagagcctcacctcaaggctgatcgtaactgaaacttatctgtgcctgtagcagcaaaatctgaaagtggaaagcaagtttccaagggcccaaagaggctctcagcgggcagcctgtaataacctagggctcctccatctccctagtccattgcaggggctggagatgggtgtggtggaggtggctactatttactgaggcctagtgtgttgtgtccaacatactttcaagaacttacacaatctcatttgatcctcacagacaccatatggaacaggtaacatccccatttaaagctgtagatgttgaggctcagagaggttaatgactcgctgaaggtcacacagatgtcaagaggtgaagatgagactccactaggtcggtttgacctggaaacctgtttttaatatcatgactcacggcacagcccattggttacaggattggggccgacacatagctgataagggggcctgatcttgggttgaaatcctggtctatcagtcccgagcactagcggtgagtccagattacattttccaacctagcacaagtttcctgctcttaagagttcttcagccccgtctcatctttccaagcaccagagctcttcaagagctggttagggcctccctctcattcctccagtgcacccagaatagggttcagcgccgtgaggacgtaggcggtccttagccaccccttggcgcctaccctgggtggtcgatagccccaactgggaacagcacgggctccgcgtcggctgccagcagcccgccggccgccacttacctgccgcggggcggtgagggtcccatccacgtcgaagaggcagagcgctgggccaggcgctgccatgtccccagtttctagccgcaccttacaagacacgttggcacgaggaactcggcccggaacttccgggttcggccgctgagtcgcagggcacgtcgggaagaggaggggactccgttcccataacgcctgggagtagcggcagccacgattcctggaccgcaactcccagggtgcaacgcagatcacgcccgccttgtacattcgagcatgcgctcttaggggttccgggggccggtgggatttacttccggcagcaggtggtggggccatggtaaggaggcgggtggcgagccttgagggggtgatgctctttggggtc

SEQ ID NO: 15261 - DNA, 2300 bp, Homo sapien
aaatgaggggactgggggggcaaactgaggttgaaggttgtgagagcttcatttctttccatgagcagctggaaacctggattttgaggaaaccccctgggatgtttaagatagttcaggccgggcatggtggttcatgcctgtaatcctagcactttgagaggaagaggtgggagaatccgttgagcccaggagtttgagatcagcctgggcaacatagtgataccctgtctctataaaaaaaaaaaaaaaaaaaaaaaaaaaaaaaaaaaaaaaaattaggcatggaggtcaaggctacagtgaactgtgattatgccactgccctccagcctgggtgacagtgagacactgtctcaaaaaaataaaagttatttatttttttttgagacggagtctcactctgtcacccaggctggagtgctgtggtgtgatctcggctcattgcaacccacagctccctggttcaagcaattctccagctttggcctcccgagtagctgggattacaggcacccaccaccacgcccagctaattttgtatttttagtagagactggttttcaccatgttggccaggctggtctccaactcctgacctcaggtgatccacctgcctctgcctctcaaagtgctgggattacaggtgtgagccaccgcacctggcccatgcttcaaatctaaatttgaaaaccccatgggacctgagtcaaaccgatccagggctgctgctgtccctcccggctgtgtggtgttgagtggcgtcctgagttagttaggcttctccctacttcatctcgtacccccatcaccagccctgcgcaggtgccaagtgatgcccacccagctgccccactttgcagattcggaaactgagcccagagatgggaaaggacttacccaagggcctctgactgctggactgtttctctttcccctgaacctcgagctgaggccacgttagagccgacaccttcatattcaatgttcagtgattattgtgtacagcgagtgtcctgctcttgaaaaattgtcaaaagcacagcagcagctagggaattcccgccctccagctggatttaccggtacatactaggggtcacagaaggaatttgatttcataacagcgtggtgacccgggctgtgtggaaattcactgggcctgatggagctggatgcagccttggaaattctccctttccctttgggctctcgcagcaggccccccagtcctgggtgcaggcttgtgacagctgctcagggatccaaacgtggcgcttgagctctctgcgacgtgttccacagttccctggaggcggacactgcgtgagggtcagtttttgcccctgcttccctgtggtgtctggctcccagcagcgtcagggagggtccgtggagtggctgagtttggatctaggtggttggcattaaaatctccctggctttgggttttcttttttgagacagagtcttgctctgtagcccaggctggagtgcagtggtgcgatctcagctcactggaacctccgcctcccaggttcaagcaattctcatgcctcagccttcaagtagatgggattacaggtgcctgccaccatgcccagctaatttttgtattcgtattagagactgggtttccccatgttggccaggctagtctcgaactcctgacattaagtgatccgcctgcctcggcctcccagagtgctgggattgcaggtgtgagccactgcgcccggcccctggctttgggttttctgctcaccttcctccttccctcccacaaatactatgtgtcccaaatgtgccgggatccatgccttgtgctggggacacagaggggaccgatgccatcctggtcatgggggaggatgtggcattttcatgaagagctatgatcgagggggccccacggttgcttcaggagcccagagtaggcatctgaccctgccaggcgtgctcccagacaaggtgacaatggtgctgaggtgcccgagaggaatgagcctcagatactggactgtcagacgtggacatgggggtaagcacagggtccctaccttgcaaggcacgagcccctgacagcctcttctctttccaggtcagccatgtcatctgagcctcccccaccaccacagccccccacccatcaagcttcagtcgggctgctggacacccctcggagccgtgagcgctcaccatcccctctgcggggcaacgtggtcccaagcccactgcccactcgccggacgaggaccttctcggcgtgagtctggagcaggctggggacgcgttctcag

SEQ ID NO: 15262 - DNA, 2300 bp, Homo sapien
ccatctgcacagcgtccgagccctgcgacgcagcaccgctcctgtcccctttgacagatgaggaaactcgggtggggcggtgaaatcgcctggcaggggtcacagagggagtggggaccagtcagggctcaatctcaggtctgagccaaagccccccgagaatggagggaaggatggagggattgagtgggggaggcgtgtagagtagggttcttgttgagaaggagggcttgggcttcccgcaggaggggcagtccaggctgagaactggggcgggcgcagggtcccaggtgggtggtggcggtggggtgaccgtctccctgctgggtggggtcgcccgtccggtcgaggccgtccaggggtgctaatgggggcacaggcaatggcaatgttggaggcccccttgggttcccggtacactcctcgggtttccggcctcttcccagcactcaggggctcctgagggcggaagagctattcccagcttggcggggcctgggagggggctctgggcagacgtaggcgccgggctgcaccttccctgcccgcctgtttgcacttctctgtgactgttggcttcaggtccttagccagcggagggctgactccggcctggctgccccctcccctttgcctcccgtccctccccctggacactccaacccccatcccttcgtgtccctccccctcctctctctctgctcctccctcgccagaccccccgctctccccggaacaatggaggggaatgtggctaggccagcctgacgctgctgcgtcaacctctggctcgttctcggcctctatcgcttccagggacccttctatctgggctcagctgacccgccccgcctctcggcccacgtgccggcagttctcccaggctggggctcagctgcgctggagactgggatgggtcagctcagtgtctctgtctgtttacaaaggaggaacccaggtgcactaaggtaacttcgctactctgctagagtctcaccccgatccctgcgccatttcccttccacctcctgcactgttaagccttgggctgtgagatgggccagtgtagcccggctactgccgtgttccctgggtcagggacagctgcctcactgggagcgccttagaaatgtagaatcttggccaggaatctggagcctgtaatcccagcactttgggaggccggggtgggagaatctcttgagcctgggaggtcgagaccagcctggacaacacagtgagaccttgtctctacaaaaaataaaaaaattagctgggtgtggtagcacacgcctgtagtcccagctacttgggaggctgaagtgagaggatcccttgagcccaggaggttgaggctgcagtgagccatgattgtgccaccaaactccagcctgggtaacaaagcaagaccctgtctcaaaaaaaataaaaaagaaatgaagaatctcaggccccaccccacacctgctgaatggcaatctgcatttgaacaagatccccagagattcctgactgcattaaagtaggaagtagaatcactggcttaactctgtgccttagtttcctcatctgtaaaacagggctgctaaaagtgcctcccctgttgggtcgatgtttacgtgcatgtagttgatgtttgtaatcccccaacagggcctgacgcagaagtctgtggacagtggctgtagggtgtatgaaagcactacagcctgccccatccccatagtgcgggccactacccaccacacctgccagcagtgggctggctccgggctggaagctgccccaacaccatgcccaaccctggccttccccagccagcatcccatggaaggctcaagacaccctcattttgcagagcaggcttggagaggttctcgctttgccaagagtgaggtgtctgacttgaactcttatccccctgccttctatcatcctgtcttcaataaaggggctgaagctattaagaatggaatctctggctgggcacggtggctcatgcctgtaatccgaggactttgggaggctgaagcgggtaaatcatgagaggtcaggagtccgagaccagattggctaaaatggtgaaaccccgtctctactaaaaatacaacaattggctgggtgtggtggtacatgcctgtagtcccagctactcgggaggctaaggcaggagaatcgcttgaacctggggggcgggggtctgcagtgagctgagattgtgccactgcactccatcctgggcaacagagggagattctgtctcacaaaaacaaaaatgaatggagtctccttcaatgagc

SEQ ID NO: 15263 - DNA, 2300 bp, Homo sapien
cccgccaccgcgcccggctaatttttaatatttttaatagagacggggtttccccgtggtctcgttctcctgacctcgtgatccgcccgcctcggcctcccaaagtgctgggattacaggcgtgagccaccgcgcccggcctatttatttatttttaactttttttcccccccgagacggagactcgctgtcgcccaggctggagtgcagtggcatgatcctggctcactgcaacctccacctcccgggttcaagtgattctcctgcctcagtctcccaagtaactgggattacaggcacccgccaccaagcccggcaaatttttgtatttttcatagacacggggtttcgccatgttggccaggctggtctccaactcctgagctcaagtgatcctcctgcctcggcctcccaaagagctggaattacaggcgtgagccaccgcacccggcctcaagtaaatttttgtgtggacaaacatttttatttctcttgggcgcgcagacacctaggagtggagttgatgggttttatggagactccagggctcgtggtttgaggaaccgccgggctttttccacagcagctgcgcggttgttcccaccagccgtctaggacggttccttgcctggcttggactagttggtttcgctgctgggccttttccccagtggccccaataggggctgcagagtgaggcaggcacagtcctcaccgccgcctccgggggccctgttgtcccgggcgagctccggggacctctctccttccccgcgcccctcaaataccaagctgaccctggtcccgggatctaggctcgccttcaggggctgctctcgactggccgtgcccatgggctggtcgcctctctgtgcctcagtttcctctcctgcaaaacagaggtaacattttttacctccaaaaacagaggactcaaggaaggctagaaatgaaacaagagaagagaacaaaatcaaaatccccaacgagaaaacaaaaccctgtttttctggtgtgtgtgtgcgtgtgtattttttctttcccttttcctcctttctgttttttgcttgttttcttccgtctctcttttcattcctttatttcctttctgctaaaagtgacaccctccgggattatacagattttagagccaaaggcaggtgggagccgcacctggcgcgcgtggcgaggggaaggaactgcacgggcgcagggacacagttcccccactttgcaggggcgttttctgctggtgggtgcagcccagctccgccccgccccgccccgccccggcccctacgtcccgcgctctgcgttccgctctcccgccagtctaaggcgcggacacaaaggtcctgtccgggccactcccgccccgcccgcccccaccgtcccgggctccctcccgcagccccattggccgggagctcctgggggcggggatcggcgccccaccccccctcgggccacgccccctccccagctccgcgctctcagtcggagcgaagcggctggcggagcagaacggattgcagggtagggagctcttctcggggaccccaggataggcgcccctggcccgcggccccgggagccgcaggggtggggcctcggcctcctctgcctccatcgtcccccatcctgcagggtcttctagctcggcagaggagggctccgggctgggtttctcggggcctgtttggggaacgcgggttgctcctccccaggggaaggggtgggtgtggcaacagcggcaaggattctaggcggacgtcgggtagtacttcccgcctggccacctgttctctgcgtgcaggggaagctcttcccgccctccccgctgcttttgcctttgggcgggagccctggacgggggactcgccgggcggtggggcgaggcgcggggggcgtcgcacgcgggaagcagagccaccccccgccgggcctggccgcgccagctgtggctcgaggttgggacggcggccaggcccggcgggggaggtggggagccgtcctggcgccgcgcgattagccgcatctgggggaggaggagccgccgggcgcgctgggcccgggtgtttgcgcccggatgggggtgggggtgccttaggcgctggagaaaaacttcacccgcgcccacaggccccctttccgcaggctgcgctggcggttcaggtttgcaggccggaagtgaaatgttcttttttgatttttaaaaaggaagcctccggccctatggttttctggggttggagtggatgtgtgtgctgggggaggcggagacgtcccgctccaggcag

SEQ ID NO: 15264 - DNA, 2300 bp, Homo sapien
gttcctctatgttgtagcttgcatcaagatttcattcctgttgatgagtgaatagttgtctactgtatagatacacaacattttgtttatcctttcatcacttgatggacatctgagctgtttctcccttttggctactatgagtaatactgctataaatcttactctgtcacccaggctggagtgcagcagtgcagtcacggatcacagcagcctcgatctcctgggctcaagggatcctcccacctcagcctccccagtagctgggactacaggtgggtgctactactcctggctaattaaaacttttttttttttggtaaagaaggggtcttactatgttgtccaggctggtcataaactcctgggcttaagagatcctcctgtctcggtctcccaaagtgctgggattacaggcgtgagccaccacgcccagcccaacaagtaaatcattatttatctatttatttatttttgagatggagtcttgctctgtcgcccaggcaggctggagtgcagtggcactatctcggctcattgcaagctccgcctcccgggttcacgccattctcctgcctcagcctcccgagtagctgggactacaggggcccgccaccgcgcccggctaatttttaatatttttaatagagacggggtttccccgtggtctcgttctcctgacctcgtgatccgcccgcctcggcctcccaaagtgctgggattacaggcgtgagccaccgcgcccggcctatttatttatttttaactttttttcccccccgagacggagactcgctgtcgcccaggctggagtgcagtggcatgatcctggctcactgcaacctccacctcccgggttcaagtgattctcctgcctcagtctcccaagtaactgggattacaggcacccgccaccaagcccggcaaatttttgtatttttcatagacacggggtttcgccatgttggccaggctggtctccaactcctgagctcaagtgatcctcctgcctcggcctcccaaagagctggaattacaggcgtgagccaccgcacccggcctcaagtaaatttttgtgtggacaaacatttttatttctcttgggcgcgcagacacctaggagtggagttgatgggttttatggagactccagggctcgtggtttgaggaaccgccgggctttttccacagcagctgcgcggttgttcccaccagccgtctaggacggttccttgcctggcttggactagttggtttcgctgctgggccttttccccagtggccccaataggggctgcagagtgaggcaggcacagtcctcaccgccgcctccgggggccctgttgtcccgggcgagctccggggacctctctccttccccgcgcccctcaaataccaagctgaccctggtcccgggatctaggctcgccttcaggggctgctctcgactggccgtgcccatgggctggtcgcctctctgtgcctcagtttcctctcctgcaaaacagaggtaacattttttacctccaaaaacagaggactcaaggaaggctagaaatgaaacaagagaagagaacaaaatcaaaatccccaacgagaaaacaaaaccctgtttttctggtgtgtgtgtgcgtgtgtattttttctttcccttttcctcctttctgttttttgcttgttttcttccgtctctcttttcattcctttatttcctttctgctaaaagtgacaccctccgggattatacagattttagagccaaaggcaggtgggagccgcacctggcgcgcgtggcgaggggaaggaactgcacgggcgcagggacacagttcccccactttgcaggggcgttttctgctggtgggtgcagcccagctccgccccgccccgccccgccccggcccctacgtcccgcgctctgcgttccgctctcccgccagtctaaggcgcggacacaaaggtcctgtccgggccactcccgccccgcccgcccccaccgtcccgggctccctcccgcagccccattggccgggagctcctgggggcggggatcggcgccccaccccccctcgggccacgccccctccccagctccgcgctctcagtcggagcgaagcggctggcggagcagaacggattgcagggtagggagctcttctcggggaccccaggataggcgcccctggcccgcggccccgggagccgcaggggtggggcctcggcctcctctgcctccatcgtcccccatcctgcagggtcttctagctcggcagaggagggctccgggctgggtttctcgg

SEQ ID NO: 15265 - DNA, 2300 bp, Homo sapien
ttgggaataatgacacagaaaaaaatctgtacatgtttggtacagactcccccgtccccccaatttttttttttttgagacggagtcttgctgtgttacccaagctggagtgcagtggtgcgatctccgctcactgcaactctgcttcccaggttcatgccattctcctgcctcagcctccggagtagctgggactacaggtgcctgccaccgtgcccagctaagtttttgtattttcagtagagacggcgtttcaccgtgttagccaggatggtctcgatctcctgaccttgtgatccacctgcctcggcctcctacagtgctgggattacaggtgtaagccaccgtgcccggccccctgagtgtttttgatgtgcggtttgttgaatccacagatgtggaagacttgactgtattatttctttctttctttctttttttttttttgactgtgttatttcttaagactgtgtgtgaatctacagttatctcaaagtttaatcaagaaaagtttaatcaagtcagtatagtatagtgtagtagcagtcctacaggaatccaggttattttgggaatatccatatttaaaagcatatgtagtcaaagaacttcagccttctcggagtgtcgtgcctgtttgctcaggacttttccattcttcctgcctagggcctcttgtggcagtgcctttgccagtccagctgtgaccctggtctggtgacatagggaggatattctgccctgccttaccctggggccagtgacgattacctgagaattgtacaaggcctggcacataataggggctcattggagttactgattcatgaaatacttaagcagatggtagttccttctcacgtggtcagtattttctctccccctcttgctcccacatagatgcaagctccccagactggctacaggtctcctgagcaattctcttgtccagttgtctcctggcttctgtgtgggaagtgttttgtgtttcatctcccaaactgcttttttgtctgccttgaattgcttgagaatttaagccatgctctatttaggtgcataatgctgacatttttccctttctgttttttttgtagcctatttagagacagggtcttgctttgttgcccaggctggaatggcagtggtgcagcccttgctcactgcagcctttacgtcccacctcagcctcccaagtggctgggattacaggtgtgcaccaccacacccaacttattattttttgagacagagttttactctgtcacccaggctggagtgcaatggcgtgatctcagttcactgcaacctccgcctcctgggttcaagtgattctcctgcctcagcctcctgagtagctgggattacaggcatgcgccaccacgtctggctaatttttgtatttttagtagagatggggttttgccatggccaggctggtctcaaacttctggcctcaggtgatccgcccgcctcagcctcccaaagtgttgggattacaggcgtgagccaccctgcctggcccagattgcttgtcttatacacgttgtttcgtgttaatccttttttttttaaaaaaagacagagtctcactgtgttgcccaggctaaagggatcttcctgcctcagggtcctaagtgcctgggattactgatgtgtggtaaggtgccctgaaatttttcacttacatcaattattcctcctgcttgttaggctgagagggcattgtactttgcctttttaaaattagcttttaattttggagtaattctagatgtacagaaaagttgcaaaattatgacagagcgcctgtgtgccccccagcgactttctcgggttgttaacaatttatatcaccagtgtttgatacagtgttttaaaccagatttgtcacagccaaggaactggcattggtatgttgttaaccaaagtcagattctttcagagtttcaccagtttttccattaatatcctcttctgttcctggactgccttatctaaattgaggttgcttgaatgtttctggtcctaaagacaaggcttctgtgggatgctttaaaaaataaaaaagaatgctgaggtagagctcctagagattctatgcagtcactctgatgtgggtgagagaacctcccccatcccccagcagaggccactgcagagccatgcagagatggctgggaaccacaggcttgggctggaaggtgagtcaggttttcaggttgagctccttatgctggtgatggatggagataaccaatactgacatgtctcagccaaacttctgaagtatatttggg

SEQ ID NO: 15266 - DNA, 2300 bp, Homo sapien
accgtgcctggcccaaccaattttttttttttttttgagatagagtttcgctcgttgcctaggctagagtgcaatggcgcgatgtcagctcaccgcaccgcaccctccacctcccgggttcaagtgattctcctgcctcggcctcctgagtagctgggattacaggcatgcgccaccacgcccggctaattttgtactttaagtagagacggggtttctccatgttggtcaggctggtctcaaactcccgacctcaagtgatccgcccgccttggcctcccaaagtgctgggattacaggtgtgagccaccgcgccgacctggcccaaccaatttttattgagcacttgctgtgtatcccaggcatttgtgatacaacagtgagcaaaacattctttcggggggaagggagatgaacagtacataaatgggagaaaaatgcagggaaagcgggtatagggagatggagagaagacaggtaccacaatcttctggccttgttagggtgaaattctattctcccctgagatgtgtagaaatgtatatcggtttgctccatttttattgacccacactgccttgattaactggaaaagttgagaccctaatcatcagtctgtcaatgactgaatgagacaggacaggagatatattcaccaaatgtctcctggaatagggaggccccgggtgaatgatcccagactgggttgataggaaggaagtaaattaataccaaatgtgaagggtagtgggcttgttttatttttatattattattttattatcactattagttgagacagggtctcattctgttgcccaggctggagtgcagtggcgccatctttgatcactgcagcctcagtcaacctcccaagcgaacctccagcctcagcctcccaagtagctgtcactacaggcaggaggcacaacacccggctaattaaaaatacatttcaaaaatataaaaacaaaacccaaaacctttgtagagagggtggtctcttactcttggcctcaagtgattctcccacctcggcctcccaaagtgctgggatcacaggtgtgagcagctgcgccccgcctggggttgctcttgaggagccaaactttgccagattaggctgacagtgagaaaataaattcttccacggtagatactgggtgaaaaagtgcacgtcagcgggcaagggtaagtaacgacaataacaggaacttctaggcgctgaccccaagctcccttccgggccctatcccgagcagtccccgggcaacctccagcgctcgccccggcgcgctaggctgggacctgaaccccggctgccgggtggcttctgggcccctcctcattgccgctcctgggtctttcggggtgtccggctccccaggatgggaaggattccggttcacctccgcagggctaagtcaccgggcggcccgcctcggcccccagggcccgggggcagggagcgccgagggtccgccgcggggctgcggcgcaggcggtgccggggcgcggcgctgcggggcaggcgggcctcggcggcggcggcaggcgggtcgctccctgctccgcctcccgtgctccgccctgcgctcccgctccgccctccggctcggcgcccgcccgcttgctctcctcgctcgctcgctcgctccgcggccccccatgcggatgtgacatttcacgccgccgccattttgagagcgagccgagccgagctgccgggcgccgcgtccgctgccggagccccgacgacgacgccgaggaggcggaggccgcggctctcggaacgcggccggcccgtcgcccgcccgctccgccgctcccgccggccccagggcccgcaggcccgccgcggccggccaggcctcccgtccgccgcgcccggcccgaggcggggctgactccgcggcccccgaccggccgccctccgcccccggccggcccgcggccccgcagccccggccccggccccggcggcgggaggcgggccccgcggcggcggcggcggcggccgcagcgagcgacgaggccgcccggcccggcccgccggccgcccgcccgcctcggcgccgagattgggcgaatcgcgagcaagtacgtgcgcgtctccctgccgccgccgccgcccgccgcgggccgccccggggccgccgtcgccgacgacgcgcgggaggaggaggaggaggccgccccgccgccgccgccgccgccgccgccccggctcgccgccgcccgcccgccgggctcgcagccccggcccccggccgcaggcgaggcccaggccgcggccgaca

SEQ ID NO: 15267 - DNA, 2300 bp, Homo sapien
gacaaccttgtaggaggtgactgggaccaagagtcagacagccctgggcttcgctgacagccagcaccgctgcttctcgggctgaggccccccctctgggtctgtctcagtgtttgaattcgtaacaatggaggtactgatggtcccccgtggagttactctgaagatggaatgaggcaatgaaatgaaacagaggcccccaggtgtgcgccgttcttatcctgagtgtgcgggcggcaagccctgtttctaggacgtctgccctcattctgatgctgtgcctgggactgaggagcaggtccattcacctccatacagaatgctcaaaacaataggccgggcgcggtggctcacgcctgtaatcccagcactttgggaggccgaggtgggcggatcacgaggtcaggagttcgagaccagcctgagcagcatggtgaaacctcgtctctacttaaaacacaaaaattagccgggcatggtggcgggtgcctgtaatcccagctttttgggaggctgaggtgggagaatcgcttgaacccagggagcagaggttgcagtgagctgagattgcaccactgcactccagcctgggcaacagagtgagactccatctcaaataataataataataataataataataataataatgcaaaataaatcgagccttgaggctagacaaagatggtggggaagaaccacacgggcagaagttccaaggcttcaggtgtcccacttgcagggacgtgactggctgtttctggactagtgagaagactgggatgggctctccctgggtcgacttgatcagacttgggttttcagaagaccttggaattccagcactttgggaggccgaggtggaaggattgcttgagcccaggagtttggcttgagctcaggaatttgggaccagcctgggccacacaatgagacccccatctctaaaaaaataattaaataaaaaaagaccctggactcctgagtggagattagatttagcttctcatctccttcggctccaatgccccaacacccaggttgatcttaagccatctttcctctgagaaggaaacactggttcatctcccatgatgagatgacctttagaagtccttctaggggtgctcccgaccatttctggaccatgtcctattttatttatttacttttttgagacagagttttgctcttgttgctcaagctactggagtgcaatggcgcgatctcggctcaccacaacctccgcttcccgggttcaagcgattctcctgcctcagcttcccgagtagctgggattacatgcatgcgacatcacgcccagctaattttgtatttctagtagacatggggttggccaggctggtcttgaactcctgacctcaggtgatcctcccgcctcagcctcccaaagtgctgggattacagatgtaagccaccgcgcccagtcatttttttttttttttttttgagagggagtctcgctctgtcgcccaggctggagtgcagtggtgcggtctcggctcactgcaagctccgcctcccgggttcacgccattctcctgcctcagcctcccaagtagctgggactacaggcggccgccaccatgcccggctaattttttgtatttttgtttgtttgtttttgttttgtttttgagacggagtctctctctgttgcccaggctggagtgcagtggtgcgatctcggctcactgctagctctgcctcccgggttcatgccattctcctgcctcagcctcccaagtagctgggactacaggcgcccaccaccacgcccggctaattttttgtatttttagtagagacggggtttcaccatgttagccaggatggtctcgatctcctgacctcgtgatccacccgcctcagcctcccaaagtgctgggattacaggcgtgagccaccgcacccggccaattttttgtatttttagtagagatggggtttcactgtgttagccaggatggtctcgatctcctgacctcgtgattcgcacacctcagcctcccaaagtgctgggattacaggcgtgagccaccgcacccggccatttttttttttttttttttgagacagagttttgttacccaggctggatttcagtggtgggatcttggctcactgcaacctccgcctcctggtttctttgcagccctgtgtccaagcaccgttgcctcccctgcatcccatttctgtctgggatggttgtgcagggggcaatggtgcttggacacagggctgcaaagaaatgaacaaaaattcaggcaacgtagtga

SEQ ID NO: 15268 - DNA, 2300 bp, Homo sapien
tgtgtgccgccatgcctggctgtgttttgtatttttttgtagagactgggtttcactatgtcgcctaggctggtcttgaactcttgagttcaagcaatccttgcgtcttggcctcctaaattgttgagattataggtgtaagctaccatgcctaccctcctaaaatatttaactcatataccttgtgactctaaaatactatttctgaggatatatattcaatacacatatgtatatatgcaaggatgttcactgtattacatatgtacaagatgttcattatggcattgtttataatagccaaagactggtcacaatctaaatttgtatcaataggggccctgtaaaatactttgtagtgaatccatacaatgaaattatttgcaatattttaaaagaataaataagtctttaggtcccaatgtggagacatccaaattatgttaaggaaaaaaggcttgtaggatagtacacataaaatcatctttttttttccttaagaagggacatacttgtatataggtacacacacacatacacactcgacgtacacataactccgttttcaaaggtcacaagttatttcctgggaataggattgggaggatgtagaatgaggtaggtagaatgatttttgtttgcttttcactttatattcttccctacaattggaaacctgttttttagccaccgcgccaggcctaatttagcattttagatagtgattgatgttatgaaataatataaccaggcaatacgagacagtgtgaagggtgctactttaggcttgtcctagtaggcttcctaaacaggagctatctgaggaaagaggaggaggaagagcttccagagatagcagactggggcaggaaagagcctagtgtcccagggaaataaggcaggccagtgtgtgagcgtccaggcgaggtggggaagagggggagtgcgcaaggtacaagccaagtaggggattgtgtgagaggcgccagggccagatcctgcaggggtttgcaggccgcggtgagggggtcagattttcttccaaagccgccttgctctgtgcaagcgcactatcgcaggctgcgggcgacgctgcctctggccggcgccctccgccgctccaggccggatggtgcctcccgtgggcatgtaggtggggatggtgggttttgcctctgtgcggtcaccgcctgtctgcgttgctgccttctccggggcctcagaccctggagaaagccccgacaggggaggggggcgcgcagccgcaggggcgtccagctatcgcgcactgcggggggagtaggggcgggcgcagcgctcggcaccgccacgcgggttcgggccggggaaggcaggggccggtacgtgacgcggggcatgcacgtggcctgggagtgtgcttttcgggacaggtgcgggggccgccgcgcgcgcaaaggcgcagacgcacgcgtgcgggcaccgggcaccgtcggccgtcgggttatccttggctccgcgggcggccgccgaggtcctgtccacccggaaggcgcgacgtcctcgggggacgccagggcgcaggggcaactgagccgacttcgcaactcggaagtttttctttggctgtgatggtcgatttgcccgtctaagaaatgggactctgggccgggcgcggtggctcaagcctgtaatcccagcgccctgggaggctggaagatcgcctgaggccagcagtctagacctcgacaacgtagcaagaccccgtctcaaaaaaaaaaaaaaaaaagggggagtactcaaaagaataggaaagcgctttgcaaacttggacacgagttgggcgttttattcactttctctactaccctcctccctttgggagccccaggggctggagtaagcacgctaccacccactatacctctcagtgcccgcggcacaggagccgcactcgactttgcatccccccagggcctgtacacgccggaaaagctcccgcggggtgcggtcgctgggcctcgtcacgtgatccccactcaacgcccctgagcgggggggggagcagcgagcaagtgcgcatgcgcatcccttctagctcttcccctccaccccccacccgcccccttggctcggacgcaaccactgtcagctcctccccctcctcctccttcatccttcctgacattcactcccttcccccagccaattggttacgtcaggcagacaggccgaagaaccaatcacgacgctgtgctcagaagccgccacgcggaaccggccggatccgactaataggggcccttggagcggccacgcct

SEQ ID NO: 15269 - DNA, 2300 bp, Homo sapien
ttttgaagaataaaataccctcattctcttcagaaacagaaacttcttcatttacaagcttgattaaaagcaattcttctaggtaggataggtttaaaaacctgattgcttctaggttaacacattttacatttatcctttatgtggtgtgataagtttagttggtcaatgacttgatttctcttaatgcctccagctctttcagaatcatttaagttttaggtacagcactacaaggtcatctttaggtttgtccacccctttagggttggctcatctaaatcttttcctaaagagatgggaaaagtggtgaccctctctactgttatttacattcaaaatggagttcatgctttgtttatgaagaagtgagaaatcaaaattattgattcatgttataccagtagtgagacactggagaagttacttcactcttgagctgctttttatatttgtaaaattagaataatccaccttctcagagttgtgatggagaagatatgaatgcactctatagcatatcaggtttccaaattgatgttgaattcttgtcctggtccttttcattttaaagtattttttctttctttttaacatcccaggtcctactttgattatttttttaagagaaaagatctgtggacaatatccttgtttttctttgtctttagcaataaagactgtcatctgcttaagagtaggccttattataaagttctggttgttgtgcttccctcttgccattttctttaatagtgcaaattcagcttggcatcctctgtgatgtctggatgattttttttttttttttctggaacatagctttacattgtttgactattgcccatcctttgagagtctgctgtagatgtagcagacaagaaattaaagccgccggttgcagtggctcacgcctgtaatccccagcactttgggaggctgaggcaggcggatcacaaggtcaggagttgaagaccagcctgaccaatatggtgaaacccggtctctactaaaaatagaaaaattagccaggcatggtggcgtgcgcctgtaatcccagctactcaggaggctgaagcaggagaaccctggaggcggaggttgcagtgagctgagatcgagccatcgcactacagcctgggcaacagagagactccgtctcaaaaaataaaataaaacgaaataatcaaagccgggaaaagtaatagagaaatgtacacagtattgttgcttttacggaaagttcaaggataaagtaacgatgttggttaatgccattaaagacatactggtgatgttctgctggcacagcagctcaattaaaactaaataatagtcacttaaattttcaaattttttttcaactaaatgaaaccactaaaaggtagagatcattttaccaaaacccaggtggagtatatgcagagaatttagtctaggagatctgttgggaatggttgagttacaggaagctgttgagaactggaagcaaaatgagtatacccagggaaatgaataaagctttttgttttccaccatgctatttggttttagtgttgagccatcagtcagaattaatttttccttctaaaacatttgctgctgccttcagcttgttcctcattcttggtgctgaatctgtcagtaggaatgtatctccacaatgacgtggtaaatgcagatgagcgtggcctgaggcatgtgcaatatttagacatctgttgaatgatgtgatgcaagttattttaggtaatttcattaaagatacctaatctctctgtttctgttaaatttttttttttaacaagccaagctccaggactgtgataagtaaacactgaatttagaccattaagattaaatgttacatataacattttcattatgactgaaatcatttcagtttatattactgatgggctcagaggccacatcatggtattcactttggttaaattgtaaaatggttttctttagaagggaatacgggctctaatggtcatgatacatgttttctttttctttttttctaacagaaagcgtggatacccatcaacgaagttttgatattggaattcagattggctatcagcgacgcaataaggatgtgttggcttgggttaaaaaacgcagaagaactattcgtcgagaagatttgatcagcttcctgtgtggaaaagttcctccaccacgaaactctagagctcccccaagactgactgtagtgtcccctaaccgagctacttcaacggaaactagctcatctgtagagactgatttgcaacccttccgggaagcca

SEQ ID NO: 15270 - DNA, 2300 bp, Homo sapien
gatttattgttttcctgaactttgggagttttaagcaatgatacagttgaagggactgtttataattttcacatgtttaagttgtgaggctttaaaacttaaatataaggctttgtctaggaagaaaatgatctttaccttcaataaatttataatgtagcactaatccagtatagattggagactgaatgcattcttactcttagggttcatacctctaattcatgtggttaagacagtgttgtggtgaagtaatagggccccttgaaagaatctacagaaacataaattatactgagttgtgctgtactggtttgtgagaacatcagtgtattaaggagaatggtagtttaatttgaatatttaaagaaagtaatttgaatggttctagtactagggccattattaactagtaacatagattagtgacttcaactgggtgtccttattatctgatttgtctgaagtgaaaactgttaaggtgctcttttaaaatgtatttggaaacaccatagttagggtaaatacaatgtcacaattcactcttgcatattatttgcttagccaaatttatgaattctaagttaggccaaattgaaggttttggagttttacattgtgggtgagtctaaattcatgcgtttggcaagcacaaggacatgggaaaagaatctggtattttgaggcaggcttgagtttataatgaaagcaaactcagttcctcttcatgtcctatgtatttaagagaggacagttttccctcagtttttttccccttccttacccctacccccatcaaatacagcccaaccaaataactgtgttcttaatttaaaggaaaatggcagacttgacacctgctgaatatttcgtgtagacagagtatgacaatgaatgagatccccagtcattgcccttgtaagcctgggaacccagtttagtgggagagactaatgtaaacagctttaatcaaaagtatatcaattggccgggtgctgtggctcacacctataatgccggcactttgggaggccaaggtgggtggatcacttgaggtcaggagtttgagaccaccctggccaacatggtgaaaccctctccctatttaaagaaaaaaaagtaaggcatatcaatttatggttatcaaataggtttttttttttttttttgagactgagtgtcgctctatagcccaggctggagtgtagtgctcactgcgacttccgcctcctgggttcaaatgattctcgtgcctcagtctcccgagtagctgggattgtaggcgcctgccaccacgcccagctaatttttgtatttgtagtagagatggggtttcatcatgttggcgaagctggtcttgaacacctgacctcaagtgatctgccttagcctcactgcttgcccctaagtggtgggattgcaggtgtgagccactgtgctggcctcaaatagtttttatcaaagctacttcaattagtggttagcaaggcttaaagactaattcagtgctttattttgacacttgttcgcaacatgttgctttttttcctgtgtcctatgggacctagtcatctgtatgttagattcacagaggaattaaagagataaacatgcatgtgctaaattgatttctgtcttgctttgttatcctataataatgttataaaataacattattataaatttcccaagagttgaattaataccaacaactggtaactcgtttttatgtaaacagcatacttgagaccagaaatcttctggatcactttgtggatctctgcctgccattctcattggtcctctgttcatcccttttctagagcttctccttaccttggcttctcttctgccacattggcctgcctgacctgtcctcaggccctgtcactgccctagattacgtttcccatgtcttcacttccaaatctggacctctcgtttagaccttctctcctgactgccagatggcatgtcccactgtcctccggtgtacatctccaaattgtcccacaggcatttatctcagatgaagtttcaggttggactcattcttctgccccaacagcagaatgactcattgagccattgagccattcagcacattctctatatggcagattcggtgctgtctctggaaatacataaacatagagcgattcctttttctgttgaggcaaaatatggatttggttaatttctattcacgtcatgaatgtggtatgtggaaggtcttctgagagcagaaagggatgtttcacagcacagcccggctgtgtggtgctcagggcaggccctct

SEQ ID NO: 15271 - DNA, 2300 bp, Homo sapien
tgtttctcatagctccctttttagagttcaagtagagtttgatgatattactgtgagctaaagagcctcattgggtttttggcatcatcttcagctacaattccactgtccagtggctgctaactatttgggtactgtacataacaacttagacacaccatcacatttaaatgcacattaccccaaaggattaggtgctggtgttactttcgcaatacagatgagagaactgaggcactaagagattaaaacaaatcctccatttcctctgtgaattactggtgcagttggaattagcactaatttgtttgactttagggtgtgcactgttttttaaaaacaagaatagtaactttatctttttttgtaaaagtgatacatgtgtattacagaaaattcaagccaccaaaggaggacacagaagaatggaaaataatctaccttatttcacgctctccagaaagccatacttaatatttagtgactatcattcaggacatctttctatacatatatgcagacataagaacagagaggtcagggcaaaaatagatgggaattattttaaaaactgcatgcatactcttcatattattattaataaaataattaatttaaattttgcctggagaaaattaaatggtaataaaatttgaagaaactgttaaagtttagataacaacgtatttaccataactgctgctcattctaaagttattcctttaaagttgagggaaaaattatgaaatcatttagaggctagaatctgttttttagtaatttgtttcaaagtttagccttcacttgattttcttttctataaaatttgaagaaattatgtgttcacatttcttttgtctatcattctcaactgggacttggttctgtaaccagaattctcatggttatttagtctcaattttttatttaaatgactcaatgctttccccaggcttgtcctgtgtggaattcttttgattcattcttatttcagcacatttcattgtcaagtattttcttcaagatgaggtcaggagtagtgttatcctctgagttcttgcctgcttgaggttttgtgtgtgactttttaaaacagtattttattgaaatgtaattttagtacatagaatgcacaagtacaatgtgcataactttttttggttgtggggggagcttttgtcaaactgctttattgagatacagttgacataaaataaacatatatttaaagtgtaccatgtgataaattttgctgtatgtttacaccaaaagtcataactgcatgaagacagtgaacatatccatcaccctcaaaggccgccttgtacccctggtaattcctctttttcattttctcagttcccctctttcctggcaactactaatttattttctgtcactttaggttattttaaaatttctagagttttatataaacggaatcagagggtcagtattccatttttttctgtcttctttcattcagcataattattttgagattcacccatactgcagtatgtattgatagttaattcctttttatcgctgagtagtattccattgtaatggatgtaccagcgtttgtttattggtttacctgccgatgacatctacactgtttataattttgggctattacaaataaaactgctactaatatttgtgtgcaagctttgtattgacatgcttcatttgttttggttaaataccaaggtgtgcaatggctgaatcattggtgattgatttttagagaaactgacaaactgcttttcaaagttgtagcattttaaactcctaccagtggtgtatgaaagtttgtttctctacatttcttgcaaatccttggtattgtcaggctctttaacattagctattctaatagaagtatagtggtatctcatggttttaatctgcatttccctaatgagtaaagatattgggcatcttttcatgtgcttatatgcatttgtggtatcttctttattggtgtctgtttaaatgttgatatggttacgctttgtcttcccacccagatttaatcttgaattgtaatccccataatccccataatccttaattgtcaagagagagaccaggtggaggtaattgaatcatgggggcagtttcccccatgctcttctctcgaaagtgagtgagtctcacaagatctgatggttttataaggggttcctcccccttggctcagcacttacccttcctgccgccctgtgaagaggtgccttccaccatgattgtaactttcctgaggactcccaagccatgcagaactgtgagta

SEQ ID NO: 15272 - DNA, 2300 bp, Homo sapien
ttcaccccatccccttctgtcaccatagaacacagagagtaaggggacaaatttctgataacttcttgcccagtggctttttctcatcctgtgatattttttaagattggaatagtctttgaagaggtgcattagctaaaatttacaaatcagtggattgggtcttttcagaatacccgtcatagcaggggactctaaaacaattaatttgggcagtaggaagaacgaaagaaatctaccacaggaaggcacagacattcaatgtatcaggcttgccagagactgggggactctgggggatttgaggttttcatctgagttcatgtctgattctgctttaatgacaggtctctgtgtatttagctatcctttgaatttgtattattgtttctctcccctggggctttgagtacctggaaagttgtgctacacctgagtgttcctcccctcaaagccagggagaagagcaggtctggtaggaagcagagaaacagttacagcggctgtggcagattgctgcccatttgtactccaaggctgatgctcaaagatgctaggtctattcttaaaagttaaacccctcatcaacttgtccagatgctgtcctattatagttgtgcttttattaaacccaggcagcaggcaggagaagaaaatccaagtcataaaatgtaaggatgcacacacttctcataaagttactcttcagacaaatttattttttaaatacaggaaagaatgatcacatttttccatgacagcatgctgtcaaggcctgggtgctggaatgatacaagggaagacacaagcccagccctccaaggagcttttctgtctctatcctccaaagcctgcaaactgttcatgttattgctaaaaataaatagccagcatttattacttactacattccaatccccctactaagcatgttcttactgaatcctcaacataggtctaaatgttggtactgttattatctccatttatagacagggaagccaaggtgcaacaaaggtgagtgtcttacccaagttctcacatcgctcaaacaatggaggtggcaggtgaatccatgagcctaggctgctaatctctctactaattactatctaggatgtggtgagtgatgggaacatggaatacccaaatcctgctccaaaacactgagcgcctggtgattctcttaggtactcaatagtctccctctggtaattacagcctgagcacatggcttagcccaaaagcttttgacggtctcccagccaccaccaccctgaagccagaatcttgcttctgtcaatttctagagaatgaaatgctcatgagaagaagaaagtcagcaaagatgaggcagaagatcctgattctgaaaacccacccaggatcctggggatgggaataggggatattaaaacagggggatgttcagagatcaggaagggagttaggattcagaagagaagaaagatgttagttctctacagcagagacagagtcctgtccatcaaaacctacgttctcttctttctaggtatacagattacgtctcccagcctctctggaagatgcatgtggctgtggggccgagttttgatctacggaatgtgagcagaagtgatggatgtgtgcctttttttctacctatttcaaaagttgtcatgcataattccctgtagttttttccttccaccagctgaattttattatcaataatgactttggaataccatgttgaagatagcagaacttccactggcctgagtctctgagtgacagcatgaaagagagcctccctcactcacctggagtctctttggactattaaatgagaacaaacttatattgagttgcaactaatatatacttcagatctatttgttatcacagctagcattgctctgaatactactctgttcctgaggaaccaggagaaagcctcacagaagaaagaactcttaaatgacatctggttagagccctgtatcccacaggtgctcaatacatgtggaggttgactccgatgtagaaggagttctagaaagatgagctagaatcccaaagataagattatggatctgggggaggagccaagatggccgaataggaacagctccggtctacagctcccagcgtgagcgacgcagaagacgggtgatttctgcatttccatctgaggtaccgggttcatctcactagggagtgccagacagtgggcgcaggccagtgtgtgtgcgcaccgtgcgcgagccgaagcagggcgaggcattgcctcacctgggaagcgcaaggggtcaggg

SEQ ID NO: 15273 - DNA, 2300 bp, Homo sapien
atttccaagacacatctggagccaaaggcccgagggaccctcaggtggggagagctacaggaatctctttggatgttgatgtgtgtttctctcaccctcggcttcgatggtcttgttcagagctgcataaactaacacatttatgtctccgagatctaagtgtggatcttctgtctgtgacacagtggccattgtagtttatcccgaagacgcctatgtacgtaagtttgcatttcctcccttctggtgatgactcagggttgtatagtatctgttaccccttccctcccagagtaaccataactcgttccgtttccaaacagccatggtggtgtccaattagctgtgtatcgctcttcccagagttgttaatgtggtgacatgcaccaacagccgtatgtgtactgtgatctgtaagaagtacaatgccatctgtctgccgaaggctagcatggttttaggtttatcttccttcacatccagaaattctgttggacactcacttccaccccaaactcctcaaatcaaaagccttcaaaacacgaggcactcttggatctaccctgagtatcctccaaactgtggatacagtttagtgagacaagcaatttctcccttctgagttattctctctgttggtggcaaaccacttcatagcaccaacagagatgtaggaaaaattcctcaaagtatttgtcatttctgagtcgcctgcattatcccattcttattctcctcaaacctgtgcatatatgacatgaaatgatatccattttttttttaagttagagacagagaggggaatacttatgcatggggagcctgttagcacagtgcctgccacaaaaacaagtgcccccgacaagatagttgctatgttatgacactttctcagatcaggattttctagtttaaaaattaaatatcataaaaccagcaaataatattaactaaaccttttatatagttctactctgttaattagtgtatttcatgtacatgaatatttttgaagtatttgggataactagccatcagtgtttgcagaagacctcagtctgttttgggccattacggaaacactaagctaatgtagactcgcctggccatttcctggtttcctcctgcattctgctttacattcttgaagaaagggataaagtggcaggttgaaaaattatcccatttcttctcctcatggtgtgcgttctgttttgtaagtattattttcttgcatgtgggcaagtgtcagggatgattcccttaaagctcaaggatgcatggaatagctccatctttgggaaagtacacctgacctacagtgttcctataatgaaaagtggttgcaataaatttcagggtcaatcatagggagacagagggaggcagtgggtgagaggagcttcctttcatttttgaaaggcagaaggggctgactaggtgctggggatgcatgtgcttgaaaatgacattttatttcccggatgctgtacctctgctgccccaagacccagccatggagaagcctggatcgaagggcccagaatagtcaccccaacatctgatcctaaatctgaatctccatgactgtgtagccttttagccctttctaccttctgcccttccagtgcattccagaccttaatccaccccagcaaggatcgcctccatttcctcatgagtctgggatgttttgacatgaatgaattaaaaagtcttcccagaatacagaagagtgatttgtcgtcaagccaaagaggctttctgtcttcctctggtgtcctctaaacccagggggctgccaaatgccacagagacctccagggagagtgagagttatacttggactgacttcatcggtcagaaagccttcccctaacagcagcattatttctgctattaaccccatacatctctggataaagaaactgaaaacgtggcctttggaagaatcaacagtaatgttgtgaaaaaaatatatattcttttcactgaccgaagtgttttttcaaataaataatcagaaatgttatgctacacaaagtttatggtatcccttctctactaattcaatgactcttcaatgtgatgatcccaagcaaaaaaaaaaaaaaaaaaaaaaaatcaactactgatcagatggtcaatttctaaggaaaagatgtagagttattcaaaggtcatctaagtcagttcagtctttgcaaaaagaatatcaggaatgtaacgtccagtggtaaatggaacccacagtatgagaagtaacaagaattaaataggaagcctggaagcctgagact

SEQ ID NO: 15274 - DNA, 2300 bp, Homo sapien
aagccagagtcttgcatgggtgccaaggagtggcctaatcagttcagcccagccatagactcaagaaaggaaacattttcctgttccctgccttatattatacaatcccccattttaatttactttccagcatttccctcacgctttctctgtcttttggattaaaaaaaaaacaaaaacaaaaacccaggaaacccagcatagaacaaccagctcaataatgaatccatttgtctccacacactgtgcccctctcctgtctccatttcagcagccacatccacattcttggaagaagttcccctgcttccaggctacttcaaggtgcatgatgttgattgagcatctactatgtgccagaccttgttgacccctttattaaggctacttccttttcttttcaaaataatcctgagaagtagatgtttttactgccccccatttccagattagtgatcaataaagggaagtaatataatgtccaaaagtgatattttagtttgatccaggtgccatagcaaaacatcatcaacagcagaagtttatttctctcacttcttgaggctgggaggtccaagatgaagcagcagcagactcagtatttggggagggcctagttcctgttcataggccgatgccttcttgattaagtctcacttggtggaaggacctagctgactctctggcatctcttttataagaccacaaatcccattttactctcatgaagccatgaagtcacctcctaaagtccccacctcctaataccatcaccttgggagttaggattttatcctatgaatttgggggtgggaacacacacatttagaccgcagcaggtgacattaggttaagtggaggaggcagggttggaacagtcattgcaaaacctcttagaatttaagacccctttccttccaaggcctgaaaggcagacaggcgttggagatacaggtgaatataaaaggggcagagctcctcccttgaccatgtatttcatgcccagtcgctagaattcaagtcaaccaagccctcacacacccgggccgtcccatgttctctggctcacctcttctggtagcttagaagtggcagcctcagggaggcttctgtttggtagaacttagaaggaagcatgtgggaaatgcagatgtctttgcttttaggattctggctccctgagatcagaggagtgggttcccgtacgggggtggcgaggcacagggagaagcattggagcagactctgtgtgtgtgtgtgtgtgtgtgtgtgtgtgtgtgtgtgtgtcggcgcgcctgtgcgtggagggggataactgtacccagcgcgaggcactgggggaggaggaagcggtagcagagatctgaataattgattcttcagccgcaccagacgcccgggagcgggcggagagcgtggttccaacaccacggacagcagcgcgcgccgccgcaggcgcccccgtcgccagccagccacctatcctggccttatttgccgccgtgcgctctcggaacgggtggccgcgctccgcgtcgccgccgagggactgcggggtctgtctcgacccacctaggagagaggctgcgggcaggagacgctttcgcccgccggagctcgaagcctcttgggcttgagcgggggctactgcgtctcgccggctgagaacaagtccctaagttggtgtggagggcgccgctaccttccttctcctcttcctcggaggcgaccgcagcagaaagacgccccgggaacccggctttgccagtgctgtgaaccagggtgtccaggcgctcaccggactcccgctgggaagtggggagccgaacgcccggcgcggagctggcccagcagcgaagggcccggagggagctgcctttccccgcccgcgcctctctcggccggggaccgcggggatccccggccacacgcgagcgcgctcccacactcacacacacactcgccctcaaacacaccagcccggagctgggttgcggagagggtgctccggcgcgctcagaggaccgggcagttgccgtccggagtggggcaggaagcggagctagggatcttggaggggagctcctagggcttggccggatcatgggaccgggtgagcgctgagaatcgcggccgcagccatcagccctggagatgaccaggagcggccactgctgagaactatgtggagagaggctgcggtgagtgctagcgcgggacgccgggcctgggaggcccccttgggaaggggggaggtgggaggcctgaagagggaggaagcggcaggatcacaagagggt

SEQ ID NO: 15275 - DNA, 2300 bp, Homo sapien
ttttttttttttttttggtttttgagacggagtctcactctgttgcccatgctggggtgcagtagtgcgatcttggcttaccacaaactccacctctcgggttcagtcgattctcctgcttcagcctcccgagtagctgggattacaggcacgcgccaccatgcccggctaatttttgtatttttagtagagatggggtttcactatgttggccaggctggtctcgaactattgacctcatgatccggctgcctcagcctcccaaagtgctgggattacagatgtgagccactgcgcttggcctctctctctctcttttctaagacagtctcttgctctatcacccagggtggagtgcagtgacactatcacagctcactgcagtccctaactcctaagcttaagcgatcctcccgtcctctcagcctcccgtgtaggtggaaggatgcagctaactttttatttttacttttctagaaaagtgggtatctcactttgttgcccaggttggtagttagattctcatgtctgcttctgtattcaatctgtagcaatatcacccgtcgattttccagaggcttctagaaaattccatgtactctcctgactcagagaatgaaaaaagcaaaatcatctttatattattataaaaatagtataattataaaaataggattgacattaaagattacccctagatccctggagcatatttggggaactggctggttggagtatgttattccattgatgacccaacctagattgtccggacttgcctcatttttctcctaactggaagtgacaaggcaggcagctctagcctcatgacaagcgtggtggctcacgcctgtaatcccagcactttgggaggccgaagcaggtggattacctgaggtcgggagttcatgaccagcctgatcaacattgagaaaccccgtctctactaaaaataaaaaaaaaacttagccaggcactgtggcgcatgcctataatcccagctacttgttgggggcagaggtaggagaagcgcttgaacccgggaggcggaggttgtggtgagccgagatcgcgccattgcactccagcctaggcaacaagagcaaaactctgtcaaataaataaataaattaattaatgaaaaagagggcattatggatctaatctactgttgtatttcctgtattttctacacagtgggcattcagtgaccacctgttgagtgagttcatggcatccaagtgcacagccacctaaggcatcgggcctcatgaaatcacaagcagccaaggctggcaggttcctgggacaatttagcaaactcaaggctatggtgcgggtgggtgcagtggctcatgcctgtaatcccaacatatggggaggcagaggtggcggatcacctgaggtccaggagttcaagaccagcctggccaacatagtgaaaccccatgtctattaaaagtacaaaaattagccgggcatggtggtgcacacctgtggtcccagctactcgggaggctaaggcaggagaatcgcttgaacctgggaggtgggaaatgggggtacagtgagctgagatcacgccactgaactccagcctgggcgacaagagcgaaactccgtctcaaaaaaaaaaaaaaaaaaaaaagactacggtgctaggaccaatctcctgagtcacaaaatttaaggagtcgtccaaaaaagtaaataagataaatattttcaaacaatattagaaaattcaaatcggaaactaccgaccgggtgaggagttgtttttgtaaataaggtcttattcctaataagtttcgaaagtctaaatcttcacacgagtcactcaaaagaaaggcccagctcaggagcctgcatctgcgctatggcgggtaagccccggtggctgaccggaagaagcgcccacggaggcgaaccccaggcgcccctcagcctacttccatttcccctcgcgacccttcgccccgcccactctagctggctgtgcctgactggctgggctgccgcatattcgcgctgccattggtccataatcagctgggggtgggcgtagggagacctacttcagcaggtcctggccggaccagcattgttaacggctgcggttcgaagtggctgtgggtattgctgcggctggtgcgtcgtcgctctaggtacgttggggccgggcgagtgtcctgcgagagcggcgattggcggggtggcggctctaggagcgtcggtcgcctctctgagggccggccccggaggcctcggagcgccgggcctaccggacgtttgcggcg

SEQ ID NO: 15276 - DNA, 2300 bp, Homo sapien
aaaattaggaagagcctaataagatacctgtaactcatataacaaaggattgacaaggaatatgtttttggtttttggtttttttttgttgttgtttttttttaagacagtgtcccactctgttgtccaggctgaagtacagtggtgtgatctcggctcactgcaacctccatctcccgggttcaagcgattctcttaccttgtcctcccaagtagccgggaatacagacgtgtgccaccacacccagcaaatttttgtagtttttagtacagacagggtttcacccttttggccagggtggtctcgaactcctggcctcaggtgatccgttcgcctcagccttccagagtgctgggattacaggcttgagccactgcacctggccggaatatggtttataatatgttaagtatgctttgaaaatgaaagaggaaagacaccccaagaagtcatgagcaggaaataaccaggaatttttacagacaagtaaacatagctaataaacataggaaaagatgatagtaattagggaaacccaaattaagacaatgagagctaattctttatccaagtagattggctaaaatcaaatctggcaataccaagggttcaagaggatgtggctcagtggtaactcttacgtattgactgtatggatgcaaactggtaaaactgctccaggaaataatttggttttcttgaaaagttgaacatggataccttttcagtatctagaaattcactcaggaaatgcttacacataagccccttgagacagaaataatcagaatagcattgttgtgtcagaacatcaacaagaactggaaatgtaatcccagcactttgggaggctaaggcatgaggatcacttcagcccaggagtttcagactagcgtgggcaacatagtaagacccaatatccacagaattttttttacaaattagccagttgtggtggtgcatgcctgtaatcccagcctcttaggaggctgaggtgggaggatagcttgagcctgggaggctgaagctgccatgagccatgctgcactccagcctgggtaacagagcagcaagaccctgtctcaaaaaaaaaaaaaaaggaactggaggtgacccaaagatctttcacaaatgatcagataaacaaattttggtatatctacccaaagaattattacagtgcaaagaagaacacgaattattgctatacgtaagcacatggatgaattttgtacatatacataactgaaaaaacaagtattagctatagtttgctcaacaacaaaattaaacagtatatttgtttacatatgacatttatgatgaaactgtagaaaaagtaatagaattataaactaagtttaggatacatcatcaggatggagaagaggtgcaaggggcatagtttggagaaacataagtaaatgcaggttactgatagtattctacttatttgttgcaggtgtttcaaagatgttcactttattatactttgtaattaacacatattacaagtcttttgtatgcatcaaatgtagaggcatttttttactccagagcttaaatttcagcacgttttactaatttgggccttttccaaaggcccttagaagggccatagtaacaatatgttcacgtggttggatgttttcatcagatttacaatagtaagatattttaagtatagtcatttaagacccctgtctctcttcaccttgatttcttctttgtgtcagctggcagtagagtggtttcaggcattttgtgattgggggatttatttgtgtttagtgggatgtgtttgtgattcagagtcatttctggatgtaggtaattatagcctgtcagcctgattgtgttgggaatgtggtctctggtgcctggcacctgtaatatgtgagtattagagaagccaaagtgcaaattatggaaccagaaggtaatcaggaaaaaattcccaattatctgatgtttaaaattttaagtgtaggatttcgttctcatcaatttccagtcaaaacagcacttttctcctgtcaaaaataacatagcacattcaattataaattcaccatatatttattttctttttttgataggaatcctgctttttttttttctttgagacacggtctcactctgtcacccttgctggagtgcagtggtgcaatcacagatcacggcagtgtctaattcctgggctcaagtgaaccttttgcatcagcctcctgaatagctgagaccacaggtatgtgccacacctggttgaattctccctttaaaataatataagaatgtt

SEQ ID NO: 15277 - DNA, 2300 bp, Homo sapien
acatgtgatgatccatagaaaccacacgagtaataggtaatggtcatcggtaaaaataatagtattggccgggcgtggtggctcacgcttataatcctagcactttgggaggccaagttgggtggatcacttgaggtcaggagttcaagaccagcctggccaacaatggtgaaaccctgtctcggctaaaaatataaaaattagctggacatggtggagcatgcctgtaggctcagctactaggaaggctgaggcaggaaaatcacttaaacatggtgggtgaagattgcagtgagccgggatcacgctgctgcactgcagcctgagcaacagagcgagactctgtcccaaaaaatataatagtatgtgttactgagccttttttttttaaataatacattttgagcacattcatttgctcacatgtttaaaagttatgaaagtaaaaatgacaatcatgtctaatgtagagaaaccatggaagaaatgttagtgaagcattagagaagagatcaagtagacaatgttgaagagtgagaacacttggaaacaggaaggaagagccttgggaatgatcaaaattaaagaatataatcatccaggtgatatcaatataagagtttaacgtaggaactatgtgttctattttgagcatcatgaagcaagatactggaggaaaaaatatataaatattataaataccttaaatgtatcataacaggtcatattaacaaagactacttacactgtggtgaaaattgcttaccaggaggatacacactgagtgaaaaactacagtgaatgtttctgaatgtatggctcagcagagctgctcatatcagtgggcattgaaattaattattctccctgaaaatgggccagtctgttttcaaaaaaaaaagataagttcattaatttttcatattacagctactacgatttgttagaatggcatgcattatggcagataacattggtaactacataattgtccttggctatttttcccattttttttttttttttgagacggagtctcgctcaatcacccaggcctggagtacagtggtgtgatctcggctcactgcaacctccacctcctggattcaagcagttctcctgtctcagcctccagagtagctgagactatgttgcctgccaccatgcctggctaatttttgtatttttagtagagtcggggtttcaccatgttggtcaggctggtcttcaactcctgacctcgtgatctgcccacctcggcctcccagagtgttgggattacaggcgtgagccactgcacccggctggcttctttcagttttagcaccgtgctctaactagctgagctaaccaactgattgatattatttcaattttaacaataagaaagccaccccctaaaacaattatggaagtaatggtgattatcttacatatttacttctttcatatcaattcagtgttttttattttatggtgctcttttgcgtattaccttatgttcctataaaaatcctttgagtatcacttgttcaacatttattatattatctactcatttgtcaacaaggaaaatgaagctcaaaaataatgtgactgactaaagggtcaagtagcttattagtggtaatgtcaagtctcacacttgtgtaatttgttctatatctactacagaccaaccaaccattttcatcaggtgctggttttcagataagtagagttcctttatatggaatactaactaggagttatggatattaaaaaatataaatggcatatagtcttttaattgtttctataatgtatagtatggaattcaagtggaactataggaaactaaagttagcattatgagaataaatttaatttctaacatgtccagtatacttaaatattggatgtgttctgagtttaatattcaagttttgaaaaacttactggtatagttatataaacatacaaatataaataaactatatttaattggttacagtaaatctggaaaagagcaaggctttttaagtagaaagtaaaattgcttttaaatttgaaacgtagggtgttttggtttttattttaaaattctaggtcagacatttgattcagcaggagatctatagcataaattatgaactatttgataagaaactgaaagaattgaaccaacgcattgggaagacagagtgcagaaataagcatgaaggaatagctgataaacttttggtaagttttgatttcatttgagtcttttttaggggagtagggggtgttgttgctctgttgctcaggctgcagtacgg

SEQ ID NO: 15278 - DNA, 2300 bp, Homo sapien
tgtctcattcggacccaggaaccaatcctcgaaccctcagttttttggccaaagtttgggtcatatgaggattggatgtgtcagctttcaatagaacatattaatagtaagagccctacctcccaagaggaaataggttatgccctatgttggtggcaaggacctgtactccttcaccccctaaagactggagggaacaagtcaaaaactaacctttggtggaaagttggttgtaatcacacctcatcaagttagaaccatcttaaatcaaaaggcaggaaggtggcttactgactcaagaattttaaaatatgaagctatcctgttagagattatttaacactatccactgatgattcacttaacccagcaggtttcttgactggagatccaaatctaaagagacctgaacatgagtgtttagatttaattaattaccatacaaaagttaggcctaatttaagagagacccctttcaaaacagggcagcacttatttataggtggctcttgctgagtaactgaaggaaaaagatataatgggtactcagtagtcaatcaatggggaagcccttgaagaagtagggcttgaagtagcccttgaagaagtcaggaagactgcccaataattggtctgcccaaacatgtgaattgtttgcattatatcaagcctaaagcacttgcagaaccaagaaggaactatttatactgattccaagtatgctttcagggtagctcacacttttggaaaaatttcgattgaacaaggctttattaatagcaaaggtcaagacctagttcacaaagagttaatcacccatgtatttaataatctccagggccaggcgtggtggctcacgcctgtaatcccagtactttgggaggccgaggtgggcagatcacctgaggtcgggagttcgagaccagcctgaccaacataaagaaatcctgtctctactaaaaatacaaaaaaattagacagtcatggcggcacatgcctgtaattccagctacttgggaggctgaggcaggagaattgcttgaacctgggaggcggaggttgctgtgagccaagatcacaccattgcactccagcctgggcaacaagagtaaagccctgtctcaaataaataaataaataaataatctccagctgccagaataaatagctattgtccatgtcccaggacacaagaaaagcctttcttttgaaagtcaaggaaataaccttgcagatcaaatagccaaacaagtggctgtttcctctgagaggcctgtttttcacttaactccttgccttcctccccctaccacagtccccattttctcttccactgaaaaaagaaaaattaataaaaacaggggctaaagaaaactcagaagggaaatgggtattatcagaccaaagagaaatgttatccaaacctctcatgaaggaggtcttgtctcagctgcatcaaggaacccattggggaccccaagctatgtgtgatgcagttctcagagtttatgggtgtataggaatttataccctagccaaacaagttacagatagttgcttaatacgtaagaaaactaataagcaaactctaaaaaaatcaccacttgcgggaagacgtccaggactaagaccattccatagtgtccaaactgattacacagaaatacctcaataggtcacctaaaattcctattagtaatagtagatcacctcactcactgggtagaagctattcccttttcaaatgcaactgctaataatgtagttaaggcattaattgaaaatattgtacccaggtttgaaataataaaaaacattgattcagataatggaactcgtttcagtgcaaatattgttaaagggcttactcaaactctaggaataaattgggaatatcatactccatggcatccaccttcatcaaggaaggtagaaaaaaatgaaccaaactttaaagaatcatttaaatcgattttgaaaacttcattgccttggaccaagtgtctccccattgccctgctcagaattcaaactgcccctcaaaaagacattacgtacttggtctatcttctattcgaactgcccctcaaaaagacattacatacttggtctatcttctactttgtcttctcttaggacccaaggtctcttagcacaaacactgcctcttgagttcccagtgcatctgtatcaatctggagattacgtcctcatcaaaagctggaaagaagaaaaactcgaaccaacctgggagaccttatctagtgcccctaaccactgagacagcagtctggaccgtt

SEQ ID NO: 15279 - DNA, 2300 bp, Homo sapien
cgtggcagtcagtcatttgggaaatgattgacttttagtaaatggtaccatcttgtttgctgtttatgttgggggaaatatgaaattggactcctttgtaaagctatacaaaaaaactcatatggattaaggaactaaaaatatctaaaggaaattataaagcttttagaatatataatgtcttcatgaacttggatagggaatgttttcttaagacataaatgccgttgccataaaagaaaaattgattaattttaccacattgaaattagaaacttcgtttctcaaaaggcactataaagatagtgagaagacaggccatccgagttggagaagataatcgcagcacatataacctgtagaggactagtaacgcagaatatatataaagaacttcaacaagtcaatgagtaaaagccaaataatacaaaagaaaaatgggcaaaagacttgtgcatccacttcacaaaagaggagttcgaaatggccaatatacatatgaaaaggtgtttatcttcattagtaatcagggaaatgcaaattaaaaccacaatgagatatcatttcatatcaggtaaggaaaaaatacatttaaaaatctgactactgggtattggtgaagttttgaaataaagggagtagtatttaatgttttgttgcgtgagtaaattggtatagtactctaaagaaaattggcattatctggaaatatcaaagatatgaatatcctttgacctagcagtcccagctcttgatatatcctagttagaggtatatctattgcatgttgatatgccatagaatatatgtttaggaatgtttattagcagcattttttataatggccaaaaactgaaaggaaaaagtgtccatctacagttgaaaaagaaattaccctaaatctatacggtggaatgttgcaaatgaatgaaaatgaaggaactgcagtcacatgcaacagtatggattattcccacaacgtatgattggaaagcagacacaaaagactcatatgattccatttaaatgaagttcaaaaatagccataaaacaaagtgcatgattcagggattctaagctggatagtaaatctaaagagtaaaacaaggagattagtaccacatatgccatttatggtgaggaagtttatgatataggatagaagcatatggatttctgaagtgctgataatttaaaatttacttacctgaatatggctgcatgggcactggcattgtatttatttaatggaaaatatattttaatataatctgaaaataattatcttttaatcagaaaaatgatttatgcttagtgtaatctgactgatgtgtgtggatttataattacaatcttactacctgttttctgtttgccctgttttatggtccttttcctcatatgtatctgtctctctgttatagccatcttttgaattaatcttttttccattccccattactttgttaattttaccgttttcattattcctttagaagttattctaagataatgatatgtattctttactcggaatagtacttctgctattttatagacaatgcttgatcttagaatactttagctttgtttactgttttccccatcttatgtgtttttgtgcgtttcgattttacattaagtcctagaggatgactactaggtaccatcattttttatttcgagttacccacatatttatgttttctcttgctcatttcttcctgtagtttcatctttccatctgggctcatttttttttccacaagaagatctccatttattatttcttttgcttttagttttgcttaggaaaaatgccatcagtttttatccggaaatgacttcattttgtcttaattttgaagggtattttaacttgggtatagaattagaggttggcagttatttttctttcagcactttcattttcatcacattgctttctgacttctatttctgttgaaatgttttaacatttgttttatttttgctttttcaaagataagtctctagctgcttttaagatcctctactttggttttcatcaatatactataagatgttaggtggtggggtggtggtagtatacttagccttttaaatttatactgatgggggcttgtggcccttcttgaatctatggcttgatacctttcattatcttgggaaaattcttgacattattgcttcagatattgcttctggagcattctatgtcttctgtcttactggtttctaattatgtgcttttctatatactccatctgttttgctctagatacttttgtctggatatt

SEQ ID NO: 15280 - DNA, 2300 bp, Homo sapien
gataggtcccccaaggaaaaccacagaacctaagctcatcttagctctaatgtctgtaaatattgggacagcaagtatttctttttttattttttgagatagggtttcgctctgtcgcccaagctggagtgcaggggtgcgaccttggctcgctgcaacctccgccttccgggttcaggcgattctcctgccgcagcctcccaagtagctgggactacaggtgtgcaccatcacacccagctaatttttgtgtttttagtagaggtgaggttttgctatgttggccaggctggtctcgagctcctgggtgcaagtgatctgcccgcttcaacctcccaaagtggtgggattacaggcatgatccaacgcacccagccaaggaccacaagtactaaaattagggtgcttttggccttatgtgagagaaaatcgaattaactgtgatttcagccacaaagatagttactatttttacataacaagtactctggaggtagaaaagtttctagagctgatttagcagcgtctgcgtcaagcacttccgctcattccatccttctattctgtcatctttagtgttggtgttgacctcttcgtggctccaaaaagtttgctgcaactccagatatttcatcctgccccgacaatatttaaagcagtcagcaagagaaaggagagcaatttaaaaaagctttctcctccctcatcgctctcttttcaggcagtcatatttttctttttttttttgagaggaagtttttgctgttgtgcgggctggagtgcagtggtgcgatctcggctcactgcaacctctgcctcgtgagttaaagcgattctcctgcctcagcctccctagtagctgggattacaggcacctaccaccacacccggctaattttttgtatttttagtagggacggggtttcaccatgttggccaggctggtctggaactactgacctcaggtgacccacctaccttggcctcacaaagtgctgggattacaggcatgagtcaccgtgtccggcccagggagtcatatttttcactgaaggttttctgtggtcagaactgggatacatactgacccatcagctataacaagtaaacaggaaccagattgccaagaagaaggttggcaaactatggcccataggtcaaatctggcctgccacatgtttttgtaaataaaatcttattgtaacactgccactattattcatttttgtattgtctataggtggtgtcatgctactgtggcagacttgtgtgaccatggcccacagaaaacctaaactgcttactgtctggccctttacagggtacgtctgtggacctctggcttagaccaattatgttcaccctctgggttggtgatgtggctgcccaaacaaaactgggtttagttagcaagaatgggaagcaaaatagctacagggtaggtgacaatatccttccacaaaatatcagttgtaatttttccaatagactaaaataaatacctattaataataagagcttaaggctgcacgcggtggctcacgtctgtaatcccagcactttgggaggccgaggcaggaggattgcttgagctcaggagttcaagaccagcctgggtgacatggcaaaatcttgtctctacaacaaaataataataaacaaagaataaaagctgaagtttgtcttcaactctggccgtatgcccctgggctacccagggtgcactgtggtccatgatttattgaaaattcacctttcttcctgacaggtctgtgtgtcatgattgcggcctccatttatacagacaggcgtgaagacattcacgacaaaaacgcgaaattctatcccgtgaccagagaaggcagctacggctactcctacatcctggcgtgggtggccttcgcctgcaccttcatcagcggcatgatgtacctgatactgaggaagcgcaaatagagttccggagctgggttgcttctgctgcagtacagaatccacattcagataaccattttgtatataatcattattttttgaggtttttctagcaaacgtattgtttcctttaaaagccaaaaaaaaaaaaaaaaaaaaaaaaaaaagaaaaaagaaaaaaaaaatccaaaagagagaagagtttttgcattcttgagatcagagaatagactatgaaggctggtattcagaactgctgcccactcaaaagtctcaacaagacacaagcaaaaatccagcaatgctcaaatccaaaagcactcggcaggacatttcttaaccatggggctgtgatgggaggagag

SEQ ID NO: 15281 - DNA, 2300 bp, Homo sapien
tcccgagcagctgggattacaggtaagcaccaccgcacctggctcccttttaatagacgctaaacctcagactcatggactctttcaggcaacagtatctggctacaatttactaacactgttttatttcaatagtgtttatattcataagtttgtcttctacttttggcagatggcactggtttcctgtttaccatagcaatatagggctttctttttcaaataaacatattaaaatcaacggagttaatttaaagaaaacaattaagtgaataccagttcaggtggaaggtggatatggcaaaatttagagcttgagtgtggttagcatttggtaaatagtgatagggtggaaagaggagaatggggtttgctgcagtgagtctgggttcaaatccaaactttatcaactgcatagagactttgggtaagttactggtgtagcttctctgagccttagtttcttcatggataaaatgagggtaacttgttttgcagggctgccgtgttctattgaaggttatgtttgtaaagtaaccggcacacactaagccctcagcaaatgcagaaacctgcctgctccatcccctacctggcctttccattctgggagactctggagttttctctgtcctccacatggccataggcaggtaggtgggcccttcctggtcctcctctatagcaaccagacctcaccctcctccccttttatggaggaagaggactcagttcatattagtgccttcctgtcccctctccagctccaaacacacacacacacacacacacacacacacacacacacacacacaattatcttgggggatgggagtcttggttaactgtagaattaaaggagatttggcaggtcagaccctaggccaacttgggaagctcaaggcctgggggagggggtggccctttagaggggatctcaaatcccccaaggatctctaatttagagccaacaaggccctctcgtgacagagctcctcagcaggactaaaaaaagatgctcaacagaaaatacaaacatggagtccaaccagagcacaggattgcacaataaattaacatttcttaaaagggtttctcattctcttgtcagtagcacaagtcaattgccttgtattctggggtatgtgcaagtaacatgaacttgttaaattaaaagtttaaaatatactgttatatgttgtgaccctgttttggaatttcttcaatttgtaaaaatacactgactcccactccctccttccacacacacacgatggggctcaggcgcctctggtctcctcccccatcctcccaagagcccctagagcagatcagccctcccagtttccagatggggaaactgaggctggaaagaaaggcagttcctttgatgtcatttccagggacactaaataccaggactgtgggttgaaaggctgtggggagtgctttgtgtgagtgtgtgtgtgtgtgtgtgtgtgtgtgtgtgtgtactggtcgggtggggggagtgaacggggggtcctggaagagtctgaagactggttgctgggcatctcgcaccaaggccaggactccaggtgagatgataaaaataacaatggctgacgtctatggagcaggtaccatgagccaaacattgtggacgtattaccaccttccgacctataatcactcccattcccagaagaggaaactgagacaggggagattatggacgagctcaggaagttcataaaaggccagagaaggggttctagagcagggagcccggattccaaaactccttagggaagaggaagaaaaggggagaagaggagaggaaagagaatgagagggatgtggaaacctgcagagaagggaagacccttgctcccgggagcctccctttctcccttttcccccgggcccgtgccaccggctccgccccaaagctggccacagagccgcagggaggcgggcgggaacggtggtgcgggggcgccagggcgctcccggcctcggcctttccctccagggccccctcctttcgccggcggcccctcccactcggctctcccggctcctggcgtcacggcccgggaggcgggatcggggaaggaggggccccgccgcctagagggtggagggagggcgcgcagtcccagcccagagcttcaaaacagcccggcggcctcgcctcgcacccccagccagtccgtcgatccagctgccagcgcagccgccagcgccgggtgagttgtgggcgcacccagggcgcggggcgacatcgggggggccccgggatcgtgtacgcccgg

SEQ ID NO: 15282 - DNA, 2300 bp, Homo sapien
ggagttcgagaccagcctggccaagatagtgaaactccatctctactaaaaatacaaaaaatcagctgggcatagtggcatgcacctgtaattccagctactcgggaggctgaggcgggagaatcatttgaacccaagaggcagaggttgcaatgagccgagatctcaccactgcactccagcgtgggagacagagtgagaatctgtctcaaaaaaaaaaaaaaaaaaaaaatagaatgggtgcagtggttaggaggctccagaagaggcccagggagtggggaaggctgcctgtgctgtggtggtgacatcaagtggaagaaggaccagaaaagggtgagatacctggagaaggcaaagttggcatcgagttggcctgtgcaccttccctttatctttcatgaactattttcctactaatcctctaggacagggttggcaaacttttcctgtcaaaggctagatgataactgttttcagctttgcaggcaatacggtttctgcctctatactgcaaaagcagccgtggacaatctgtacaaaaatgagtgtggctgtgttccaataaaacttcacaaaactaggcagtgggctggatttggtccacaggttgtagttttgacaacccctgctctggaacttagctcaaaagtcgcttcctccaggaatccttcctaaactccacggtttatttgcactcaccatctctgggtggccactgcgttctgagactgtgttttcattgctccttccatctcatatcttttggctagaagcactgaccctgagccagactgcatggttatgatgaatcctctataaacttggacaactttcttaacttctctgagcctcagtctccttgtttgtagaatgaggataggaattactgtcacaggaggctgaggcaaggaggatcacttgagcctgggaggtggaggctgcagtgagctgtgattgcaccactgcactccatccaacctggacaacagagcaagatcttgtctcaaaaaaaaaaaacaaaaaaaaacaaaaacaaaaaataactgccgtgaggattgagttaatgcaggcataacacctgaaggagtgcgggcacatagtaggcaccatgtttgtgctagtggctgtgatcttaatgtactagttgatttacttgcctatatgttttcagagcactgctcctgatttaaccttgtccccctactgcttaataactgcctggtactccttacatctttctgcaatgaatggaaggaatctacaatgttgaggtggtttttttgagacagtctcgctctgtaacccagtctggagtgcagtggcgcaatctcggctcactgcaacctctgcctccctggttcaagtgattctcctgcctcagcctcctgagtagctgggattacagacaccccccgccatcacgccccagctaatttttgtattttttgtagagacggcgttttgccatattgcccaggctggtcttgaacttccgggcccaagttccctgggctcaagtgatccacctgcctctgcctcccaaagtgctggaattacatgtgtgagccaccatgcccagcctgcaatgttgagttttgtactgaggtttttttttaaagaatgaagcatgcatgaatgaatgccttaaatgtccctttttctttttttcatgcaaagacccatttttattatggtaaaatacacataacataaaacttagcattttaaccactcttaagtgtacagttctgtggcattaagtacattcatacattgtgcatccatcaccacaatccatctccagaacttttccatcttcccagtctgaaactctgcacccattaaacactccctccccttttccatctccccccatatccatggtaatatcatttggctgtgtttccacccagatctcatcttgaattatagctcccataaaccacatgtgtcagtgggagggactcagtgggaggtaattgaaccatgggggcaggtttttcccgtgcttttctcgtgatagtgaataagtctcttgagacctggtggttctataaaagggagttcccctgcacattctcttttgcctgctgccatgttagacgtgcgtttgctcctcctctgccttccaccatgattgtaaggccttcctagtcatgtggaactgtgagtccattaaatctctttttctctataaatatcccagtcttgggtatgtctttattagcagcagcattagaacagacaaatacaagtaactaccattctgctttctgtctttgataatttgactactc

SEQ ID NO: 15283 - DNA, 2300 bp, Homo sapien
gatgttacacaaaaaaccttttttcccctcgcctccccctacacttcctccaaaataatattttaccataaccatttagtgcttaaaaaaatactcgaaactttttcgtccatttcttggctgccttctgtgtgtagtcccctcctgtatgtgacgtcccatcttagaagatcctgagaggtaagggttgtgaacgtcgggaggaccagggcccacttgcttttctgatcccacgctagaagatgtgggtgtgatgccttccttaaaggttttctgtggaaatgaaataaatgagtctatgtaaagcacaagaacattgaagatgcttactaaatgttatttatcttcatttttgctgccttggtcctctcatacccactcgtgattttaggcgattgggggaaaattgctattgaacatcatactctactaacaaagaccatttgagagttagattcatctctttcccagttcaacagcagaaagaagccccacaaatcaagcactcctcttgttctgtaccttgtcactttgttgctactctcaccagccaaagagggaggaaaatttcttggtgtaattaaaatattgttataggctgggtggtggtggtagggtgggggtggggggctcgtgcctgtaatcccagcactttgggaggccaagacgggacgatcgcttgaggccaggagtttgagaccaggctgggcaacatagtgagacccccatctctacaaaaaaaaaaaaaaattagccaggcatgatgacatccatctgtagtcccagttactcgggaggctgaggcaggaggatcacttgagcccaagggtttaaggctgcagtgagctacgatcatgcaactgcactccagcctgggcaacagagcaagactgtctctctgaaaacaaaaaattgttatagaatgtagagttaataacttttctggaacaagaaagctctcgttttagatacccattcattcactcattcaatagtgtgctggatgccaggaatttaatggtgagcaaaatagacgtggtctctgcctcctgatgctcaagatccctccctctatttttaaaaatcaggtttattgaagtataattgatgtacagtaaattttactctttttagtggaaacttctataggtttccactaaatgtgtaaccaacacaattaagatctagaacatactgtctcgcccctcccgattttcttgtgctcctttggagccaacaactctcccccaacctctagaccctggcaaccactgatctgtcctctgtccgtatggatttgtcttttccagaatgtcatatacatggactaatacacagtgtcatcttttgagcctagctgcttccacatagcttaaaatttgagattcatttgtgctgttttgagtagtattgctgagtggtattccatggtaccaatgaaccttgtttttttattggagacagtcttgctctgccacccaggctggagtgcagtggtgcgatcacagctcactgcagcctccacctcctggactcaagccatcctcctgcctcagcctcctgagtagctgggaccacaggtgccagccactgtgcccagctcgttttaaaattcttttgtagagatggggtctcaataagttgcccaggctagtctcctatactagtctcctatactagtaactcctgtacttgagtgatcctctggccacagccttccaaggtgctgaaatgacaggcatgagctaccatgcctcacctcagatggaccattttgatgccatgttggggacaaagaaagaaagaaaacaactcgctttgaccaaattgtccctgagctgatgaattcactgggtaaactacattaattttcctcccgcccagttgtaataggaagataaaatgtcacttcttgcaaccgaatctgtggattatgaaactcacattcactttgctgattattgtttttgtctttttgttttggacaatatggctgcagctggcctgtaagtgagcaaaggccccgctaagagtccctctccccaggctttatgacaccagtgctgagtcatagaggttctgctagtccccaagagaagcactttcacctttcctggtgatgcctttggctccttgagctgagttttgcccgagtggggctcatgagggaggatggagtttcttgggactactcagaccgccagttactgtggtcccaagaaatgctgtggcttgacctcactgccagctgtacaggcgccagtgatccaggaatgctatcagccctactacctgcccgg

SEQ ID NO: 15284 - DNA, 2300 bp, Homo sapien
cacaaaaataaaaataaaaaggagaataacttgcatcctgccctctaatatacagtatagtgattaatagcaaaggccctgtatcagacttggttaaaaacccagttctgctctttctgcctctcagactgtggacaagtaaatctttgcagccatcttatcacctgtaaaacggaaatgacaacagtccctacctgataggtgacttcctctctgctctccaggcctttgctgatgccccatcactctggtcctcttctcccgaccagactgtgctccagatggcagggtccaggttagtctggaatcattggcatctagcccagtgctggctgggaccatgtgttactaagtgcaggctctgcagccagacagaccaagtttatcaccctggttcccctgctaccagtcatgcgacctcgggaaagtagtttactttaagcctcagtttccttatccaaaaatggagacagtaggactatgaaaggacataaattaggtaattcacatgaaagcacaaagatgacagctgccaaacggtaagtattctacaaaatgctggctataattagtggtagtgacaggcagctgatacactgctgtttaataaatgtttccgaggccgggtgcggtggctcatgcctgtaatcccaacactttgggaggccaaggcgggcagatcacgaggtcaggagatcgagaccattctggctaacatggtgaaaccctgtctctactaaaaatacaaaaaattagccgggcgtggtggcctgtagtctcagctactcgggtggctgaggcaggagaatgacgtgaacccagaaggcggagcttgcagtgagccgagatcccaccactgcactccagcctgggtgacagagcgagaatccgcctcaaaaataaataaataaataaacgtttccatattcttagtgtctggggctaggtaaagtttgttcactcattaatattccaggtgccaaacctgtgagcaatgacactccagtagcaatgagcatttgtggcatccacatcttggtttctgaactgttgtctgctaaaaagtaaccaaggctccctgaagaaatgactgcagcagggagaagggatgactgaaacatcttgtatcagaaagcaagaaaatgctcaaagaagctggattagtgcccaaagaacataagaactgtcttgaaggggcttcactggccacatctgggggaaaaaaaatcgaccagaaagaataataattgattataaaagacaattttaaaaaatccaggaatccatagtgagtcttcgaaaaaaaagaaaaaaagagagggtataaaactgatatatatttatcatatatataatctatagttttatatatatatatataaatgctgctaaaatcactgagtgaaaggctgatagagaagaagatggtcccagagagtacctgttaattacaaatggaagaaggaaacattaaatggagaaatggggcagacaccacctttagcaagcgatcaagcttcacattaccaaaaacgggacaaactgacattatccaagtgtgttctgcaggaaaaaagaaaaattaacctttatctaattacaaggcaagagggaggggaggattagacaaatcaagaatatgggatattctattacacaactggtctggacccgtcaaaattatcaaggtgatgagaccccccctaaaaaaagaaggactgatctgaattaaaggagaccgaagagaaataactccaggcagtgagtgaatccagcaggggagggggtctaacaactgaaattgaaatataaactgtctattggctaatactgcattggctagtactgcatcgatattaaatctcttgggtatgaaaatggcactgatgtcatgaagaatggctttgttcttaggagatgcactgcagaagtatttatgataggaaatctctgaaaaggaacagacgttgagtcccagtctttcggcccaaggttcgcgcgtgcgcacagccccctttccgagacttatttcgcgcggtcggagaatcagattgtgcccacaaggcggaaatgtacgacagcgggttccggtgaccacgaaggcggcaaaggcgacggaatggaggaggtgcctcacggtaagctcgcggagggggcgtgggtcgcggggcgaaagtgtcgggagctgctctaactgtggtcttgtctctgcgcagactgtccaggggccgacagcgcccaggcgggcagaggggcttcatgtcagggatgccccaaccagcggctgtgcgcttctggag

SEQ ID NO: 15285 - DNA, 2300 bp, Homo sapien
aacgctgagtcagcatccagcttctaagccaaccccaggagattcatttgcagattgaggggtcagaagcactcatttaaatcactggttctttaccttgcagcccaacacctgggagctttaaaagcactggtatagggtcccatccccagagagcctgatttaattggtccataacacaatctgggcagtgtgtcttttagaagctatccaaatcgcagcagagtttggcaaatatatatacatatacatatatatatatatatatatatatatatatatatatatatatatatacatacacacacacatatatacacattgtatatatataaatcttggttcctgaagatcgcatagtagaggctgggtgcagtggttcatgcctgtaatcccagctctttgggaggccaaggtgggtggatcacctgcggtcaggagttggagaccagcctggccaacatggtgaaaccccctctctactaaaaatacaaaatacaaaaattacccgggttgatgtcaggcgcctgtaataccagctacctgggaggctgaggcaggagaattgcaggaacccgggaggcaggggttgcagtgagccgagatcgcaccattgcactccagcctgggtgacaagagggaaactccatctcaaaaaaaaaaaaaaagagaaatggcataggagaaagcactttccctccacacacacctggcaggcccttgtggggtcagcttagggaattggggtgggggcggaggacagaaagcctggaacccaggcccaggatcagagatgagacagctcctgcctccacctccgcccatggagaccagcagtggggaaaatgtgtcaggggcttgtggcccaggagccctctttggggtcaccaggggcaggggacacgtacctattgtccatggtgggagggcaaagggcagggtcactggctttggcatctcgatgctcagccctctgtccgtgggtgggggatcaggacagggagagggcacgcaggagaggagagtcactgtgtcctgggccaggaaagaccctcaggtgacaagttttctttcctgggaggtacccaggaagactttcacttcaagaaacactactattactgtcaataatagtattaatactactaataactttgcgcttaataagtgcctggcacggcgatgcacgcagatctcactgtggttctgaagctgtggctatagcagcgccaccccttaaaaggcaggtgaggccgggtgtggtggctcactcctgtaatcccaacactttgggaggctgaggcaggaggatggcttgaacctcggtgttcaagactagccggggcgacatagtgagaccctcctctctacaaaaataaaaatttagctaggtgtggtggtgcagcctgtggtcccagcttttcgggaggctgaggcgggaggactgcttgagccctggagtttgaggccacagtgagctacgatggcaccagtgctctccagcctaggtgcagagaatgttcccaacaatctctgcacgcaagaaattcccaggaaccttgtgaaaagcagattctcaggcccggcccgggggatgtggaaggcctggagtggggccctagaatctgccttccccaccccaccccccaaaaaagaacacagcagggcccatcctaactgcattttgtcgtggggggtgggggcgcggggaaggcagattctagggccccactccaggccttccacatcccccgggccgggcctgagaatctgcttttcacaaggttcctgggaatttcttgcgcgcagagactgttgggaaacactgaccttctcccaaccctgaatgcggctgcccaccactgacattcattcactgccttatcattcgctacatccacgtttatgcgccgtccacaccattcgctgacgcagccgccccccgcccccgactcccattcctcccactatctctgtccgcagttccccaggccgttgcctccctgccgccgctttctctcctgggcgcgtccccggcgagccgagccccctccccagcctgcgactgcgccttaggccccgagcgccccgccccacccgagaagctgcgctgaggctgccccacagggcgcaggccccgaccctcagcgtccaccgtctgctgcctacatccgcccgcccggcgtccgaccccttcagcggcgacgggcggagctggagccccgggcctgggcgccaggtgggctcctgggagggtgatgaagcaggtagggcctcggggatgctggggctggaggcgg

SEQ ID NO: 15286 - DNA, 2300 bp, Homo sapien
cctcagtctcccgagtagcacacgcaccatcacgcccaggctaatttttgtatttttagtagagaaaggattttgccacgttggccaggctggtcttcaactcctgacctcaaatgatctgcccacctcagcctcccaaaggactaggattacaggcatgagccactgtgcctggtcattcttagaatttctgacattcaccatatccgtttgttagccccactaagcaaggctgtttcaaattgactcagcatttcttatttgtcaatttctaccccactcctcacccggggacttctgaaaacagtgaaggcttcaaagtaatcaccttacaaagaagggcatcatcctcatttcacacatggggaaactgaggaccacagagaggaagtaaagaggccaaggtcacacacctgctactaagttccccgtccagtgctctttcagcaaaaatgcatgaggcacacaagtcatgtttccaaaccttcatttcagtaccaccttcatcatttttgtgttttccacataacactttactattatttatgacagggttttttttaaccactcaccttttttacttatctttcttttctttttctttaggagaggcaggatctcactctgttgcccaggctggagtgtatttcatgatcatagctcactgcagcctccaactcctgggcacactcgatcctcccacttcagcctccagagtagctgggactatagttgtgcaccatcatacatggctaatttttaaaaaatcatttgtagaaaaattagctggatgtaggagaatggcgtgaacccaggaggcggagcttgcagtgagccaagatagcgccactgcagtccagcctgggcgaaagagcgcgactccgtctcaaaaaaagaaaaaaagaaaagaaaagaaaaattagctggacatagtggcaggtgcctgtaatcccagctgctcgggaggctgaggcaggagaatcagttgaacccagaacccgggaggcggaggttgcagcgagccaagatcatgccattgcactctagcctggcaataagagtgaaactccgtctaaaaaaaaacaaaaacaaacaaaaaaaaccccaacaatttgtagacatagggtgtcactatgttgcccaggctagcctccaactcccggcttcaagcaatcctcctgcttcggcctcccaaaatgttggaattacaggcacaagccacctggcccagccatctactttatattcaaataaaactttacgtcccattataaagggaaaaaatggcaaaaacaggaggtaaccatttaacaagaaagcagagtgatgttagattatagcaagatactgttgactgtagaaggctctgaggctagagagctgctttctataaaacagagtgatcatatattagaagaggtgttaaagacatgttcacaccaagctgagacttcctccttgataccaccaggaggatgggcagagactggaaaagacactaactttctccctatgggagtcagtattatttagcatcactttggcgggtcaccccaaaccatctgactacaagggtaccatatttgggttaacactcttttggtataatttatgttttagtccaatgtcttgggatgaaaatgacaggtgggccacttatgatctccagagaaattcagggcaatttggtgtgggagtaggcatggtagaggagagcagcatctaagaagtccccagcagaggctctcagcttgtcttgaggcatctgggcggagggctatgatactggccccatcctgcagaaggtggcagatattggcagctggcaccagtgcggttccattgtgatcatcatttctgaacgtcagactgttgaaggttcccccaacagactttctgtgcaactttctgtcttcaccaaattcagtccacagtaaggaagtgaaattaatttcagaggtgtggggagggcttaagggagtgtggtaaaattagagggtgttcagaaacagaaatctgaccgcttggggccaccttgcagggagagtttttttgatgatccctcacttgtttctttgcatgttggcttagcttggcgggctcccaactggtgactggttagtgatgaggctagtgatgaggctgtgtgcttctgagctgggcatccgaaggcatccttggggaagctgagggcacgaggaggggctgccagactccgggagctgctgcctggctgggattcctacacaatgcgttgcctggctccacgccctgctgggtcctacctgtcagagccccaa

SEQ ID NO: 15287 - DNA, 2300 bp, Homo sapien
cgcaataccatcatttgggatcagagtttcaacatatgaagtttgaggagacacaaacattgagtctgttgcagatggtggtacagggtggggtaggacctactgacagcatagctggcggcagagggctctcctaatgggttcacagtgagatttctttgaagaaaaagcttcagttgagctcagtaacatcttagcgagaaccaagtgccagggggagtgtgtgccaggtgctctgcacacctccccagcctgcctgcctgcctgccatccatccgtccgttcttttacagaatgaatgcttgttggttcagtacagtgcctggtgattgaacacagtgaacaagacagaccaagccttggccctttggcacttggtgaggaagactagtaggaacccaaacaagagaatcagattttttcggaactatgaaggcaggcaagaaggacatgagcttccctgttgtgttcactgccatgtcctcaacacttaaaactgtgcctggcctctagtagacggtctctgtaggtgtagacatggagtgaaacagaagtgaaacggtaggatagagatggtgggctgctttagctgaggggtcagagaaagcctctctaaggagatgatgcttttgagctgagccttaatttgatagaaggatctggagaaaagcagtccaggctgagggaatcagtggtgccaagaccttcaggtgagagagagttggtttttccgcaaccaaaaggaggcccatgtggctggagaacagccccaggaaaggtcagtgaggtgggtgggagccataccatggaggacctggaaggccatagccaagagcagtggaaagccattggaaggttctaggcaggagatgacacaatcccattcccattttgcaaaaatgactctggcaattgtggacagaatgagctgaggggtaagaggggaagcagggccaccacctcagatgctgttagttgtccaggccagaggtgacagaggcttggatgaggggagtttagtgaagatagagaaacatgaacagactgagaacaactctcaaaagtagaacctatggaatccattcaaaatctgtactgagcattgattgtatcgcactcctgtgtctaggccctttgcatatgcactcactcattcaacagactttgaccctgcctgctcttctgccaggccgtgtgctaagggcctgcgatcccaagataaatccctgtctccaagccaagcatttgactttgaagcagtgtaacttggtgaggaacgtcttattttatctctttaccacatcaacagaaacacttccccttccaaatgaaaacattggcatattctgaactaaaaactgaatcccaaatgcttcgacatattttgcagcaaacgctgtttaagcagaaacaccaggaaatatctctcagggacacccttgcaaagctctcggggtgtcagggcctgaccctgggaagtggggaggcctggagaagtggtggaagccatgcacagccttccctcctccccaccctcaaatccaagccaaggaggccttgcccccaagtgccgaggaagctcagaaccccagggtatgagaggggtagctagcagcagggaagccgccaggaaagacctcaagatgatctgaccgagcctcatctccaggcccctttccataagcaggggaacgccggtagtcagtcctgctctttctcagccattctcatgtggtcacatgtgttccccacacgccaatccaggaaacagtgactaagggcgtggagcatgtcacacagtggggcccaggatgaatctcaagatgaacaggtgcacctacttttgctccctcttttttttttttttctcttatgtgtggacccacataattcagttcctcaaacatttgctgagcacctacttgaggaggcagtattagggtcatggttaagagccagggccctgggttcacatcccagggtagctgtgaccttgggcatgctgcttaacctccctgtactttggtttcctcttctagaagatggaaataatgaaaatctcccttgttgtgaggattaggtgagatatacataaagcacttagatctccttgtatatagtaagagatgtattaatattaaccactcatattcatagtcggatacaatggaaagcgtgttatacccatgcccttgcaaatgtacaaacctgcacctatactcatgcatgaatatttatatcctgtgagcagaagaggacaggctgcctgagtgccagggaggtccaggtctagcctagct

SEQ ID NO: 15288 - DNA, 2300 bp, Homo sapien
ctgctgctagctacccctctcataccctggggttctgagcttcctcggcacttgggggcaaggcctccttggcttggatttgagggtggggaggagggaaggctgtgcatggcttccaccacttctccaggcctccccacttcccagggtcaggccctgacaccccgagagctttgcaagggtgtccctgagagatatttcctggtgtttctgcttaaacagcgtttgctgcaaaatatgtcgaagcatttgggattcagtttttagttcagaatatgccaatgttttcatttggaaggggaagtgtttctgttgatgtggtaaagagataaaataagacgttcctcaccaagttacactgcttcaaagtcaaatgcttggcttggagacagggatttatcttgggatcgcaggcccttagcacacggcctggcagaagagcaggcagggtcaaagtctgttgaatgagtgagtgcatatgcaaagggcctagacacaggagtgcgatacaatcaatgctcagtacagattttgaatggattccataggttctacttttgagagttgttctcagtctgttcatgtttctctatcttcactaaactcccctcatccaagcctctgtcacctctggcctggacaactaacagcatctgaggtggtggccctgcttcccctcttacccctcagctcattctgtccacaattgccagagtcatttttgcaaaatgggaatgggattgtgtcatctcctgcctagaaccttccaatggctttccactgctcttggctatggccttccaggtcctccatggtatggctcccacccacctcactgacctttcctggggctgttctccagccacatgggcctccttttggttgcggaaaaaccaactctctctcacctgaaggtcttggcaccactgattccctcagcctggactgcttttctccagatccttctatcaaattaaggctcagctcaaaagcatcatctccttagagaggctttctctgacccctcagctaaagcagcccaccatctctatcctaccgtttcacttctgtttcactccatgtctacacctacagagaccgtctactagaggccaggcacagttttaagtgttgaggacatggcagtgaacacaacagggaagctcatgtccttcttgcctgccttcatagttccgaaaaaatctgattctcttgtttgggttcctactagtcttcctcaccaagtgccaaagggccaaggcttggtctgtcttgttcactgtgttcaatcaccaggcactgtactgaaccaacaagcattcattctgtaaaagaacggacggatggatggcaggcaggcaggcaggctggggaggtgtgcagagcacctggcacacactccccctggcacttggttctcgctaagatgttactgagctcaactgaagctttttcttcaaagaaatctcactgtgaacccattaggagagccctctgccgccagctatgctgtcagtaggtcctaccccaccctgtaccaccatctgcaacagactcaatgtttgtgtctcctcaaacttcatatgttgaaactctgatcccaaatgatggtattgcggggtgcggccttagggaggtgattaggtcacgaaggcagagccttcatgggtgggattaatgcccttataagaacagtaagagataaatgtttaagtcccccagcctatggtgttctgttatagcagactgaactaagacaccctctgcctgtggttgtcttggcaaagccaggtaatgcaggagaggggtggactcagcctgcttgcggtgaatggcattagtgtccattttcctaaaggagcccttgcccaccatatctcagcatcccctcttcattgccacttagaccctgtgcccagtgacactccagtactgtccagtctcaggggctgagccaaggcgttcctgcctgccctgtgaccctcaccagacctggcagctgcctgacagcttgtctggctcacgtgttctctctaattgagtctagctgcctctcttccttgtgactatgaccaagtcttactccttcctggaccttcatttccctacctctcacatacacagtgggctggatgctggatgcaaagctccctcgtcacagccccaaagacaggacttgaccatctcagtgcaatgaccctgtggtgccttctcccgaggacctaagagccccctgagcgcttgcaaacactgcagacaaagcgagccctggcaccagctccctgcctgcctgttctgtg

SEQ ID NO: 15289 - DNA, 2300 bp, Homo sapien
attcagccggaaccggccgttcgaccgccgcgctttacggccgccgccgcgtggggcgctgggaaatgcagttcacccgcgtggccttcggcggcaggactccgcgaacggactacaaggcccggcatgcatcgtgcaaccgcgggcctacggccatccacaaaaggcggggcgagaggaggagcgaccgcagaatcctccgggtgggcgggaattggaagctttgggcgcagtcccggagagggaatcggcgtagatgggtcaaggaaagtcaccactgtagtaacaattactagatttataataagaataagaatagtattggatggtgtatactatgcaaagccactatcctaagggctttacatattaaggtatttaattttcacaaccatcctatgaattgggtactattatcgaacctattttatcatcagggaaacggagtcactgagaggttgacttacccaagatcatgcagttaacaagtggcaaaaccagggttcataaccacgcacgcacccttatttttcattccctttataaaccaaaacggcactagataacaaccttatttgtcctgacagcctttttctttttccacttcaattaagtgtgtgtgtgtgtgtgtgtgtgtgtgtgtgtgtgtgtgtgtgtgtgtgtgtgtgttggaaaaggctggatgcaacaatgcaccaaactgaacattttgtacttccagaggattcctctggtcttcagccagaatccatgctatttcccaaagtaccacgttaaaatgaaaaaggaaacacccaactttctgcatgagccagaatatatctaacttctaccctggattagaagtggtaagttcagtgtgggcaagacttctcaagtttaccatccattcattcattcagtcacttctacatatcaaccttattaaaggtccactgtgtcccattaactctgctcaagaaagaactgggccagaggccaatgttctccccagtgcctagcacaaggtttggcacatagcaggtgtttaacaaatattggtagagtgcatgaatgagtaaaggtttgtttcaccttcagcagttggagaaatggataagagtggagagttaatggtttgtcctgtaattcatatagagtggggcaagacaaagtcatggagcaaaaaagaacaggatctggcctccaaagaaacacacccaggctcagaaatgtaggatccctgggctcgtatttttcatctgtaaaaagtacgcacatacatactacactgccttgtatacctccgattaagcgatgcatgtaaaatactcagctcagtgtggcctgagatttaaaggtttcttgaactgctttggaaggctctttgggcgagatcatgttttcctgaaagacatgcaacggttacccaagagcaggggaaccagtgggtgggagagactcacttttctgtgtacttcacggttgtttgaatgtttagccatgtgtattattgcttttaaacatgattcacaaagtaaaaagaaacaaaaagcatccttatggttgaagatctgaactacctcggaatctctttattcaggtgttccttaactctaggatgcaggttccgtagtgggcggaccttccagcaaccagagtttggagaagcgaaggggacactggtggatctccaccatgaaaattggcgctttgggaatgtccaaaatttccagggcaaccgtccgtcgcccctccccgaccccgcctccttttaaaggagaaacggagtcccaaagaggcatgcagcaaggtgcagcggtagcccgggtttccttcggcttttgcggccttagcattatgtctaggtttgaactgtgttcagtctcttttacctccccctattcgatacgcagagcgaattcgatttgagatctgagggcagacccgaaccaggaaagcaactcagacgctagggccccgaggggcggagcgaagcggtacccgccccctggcggccggagccaatcagcgcgggcgttgagccggccaattagcgcgtgcagggggcggcctgccaatgagctcggggcccctcgggaggcggagctccgagcgccaccgggagggctacgcggcggccgcagccatgggtgctgggcctgcgggggcgcggggggtgcgcgaggacctgcggggcggggcgggagagaaggctgccgggaccggccctagacactgagccgcggtgggatccccaccggctctgcgaggccctgcgagcgccagggaggcgccacgagggagccgggcagccgcgg

SEQ ID NO: 15290 - DNA, 2300 bp, Homo sapien
aggggccccgagctcattggcaggccgccccctgcacgcgctaattggccggctcaacgcccgcgctgattggctccggccgccagggggcgggtaccgcttcgctccgcccctcggggccctagcgtctgagttgctttcctggttcgggtctgccctcagatctcaaatcgaattcgctctgcgtatcgaatagggggaggtaaaagagactgaacacagttcaaacctagacataatgctaaggccgcaaaagccgaaggaaacccgggctaccgctgcaccttgctgcatgcctctttgggactccgtttctcctttaaaaggaggcggggtcggggaggggcgacggacggttgccctggaaattttggacattcccaaagcgccaattttcatggtggagatccaccagtgtccccttcgcttctccaaactctggttgctggaaggtccgcccactacggaacctgcatcctagagttaaggaacacctgaataaagagattccgaggtagttcagatcttcaaccataaggatgctttttgtttctttttactttgtgaatcatgtttaaaagcaataatacacatggctaaacattcaaacaaccgtgaagtacacagaaaagtgagtctctcccacccactggttcccctgctcttgggtaaccgttgcatgtctttcaggaaaacatgatctcgcccaaagagccttccaaagcagttcaagaaacctttaaatctcaggccacactgagctgagtattttacatgcatcgcttaatcggaggtatacaaggcagtgtagtatgtatgtgcgtactttttacagatgaaaaatacgagcccagggatcctacatttctgagcctgggtgtgtttctttggaggccagatcctgttcttttttgctccatgactttgtcttgccccactctatatgaattacaggacaaaccattaactctccactcttatccatttctccaactgctgaaggtgaaacaaacctttactcattcatgcactctaccaatatttgttaaacacctgctatgtgccaaaccttgtgctaggcactggggagaacattggcctctggcccagttctttcttgagcagagttaatgggacacagtggacctttaataaggttgatatgtagaagtgactgaatgaatgaatggatggtaaacttgagaagtcttgcccacactgaacttaccacttctaatccagggtagaagttagatatattctggctcatgcagaaagttgggtgtttcctttttcattttaacgtggtactttgggaaatagcatggattctggctgaagaccagaggaatcctctggaagtacaaaatgttcagtttggtgcattgttgcatccagccttttccaacacacacacacacacacacacacacacacacacacacacacacacacacacacacttaattgaagtggaaaaagaaaaaggctgtcaggacaaataaggttgttatctagtgccgttttggtttataaagggaatgaaaaataagggtgcgtgcgtggttatgaaccctggttttgccacttgttaactgcatgatcttgggtaagtcaacctctcagtgactccgtttccctgatgataaaataggttcgataatagtacccaattcataggatggttgtgaaaattaaataccttaatatgtaaagcccttaggatagtggctttgcatagtatacaccatccaatactattcttattcttattataaatctagtaattgttactacagtggtgactttccttgacccatctacgccgattccctctccgggactgcgcccaaagcttccaattcccgcccacccggaggattctgcggtcgctcctcctctcgccccgccttttgtggatggccgtaggcccgcggttgcacgatgcatgccgggccttgtagtccgttcgcggagtcctgccgccgaaggccacgcgggtgaactgcatttcccagcgccccacgcggcggcggccgtaaagcgcggcggtcgaacggccggttccggctgaatgtcagtgctgggctgtgggccggggaggaaggcggctcgcggttcctccaccgcctccgccgccgcatcctccgcttgtgctaccgccgcgggcgctgggccgctctgctggtccggcatgagaccgtgagacgagagacgggtcggggccgccgacatgtttggccgctcgcggagctgggtgggcgggggccatggcaagacttcccgcaacatccactcct

SEQ ID NO: 15291 - DNA, 2300 bp, Homo sapien
tgcagaagtgttcgtcattattatgacagtaggagcagcatggaattattattatctttatccttattactgatataattattcccaataacctggggttatgatttgcatcctgtgcactgcgggaagaaagaggatttgtgtttaatgaaatgatatgcttgtaggccgagtgcagtggctcacaccttaatcccagcactttgggaagccaaggtgggaggatcacttgagcccaggagcttgagaccagcctcaccaacatgacgagatcctgtctctacaaaaaaaaaaaaaaaaaaagtgtttagtatttttaaaatactgaaaaatcaaatataattctctcaattcttacgttaaggttttttaagtcctgtctgtttagaatgaggtgcactcgtgtgtagtacgtatgtgctctgtaagcaaaatcattcattcctccttttgccctttttgggaattctggtcaatttttcacctccctctcgttgagatgctaaaaccttcttgaattggagatcatttactcttgggattaagcagaatggaactgccctattgcttgtgtcatgggccaggctcacagccacacagctggggtctctgcccgtcgtcctgggcactggggctgggggcagcgggaagtgatggggagcttgatacttggtagaagtggagctggggctcttctcaggaaggtctggccacactttctggaatgaacttggcatctcctcagcagtctggttgcagtctctgtgggtgtggggaacacttcctgtgagccctcctcctgggccttgggctcacagtggctgctctgaaaccacctctccacagccctgtcagcaaggactgcgtgagcttcccagtccagggcatctgaagctgtaacacagagccactcgttcagtgactgggagctcatttgcttttgggagttgcctgagattctgcagccaaagaatgcctccgccaccaccttgcttgctccatcatgactttcttggcagttgtcagtgaataccatgatcacatttcaacaagcgtaaccaaaatgtctctctggtgccaccgagacctctttttatggttgagatctccagcctcctcttatttctgtttaaagtgtgcaataggtgttttggtttaggaattcatttttggcctgggaagcctttgccaataaatatcactgtggtggggaggggaaggccaaacccaaggtaagccatgctaatttgcttattggggtcattctgattattttgttgttaatgctgaagaaaaatgtctgcctaatccctaggtttagttgttctgttgccacactgggggagaaatggacatcttcacctcattttgtgcattgtgttctcatcgattttgttttggaaagatgctacctctttcattccagtccttttaaggatgctctctaaccaggcctcagctgtgactaacagtggtgtggatcagacaggcttagccccaaaatcacaatcaaattagtcagccagccagcccagtcctggcacacaggggcttcaggccagttctgcaggctgctgtttcagcttgaactgcttgaattagagtaggggctcctggaagctgtgcccagctgccctgggcagggtacaagggaacgaatttctgccacgtccaaaagcctgttttccaggtggttacttagccagatcgtgccacacaggacccaggaatctccccagaggctttgcttgaacagttggtgcttcagggctcagtcacacatggctctcaatgacctgtgcaattttgatgccctcctaatttcttgagcacattagtcatttcaaaatatgatggatctgtcattttgtcactcagctcaccataaatacatacaactttcatagaccggtcctgccaggcaacagcacttgtattctggagctttctgaattatatatttgctctcttgattatttgtaaatgtgaaggtgcagttggtgggtgttctctccttagacggtatctgtgtttggatgaaactgcacagctgttaattcctgtgagtcggaagggtgtcaggcacatttcttcattcacattgcataccagagaacagtgtagatgctgggcagtgcctagaagatgcgagatctgactcgcagtcatgtctcagcatctaggtttattgtgtgtcttggatggcctcttgaagctctggacctcattgttcctgtctggaaatttctgaatatagaaaatataattcacatgatgactttttttttttttaagtgaag

SEQ ID NO: 15292 - DNA, 2300 bp, Homo sapien
ttgattgagattgtttcttaactttgggcatcttgaagcacatggcttctaatggaagctgattcagttgccttgagttaggccgcatgcagtcctgggaacctccaggccagatttctgctagactgtgagactgaatgccgggttagagactggcccaggtggagagcagctttctcctttgtcaaggtatcgagttgcagcttgtaagaaactgccactgccctctgtccccccaacttgagcagttgggactacaggccagagtcaccatgtctggctaccttttttttttttttttttttttttgcaaagacaggatcctactatgttgctcaggctagtctggaactcctggcctcaagtgatcctccaatcctcctgcctcagccttcctgaggcagggagtgggaaggaaggtggctgtttgttctctaggctgtgaattggatcttggcgttggtccacttgccccaagaaacagcaaggtaaaaaacagactgtttttatattccccatatattatgggctctgtctgcactgggggttaaatataggcctaagaggccgggtgcagtggctcatgcctgtaatcgcagcactttgggaggccaaggtgggcagatcatgaggtcaggagatcgagaccatcctggctaacacggtgaaaccccgtctctactaaaaatacaaaaaattagctgggcgtggtggcgagcgcttgtggtcccagctactcaggaggctgaggcaggagaatggcgtgaacccgggaggcagagcttgcagtgagccgagatcacaccactgcactccagcctgggcaacagagcgagattccatctcaaaaatatatatatatatatatatatgtatatataggcctaagaaacttaaagctttcgaaacatcgtttcttttcttaaaaaaaaaagtttaaaattatgaaagtatgcaaaatcttaaaaagcataaagggggaaaaagtcttcactgctaacattcagaatcagggggactaccattttggttattttttttaccagtttttttttttttttttccgatgtgaactttctgggaatttcaccctcccttctcccagaagcttggaccgtattgtgtctataattttgtattctttttttccatctaatatcaactcccaagcaaacttttcaccttattctaccctgcgtaaacaaaacgcttaatggttttatgatacttcatctcataaaagatggtacccacccagctattggcatttggttattcatattattcccaaatgaaaatataatccaaatttcaagcagctgatttacaagaaaatgttatcctactcctaagtctggaagtgttattgctggaggctttcaaaacccaaatctacacatggcaaaactattaacacatctgaaaggtggtgccccatctggggctgtggagaaatggggatggaacataaatgtcccctttaagattttcattttttttttttagtttttgtgtgtcacgtgtgtgtttgaaatgttatgacaagtacatttttcctactttttttttttgcatttttcaatgaaatattttgtatcagagatacatgtatagagtcaaaaattcaaaactgtgtcaaaggttatatagtgaacactccctgtttctccccagtcccctttcactccccgtaggcatccaatgttcattggagcttgggtgtccttccagaaattaaatgtgcccttggtcactcatgaaggtgctctgttctcttggcctcagcctggcattcagagggggcagccacagacagtgggaggatcagagcctctggcctgtgggccagacctgtgcatattctattctcctggtgttgaagagtatttttctgtgaggcccttcacctggaaaggcagcatttgggatgtgccatttccgatttttgcagcctctctacagatctcacccacaaagcatcagaggtgagagacctcactatcgattcttcgcagtcagagaaagtcagcctgagaaattgctgggtcaggaccctgccaaagtgaaatcatgaagtagtgcccttggtatattaaaaatagaaatcaaatagcagctcccatgcattggcaccgtccacagtgcctgaccctgtgctaaatgcttttcagtcttcattgcgcttgaatcctcacaataatcctgcaaggttggactccaccccatacagatggggaaataggttttatgtgacttgcccaagggtttgctgaataaaaagctaagaagaggcagaatca

SEQ ID NO: 15293 - DNA, 2300 bp, Homo sapien
caagtatgtggtttgactgtcagtctgtgaaaatgtgagctcattgatttctttctcttgtaaaaccagtactagttttgtggtcctgtcagttctggaaaattctctgtgttggcttattttgctgatgacccaggcattgtcatgtgcctctcatcctagtgaaaatgagtggcataaatgagaaagacaatgaaaaacaaatccagaatacggaacattctagaagacagccgacctgagtttttcaagaatgtaaatgttgtggaagaccaaaaaagagggggacgaaggtagaggggtactgtttctagataattgaaacaaagtgacatgacagttgtcagcctggattgatcttagattgagggggaaaagtagccttaaaggacatttttctgcaaactgaagacatttgcatatggattgtgattgagtaatataattgaggtcaatattacgtttcttttttttttttttttttaagagatgggatcttgctgtgttacccaggctggagtgcagtattgcaacctgaaactcctgggctgaagtgatcatcccaccttagcctcttgactagctgggactacagatgtgcaccaccacacctggctgattttttttttttttttttttttttttaagatgaggtttcgctgtgttgcccaggctggtcttgaacccctgggctcaagcagtcctacttcagcctcctaagtagctgggactacaggcagaacccctggcctggctaatattatctttcttgagtgtgataatgccattgtggttctgtgggagtatgttcttgttcttaggaagtatgggctgaagtgtgtaggggtaaagtgtctgatgcctataatgttggactgattcagaagataaaactgtgtgtgtgtgcgggtataatgagagagcagacaaatgcagcccactgtcaacaagtgatgaatcaaggtgaagggtacatgtttgtctgttacactgttgtttctttttgagacgggatctcgttctgtcccccaggctagagtgcagtggcacagtcttggctcactgcagcctcgaactcctggcctcaagcgatcctcccacctcagcctgtagtatctgggactactggcacgtgccaccatgcctgcctatttttttattttttgtggagatggggtctctctatgttgcccaggctggtctccaactcctggcctcaagtgatcctcctgcttcggcttcccaatgtactgggattacaggtgtgagctaccacagctggcctattctattctttaaacttttatgagaatttgaaaatcttcaaaataaaaaggaagggacgagagagagagagataatccagtccttgaaaatccaacatttaatagatggggagtataatgtttaggaactggagccccagatttagaaaagcctgggttttaactcctgctgtgtgaccttggacaaattagttaacctctctgagcctttcttcctcatctgtaaagtgggtctaatagtgcctacctcaggactgttctgttgattaaaagagaaaagtccatcagaaatactcagcatcacactaagtgtacacaagtgtttgtgatagaaacagtcattacaattcttcctcttgactgcatattgggcactgaaatatgtctgttctctttggagggttctttgtcggaatcctaacaaagcacagcctcgtgactgcttctgtccaggggacacattgaaaagcagaggaggtaacacaggcttgttaactagataataaggttcttggaaagatgactttcaggaaagtgggtgccgtctgattgaagagctgaaaccacaggatggggtgggaacttgaatcagacccagatggctccttgggggcaatttagttcaagcatccaggcatgggccctggagaagcggtttgcttagtgctgactctgaagtggactaatgttaacatgaaacccaagaggcaagtatgtacatggcattcaaagagttggattgcaaggcgagtgtggttttgtggcactttggcctgttctctgcccccacccccggggtcccgtgtttttgtctttaaaggaagcacagtcctcagtcctcatggggtcgctccacaggtagacatttaatggagcagctgctcatcacccgacctgctgacttggaatcactcccaaccctcctccaacctcacgatcgggggatcatcagctccctggactccacagctctgccccatccctggtctggcctctccacacctctcccctgcc

SEQ ID NO: 15294 - DNA, 2300 bp, Homo sapien
gggcatcctctgagcacttggtgggtcagggctgtttgtagttctcacactgaccttgagaacccccatagcatagaagaagacacgtatgattcaggaattgttttatatacgaatacgaggaagttccatttcctgggtgtttggtttctggtgagtttctagggctgcatggaagagaagaggagctctccctagcaggcaggaggccagcaataagtagacgtcagtgtgggaccactcttctcagcccttcacactgaaattctcaagcatatgttaacaaagtgctttgacgttactctaccacctccgatccttaaaacaactctggagttctgtagggcctgctctgcccattttacggagaaggaaacaggctcagggacttgcccaaagtcacacaggcagaacccacaggcagaacttcctactgtaaacttaccccttcctccttccccttcccagttcttataagaggcagccctgcttggtgaaaggctggaacccttggaaggaagtcattttacatttcacggggattgcggtgaatttctgaggaagcccaacactgcccagtattaggaaggccaggatttattacaaggaaagtcacagaaatgagggagatgcgttcattgggcaggaaggcaaggccttctcctcggcgtggggggaaggcatgctgtcaactcctaaaatgacagtctttctcaagatacccagtgccattcagttcaggcaccagtgctcatcctggtggctgctgagaggattttaagcctacctggggatgtgggggtgctttctcaagggataactttaaaataagcccttgaccaggcacggtggttcatgtctgtaatctcagcacttcgggaggccaaggcgggtaactcacttgcgcccaggaattcgaggccagcctgggaaacatggcaagaccctgtctctacaaagaaattacaaaaatgagccaggcgtggtggcatacgcctgtagtcccagctattcgggaggctgaggcgggaggatcacttgagcctgggaggtggaggttacagtgagccatgattgcaccactgcactccatcttaggagacggggtgagaccctgtctcaaaataaaccctcagagggccagtttctgggcgttaccgatgcgatgatttactgtgctgatttgcacaggcccgcgtcccacgttgtcgtccccgtctcatttctcacttagctgaaacttggcctacaaaatcattactgaagcattctgtaatgtgcaaagtgacttaaatcattcagccctttcttttaagatttattttcagagagttttttttttttcttcatgtaaagcaatttctcacagctggcatgaaggccaaatacttcatttgaaaattgagaattatgctgtaaagtggctgttagaactaaagccttgggtatttcttaaattgattttaaaaagcccctccgtatggatatattgggaggtttatttatggaagggaggttagtggctgagacagataaacacccactcagagttacacatgtacatgcacatccatattttcgcatgctcctgcacatgtgcggatatacatacacacgtatacgtgtgaactctctgggcagactcggccccactcgcttggggtctgaaacagcctttgtcagggtcctttacacatggaagctgagaatccaaagtggaaattgacccagcttccattccactcgaggagcccaggctcaaacccctttctccttggtctcaaccttggcccgaagccctcacttggcttccgcttgtgcgttgagcctcagtgggaactttgatgttccactggtctctgcagcttgaggctgcctgccgcccacttggcgtctcccaagtgatgtgcctggcagggccacagccactacgatgtccccccccccaaattctcaccacccccctctatcccacatgctcagagtgaaccatgctattgtttgaccgtagccctcctggacctcccaatccagcccaccactgaagtcctggggtttggactcggctcctccacctccactcagcacctgcctttccgcttctacgaccaggggcgccggggcagcagcgaccccacagtgcagcgctccgtgtttgcatcggtggacaaggtgccaggtgagccagccccccgccctgcgccacagctcgttcatcatggtgggcgttcaaggtctttctctctgtggagcctgtgtgagctgcccttcctctctcagaagccccgtcggctggcagc

SEQ ID NO: 15295 - DNA, 2300 bp, Homo sapien
ctcagcacgtggagccttgggtcacacccagcacccagtgaacggcatccgagaaacactcttcctgctgaaagcctggctttctggaagggagctgggggaaactgggagaggatggaggggggccaggtagcagatagccacactccttgcggcaggaagttctacacatcatttctgggaaccaggatagcttggcagtaactcggcgcactttgaccccaatagagcacccagctgtcactgttgacagccccccttccttcccaggggatgctgctgagctgcttggagccttcatgtcggacatccaggtgggcctggggacagccttggagctcccgggccacctgtctggccaccaccggatggagtgcccagatggggcttctgccagctgtccaggaggcagcccaggctgggacatccaagctgagccctgagctggcctggcctggcccagcccgcactgatgaggcaatgtgagtcctgtttcctgttactgtggctatgcaaatggggggaaatcagggcctctcctggggtaggcttcccggaatgatggcattgattgtcccaagaaacctggccccagtggggctgctatgggagggcagttgtcaacggctaagatccctttcctggtgcatctctcctgcgtgctgggctacatactgctgggaaaagcttcttcagcccagacctaggtcatcactgcatgtccactcccggacccactgcccatgagagctgggctgtggcttccacttcttgtcactgcatccccagctcctggtacatcgtgggagtggggcggacaggaccaggaagtgggtggcctcaatggctctcagcccctggcctggagatcaccacacccttctctttacacataaggaaactgaggacaccagactgggccagggacttgcccacgtctctctgcctcgcccagacatgccgcagcagcagtggcaaacttctgcttgcccccagaagccagctgagtcttccaggtcaagtccctctcctgctccccacagtcctgtcacacccctggctgctccccaggtcagcctctcctaggggtcgttctcagctcacatctgaccatgccactcccctgccctggcacctagccctcactcaaagccaggcctcataagccagcagtgattgggtaccttccaccctgagtggtctcatctcttgacaactctgcctcacacattacccctggtgatgccagaactccttggaattcccccttgcacctctgtggctttgcaaagctgttgcctcagcctgagaggatgcctccaacacctttctttctctctttattttttttttctgagaccgagtctcactctgtcacccaggctggagtgcagtggcacgatctcagctcactgcagcctctgcctcctgggttcaagcaattcttgtgcctcagcgtcccaagtagctgggattacaggcatgtacaccacgctcagctaatttttgtatttttagtagagatggggtctcgccatgttggccaggttggtctcgaactcctgaccttgtgatccgcccaccttggcctcccagactgctaggattacagttgtgagccactgcacaaggcctaacacctttgtttctataattcctattttttctccaacactcagcagtgtcacctccaggaagccttcccagatgcccgcagctggaccaggtgcctcctctaggctccctgcatgtccccatcacagcatgtatcacactgggctgtcctcatgattttagtgcctgtctcctccactgcatgggagactcatcacggaagcttgcacagagaaggaggcagagatgtggaaatgcccatgggtgcaagacacacgcaggaagtcgaacctgtggacttggggtgcagcagagggctgtgtcaaggactgagtgaccagatattcgactgtgcctctcctgagatggggaatgctgaggtttggggaggcacagagccttagtctatgagccctaactctctgaactcccaccccagagttaggaaactcctcccacataggacaatgggcaagtagagcccgccttccatgggaggagcccaaatagtccacacccactttccctgcctcccttgcagctagggcatggcatgtgactggactctgccaatcagaggcacctgctctggagtttgaattggaggcttgtcctgtccaggactctttctggggggagcctgggccacatggagttcctggcagctgtgaagaaggaggacttca

SEQ ID NO: 15296 - DNA, 2300 bp, Homo sapien
ctccggcctcagcctcccaagtaactgggattacaggtgtgcgccaccatgcccagctaatttttgtatttttagtagagacagagtttcaccatgttggccaggctcgtctcaaactcctgacctcaggtgatccgcccacctcagcctcgcaaagtgctgggattacaggcgcaagccactgtgcccggcctccttctttctttttctgtctctaaaccaaacatggagcagaccttttgctcagcacacagcagtatctagctagaacttacaatttttggatttcatttcattgcttaagggttacctctttgttgcgggtgattctaccttccatctatggtaataaaacatttcccttgaaataaaattaacttaaggaaatcatgtaacttaatttgcaggaaatattaattaaataacagaacagctggggacttggacagatctggcaaaaaaaaaaaaaaaaaatacaagtgaagctccagtgactggtgtgacagcctcagcttagagatgaaaatgaaggcatggctataaaattaggctgcccgagattcgaatccatgccccccaccaaggctctgctacctacctgcagtgtgacccaagcccgttatttaaccctgtgccccagtttcctcatctgcaaaatgaaggtagtaatagtcatacctgattcatacagttcttgtgaggattaattgggatactacgcatgaattacttagaatcatgcctagcgtctagcgacatgggtgagctggcagtcaccgctgttattagcaagaagcaacctgagaatgggaccaggtgggtctgacttcatggctgtgctgattcaaatcctctgcacagctgctatgacgcaaaataataattattattatagttctgtctgggtgcggtggctcatgcctgtaacctcagcactttggaaggacaaggtgggagaatcactgaggctgggatttcgagaccagcctgggcaacatagcaggaccaccgtctgcagtaaaaaaataaaaaatagccaggtgtggtgttgcacgcctgtagtcccagctacttgggacgctgaggtaggaggattgcctgagcccaggattttgaggctgcagtgagctgtgattgtgtccttgcattcagcctgggcgacagtgagactgtttttcgcttgtttttttgttttgaggcggagtcttgctctgtcacccaggctggagtgcagcagtgcgatctcggctcactgcaacctccgtctcccaggtttaagcgagtctcctgcctcagcatccctagtcgctgggactacaggtccatgccaccacgcccggctaatttttgtatttttagtagagacggggtttcaccatgttggccaggctggtgacgaactcctggtctcaagtgatctgcccacctcggcctcccaaagtgctgggattacaggcgtgagccaccgcgcctagtcaatgagacggtgtttcaaacaacaacaacaaacaaacaaacagcagcaatgaaagaatcaagcagagagggctgattccaatgactgggcacacatcacgtattaagcacttttcaggcatcctctgattgaacttcacccatgaggtgggtagttcttaacctcatttccaggtaggaaaagaggttcaagacctaaggtctatgtgaggttgggtaggcagggattgctgtggaccggaatggggtgggagaacacgttggtctccgacgactacagggcgtgggagagggctcgctattgtggccttgacctggcatgcccttgggacatgccctccccgggcctggggtcttccaagagccctgagatcccggcaggcaggacgtaccacgagaactgggaaccacgtgaaggccagaagggctgcggagcccgcagtgctgccgagaggccgagaggaagccgagggaagccgagtgtggccgagccgagccaagtcaagccgagcgtggccgagccacgccgagtgggcctggggcagcggttggtggggagagcggcgcaatgacgtcactggcgcggcgcgtggtggcctctcgagagtgcaggcgccgtggggcgtcagctggacaaaagccgacccgacttcatttgtctgcctcgaccccgaccccggctggtagacagcactcctgatgcacgggacgagggagcggcacgagcaaaggccctgaaacaggagggagcgcggtgagtgccttgcccagatccctgggccgtcgtgggacttgggccttctgtgcgctgcggggagccgtgc

SEQ ID NO: 15297 - DNA, 2300 bp, Homo sapien
aatcactcatttaattcccatacaaccccgggatggaggtactatttatttatttttttttgagacagggtcttagtctgttgccccggctggagtgcagtgacacaatcgtggctcactgcagccttgacctcctgggctcaggcaatcctcctgcttcagcctcccaagtagctgggactgcaggtgcaatccactacgactggctgatttttgtactatttttttttttttttttttttttttgtagagagggggtctcactttgttgcccaggctgttctcaaactcctgggctcaagcaatcctcctgtcttggccttccaagtgctgggattataggcatgagctactgcgccctgctagaggtactattattatccccatttcacagataaagaaaccatggcagagaggttaattacatgctcaaggtcacaagaatagaaaggtgcagatttggaactgggtctccttgtattccatcaccctccacagagtgtggcctccagcagatgttcagtggacatctctcgaatgatcacacacctgacctctggtgcaggcaaggttctgcatcttctctcaccccctcacgcacgcgcacgcacacacacgcacaacctaggaggctacaccaatgaccaccaccagccctggccacatgcagattcagggcactgatggggtgctaagctgggctgattctgggccactccctgtgttcaggaggttaataaggacctaggctctgcctggggaaagaggtatcgtggggccagggaggcgggaagggactgggcaccagggcttccaggagagaagccgtctgagagctgtctgtagagggcagtgtgtcccagtgtgaggccagtaaccaagtgcccagcctagccaggtttttatgtggccccttgtgatgctggggctcctcacatgccttcattcaaaaatacacggagcagccaggcacctactccatggcctcgcacgacaatcggaatcactaaatcacaaacacgtgtgcaaattacagccccgaccaccgaccgcccaccatcccaagccccggccgtgtgtgtggtgggaaggcagtctttgaagggcagatgcctgacggagcagtaggagggggaaatctatgaggaaggggtcgggggagaggagggctaggaaaccaggtttggggattcatcacgtctgagaatgcaccattttttcactgggctccaatttgatgtcgtccagctgcacctctccccaaaatgaagacggggaaggcgagatccaggtccagagctcccaatctgcaagccattgcaaatcccagcccctccccagcctcagtttcttccgcagccgggtagtgggagcgcagggagggcagtcgaggccaccagggaccttgcccggccccgcccagtttccgaggaactgggccggggtggaggcgcccgcgccgccaggggttcctctgaagcctgtggtcaggccgccgcttcccgggaagcccgagccaagaccagagaccgcggccggccggggcttcgggacagcagggcgggcgactgagggcgtcgacggcgggtggagcaggggctaggagggggtctacgggtggggtcaggctcagggttggggacaccttctgtggcctcctagggggatctggctgcaggggaggagaggacagggctctgcccccggcgggtgtggagacagctggggcggaggagggtgtgtcagggcgcgtcccaagagggcctggcggcagaaagtggaacccgaggtagcggggcaaaatcggggtcgccaagtccgaaggaggggtccgagaagtggccggaaggcgcagggtcggggccagagcccctcgagaggcgggtgctggggcaggtgcgaacaggcgggcagagggccccgcgggagggtccagaagagagggaaacagggccgaagcggtcctcgccggacgccaccgcggaaagagaaaccaaaagtggagctgggggcggggccggcagggggcggggcctcccgccgtcgccagccccgcctccgagccggtttaaaagactggcgcaggggcgggcgccgaacagagcgagctgcggccgtggcagctgcacggctcctggccccggagcatgcgcgagagccgccccggagcgccccggagccccccgccgtcccgcccgcggcgtcccgcgccccgccgccaggtgagccgggccctgggcgaggaggcgggagggaggagggaggggagtccagggcagccaggagtcgggcgagcctcg

SEQ ID NO: 15298 - DNA, 2300 bp, Homo sapien
ataccccacaaccggacctgctgaggccacccaaggcagggccctgagaaccctgctgcagctgtccctctaatcgccgagaatcccttagtgacctcgagaggaggccagacctgaatatgactggctctgccgtgatcggctaagggactctgggctggttactccacctctctgagcctgttccctctttgctaaatgtaatcatagtatctgcctcatggggtgcataagtttcttggggctgccataccaaatgaccacaaacttggtggctaaaacaacagaaatgtattctctgcagttctggaggccagaagtctgaagtcgaggtgccagctgggctgatctccctccggaggccttagcagagaatccttccttgcctcctctagctcatacaactccaagctcgtctccatcttcccatggtttcctcttctccctgggtgacacctcttctgtctctcataaagacatttatcattggatttagggcccaccagctaagccaacatgcttatctcaagattcttagcttaattacatctgcaaagaccccttttccaaatatcacattgacaagttctaggagttataacgtggacatagatttttgggggttgccattcattccactacaaagggtcactgtgaggtttgagggcaaagctgcctggagagggtaaggtccagagcccagccacatagaaagcattcagtaaatgaaagcagttctcactgtaagaaatttgaaatgtttattaagaaataaactgcaaaggctgggcatattggctcatgcctgtagtgccagcactttgggaggccaaagcaggagaaaaccttgagctcatgagttcaagacccacctaagcaacaaagtgagaccccatctctacaaaaataaaaataaaaaaattagacaggtgtggtggcatgcacctgtagtcacagctacttgggaggctgaggtgggaggatcgtttgagtccaggaggtggaggctgcagtgagctgtaattgtgccactgcactctagcctaggcaacacagcaaaaccctttctcaaaagaaaaagaaaaagaaaaaaacttccataaaagcagacgattgcaaatcctcatagcaagaggcaaagttgcacatgggcagagtgagaggttggcttgggccggaggcctgctcggggaggacagacagagacagaggaagttccatgcagagagaagtgggaaagtacagggccaagggctaagcccaaaggcatcggccaagacagggaggggtggagggctctggatggaaacccaaagactagaagatcaaatggcttagtgttcaaacataagtctgggctttcttctagaggtactggggtatctgagcagggacggcgtgattcaaacggtatggcgaggcttcgttagcaggaaggggaggagaatcaagaggcagaaactgaaggagagagacgggtttccaagggcctcctgtagcttgacaggcatctcaggctcacgagaataccaggaaagaaggaaagacacccctttgtcacatacggcaattaagcctcagaaaccacaatggcctacccaagactggacatcagtgcaaactgggatttgaacccggctctgaatttcccgactttagatctggctggggaggtaggcttgccaagcgagccccaggaccaccccttggtccatgtggttactcatctttcatccatccaccaagccatctgaccaattcatcacctccccatcatctgggcactaatcatctgtcttaacaactgcccaccattcagctgccatcaccagggtcagggctgcactcctggtacccaagttgcccagggcgttaagaaaaacacctgatgatgctggtcagtgatgtttactgagctcttattgtgggctgggcctgagctaactgcttgatataaattctctcctttattaataattcttctaatgtccgaatgaggtcagtacaattattatccctattctgcagagatggggaaactgggacttgttcaggcgaattcccagggctgaccatgtggaaaaagcagatctgggatgcagactcagcttaatctgacccaagggctcctaccctgaaccagtagctgggactatccccagggtacccctgagagctgccccagcctgggggtgagggtaaggggtagggggctttgtcttggctgagccacatctctcacacccctgtggcctgggccatcataatcagccccaactatataaccaggtgggctgcca

SEQ ID NO: 15299 - DNA, 2300 bp, Homo sapien
aaagtgctgggattacaggtgtgagccaccacacccagccccttcctatgtttattttattttattttatttttttagacgaagtttcgcccttgttgccgaggctggagcgcaatggtgccatctcagctcactgcaacctctgcctcctgggttcaagcaattctcctgcctcagcctcctgagtagctgggattacaggcgcccgccaccactcccggctaatttttgtatatttagtagagacagggtttcaccatgttgactaggctggtcttgaacttctgacctcaggtgatccacccgcctcagcctcccaaagtgctacgattacaggtgtgagccaccgagccctgccccgccccttcttattttcatctgcaagctttggccatggagatttgacttagcgggacgtagggtaaggcctcagcattcatatttttaacacgcgccctcgaagagcttgagggccatcataaaggaccttcttatccctaaagagaggcagcatagaaacaccaagggcatggcaatatcacccatcacctcctgtaaggatctgaagattaagcctcctgaatttgtttcttattgccactgtgacagatcatcacaaattttgtagctttaaacaacataaatgcattatcttacaggtctgcaggtcagaattctgaaagaagtctcatggggctaaaatcaaggggtcagcagggctgtgttcctcctggatgcacgaggggaggataacccatttccttgtccatcccagcttctagaggccgcctgcatcccttggcttatagcctctccctccatcttcaaagccagcagtgtggtgtctcccagtttctcttcctgtgaccctcctgcctccctattctctcttctaaggaccctcgtgactgcactgggccaacccagatcatctgggatgatctctgcatcttcaagtccttaaatttgtgtatctgccacattcccacattctccctgccctccatgaaagggaaactggttttgcagtttctgtgattctgatcccggactttaatgggatcatcaaagttcaatgagaagccccggcaaggccgagcgggaggggagaagatgaatattttggaggcggagaggggagcattccctgggctagggaggaggtggagagccaagggtatgactaaaaccaggctgtctccgtctgaatgctggcccggcctggccttctcagcagagtggccttgagcaactcaacttcttcatgcctgtttgccccacagaaaatgaggattgtaagagtgaggaatgcaagggtggtggctcacacctgtaatcccagcactctgggaggccgacatgggaggctcactgaggccaggagtgtgagaccagccagggcaacatggtgaaaccctatctatctccacaaaaaatacaaaaaattagctgggagtggcagcacacgcctatagtcccagctactcgggaggctgaggtggcaggatcatctgagctggaggggtagaggctgctatgatccatgattgcacaactgcactccagcctgggcgacagacagtgcctcaaaacaaaaagaggagagagagagagagagagagagagagagagaatgagtgaatgtatgggaaataaatgaatcaatgcttggcacataggagctattagggaactgtttgctgctgttgccatcttaacagtaagctgtgtgcacagagatccaagcacggaagtcccttccacatggtggctgtggcacagcagtgagttggcaaggaagcttccaaatgacaatgtgcgcacccaccggcttggggagatgagggcttggattaggcaataaaacacctgccatctgtatggttcacctactgcaagagacagaggacatgctttacaggcaaggcaagggggtctctcgcccttccagccctgcagcttgggtgccagggccctgctagttgtgacccctggccctgtgctgccctcacagaggaggctgggcagggtggggactgggcggggccgcagagtcatagtgggcgccccctttatatacaagctcccggggagccttgcagaccagaccaacagtaacaccaagggcaggtgggcaggcctccgccctcctcccctactccagggcccactgcagcctcagcccaggagccaccagatctcccaacaccatggtccgataccgcgtgaggagcctgagcgaacgctcgcacgaggtgtacaggcagcagttgcatgggcaagagcaaggacaccacggc

SEQ ID NO: 15300 - DNA, 2300 bp, Homo sapien
tgccgaggctggtctcgaactcctgggctcagccgatctttccaaagagctggattacaggtgtgagccaccgcgcctggcatggccagttgtgaacgttctgtcacatctgttcagctccccgcccccatctctgtctcctctctctcccttcttctccctctttctctatgggtaaatccttgagagtagttggcaaacatatgtcatcacccctaaatcctccagcatgtgtatcccccaaacagggacaatctaatgacccccgaaatcacctctgactccttaagaaaaacataaaacttccacccaactcactcatttcggttttctgtttaagtagccaaaccaattctaactgctcccctctttacccttaaaatccatggggctgtggaaaagaccacaccatgaccagtgccctgcaccatgctctgctccaatccctcacacctgttagcaccttttggcctcacagcttttcgtgtttgcaattgagctgaaagtcaggtaacataaaatacatcattttaaagtgtgtaattcaaggccaggtgtggtggctcatgcctgtaatcccagcactttgggaggctgaggcgggcagatcacttgaggtcaggagttcgagaccagcctgaccaacaaggtgaaaccccatctctactaaaaatacaaaaattggccaggtgtggtggcgggcgtctgtaatcccagctacttgggaggctgaggcaggagaatcgcttgaagcaggaggcggagtttgcagtgagccaagattgcgccgctgcactccagcctgagcgacagagcgacaccctgtcattcgttcattcaaaattaaataaataaataaagtgtgtaattcagtggcatttagtacagttacaatgttgtgtaaccaccgcctctatcaagttccaaagcatcagcccacaaggaagccccccacccatggcacagctgctccctgctccacccgccctggtcaccccgatcactttctgtctccacggatcccctgctgcctggccctgcatagaaacagaactgcacatcctgcaccgcctcagaacagttgcaggagcagctctttcttcccaggtgctcctccctcctcttactatagcatccatttagggttcacttcgccagcacccctttggggctctccctagagcctcacctgaggtcaagttctcccagcacatatcctcagaaacccgaggtttccattatcagcatttgtcactattacaattattcttcagggctgtttcattcatgctttctgtagttagattataaagtctattaggggcagggtgtggtggctcatatctgtaatcccagtgctttgggaggcagaggcaggagatttgctcaaggtcaggagtttgagaccagcctgggcaacatagggaaagcccgtctctacaaataataataatggccaggcacggtggctcatgcctgtaattccagcactttgggaggctgagacgggcagatcacttgaggtcaggagttcgagaccaagcctggccaacatggcgaaaccccatctctactaaaaatacaaaaattagttgagtgtggtggtgcatgtctgtagtcccaactactcgggaggctgcggccagaggtttgcttgaacccaggaggcagaggttgcagtgagccaagattgtgctactgcactccagcctgggtgacagaatgagactctgtctcaaaaaaataaacaaaatacataagtaattaaaaaaataaaataataataataatacttcttaacaagggcatgtctgtcttgtttatcactatataccagggcctaggccaaaatccggcatggaacaggccaaaatattaacagtaatattttgttaattgaataactagatgattgctcccacggaggagtcatcttgtatcgccccagctgtgacataggcagcccctacactcgggggcctgcccgcctctcaaatgcccatatatggacatgatgcaggccacctggccatggtttgtgaggtcccagcccctttgccctcacaatgaccaacggccccctggcatctataacaggccgcagagctggcccctgactcacagcccacagagttccacctgctcacaggttggctggctcagccaaggtggtgccctgctctgagcattcaggccaagcccatcctgcaccatggccaggtacagatgctgtcgcagccagagccggagcagatattaccgccagagacaaagaagtcgcagacgaaggaggcggagct

SEQ ID NO: 15301 - DNA, 2300 bp, Homo sapien
gtagaggccaaaacctcatagaggctactgagagtctatgggccagccctctagcttccttaagcctcagtttcctcacctgtgtggaacagtcttttcagggtctgtgggggtacatgggatacttcctacaaagttcttacaataggacctggctcaattttataaaaatgaagctcttggccgggtgcggtggctgacgcctgtaatcccagcactttgggaggctgagcgggcagatcacgaggtcaggagtttgagactagcctggccagtatgacgaaaccccgtctctactaaaaaatacaaaaattagccaggcgggtggcgtgtacctgtagtcccagctactcaggaggctgaggcaggagaatcacttgaacctgggaggcggaggttgcagtgagctgagatggcacaactgcactcctgcctgggtgacacagcgagactccgtctcaaaaaaaaaaaaaaaaaaaaatcaagctcttgctgaatactctctgaatgcctggtactgcaggaggccctgggaactcaaagtttctcttaagaactgaccttgactttaaggattgcctgatttaggatctgtggactttgctgactggggacatccaatttttagggagagattcctgggaattttatttgaaggatgcacaaaaagatttagcttttacgggtggatcacgaggtcaggagatcgagaccatcctggctaacacggtgaaacctcgtctctactaaaacaaagtacaaaaaattagctgggcgtggtggcaggcacctgtagtctcagctactcgggaggctgaggcaggagaatggcgggaacctgggaggcggagcttgtagtgagcccagatggcgccactgcactccagcctgggtgacagagtgagactccgtctcaaaaaaataaataaataaataaataaaaaagatttatcttttaagtaggtccacagtggatatatttataaagtgaaaaattggaaatagccttaatgtccaactgtaggatattggtttaatatgtgataagacaaatcgagtattatgcagtcattcaagaggaagcagatggatatttgctgatacagaaagatgttcattattaagtgaaaacaatatacaaaacactatttgtatatcagtaataggccaggcatggtggctcacgcctgtaatcccagcactttgggaggccaaggaggcaggattgcgtgatcccaggagttccagaccaccttgggcaacatggtaagaccctgtctctacaaaaaatacaaaaattagctggacgtggtggtgcacgcctgtagtccgagatacttgggaggctgaggtaggagaatcacctatgcccgggaggtgaacgttgtagtgagccgtcactgtgccactgcactccatcctgggcaacagagtgagaccctgtctcaaaaaaaatacacacacatattttaaagcctaaaggctaatataccccaaaattaacagtgggtatctataagcggcttttacaattattttcttgttctacatttttcccctattttttttacaataaatgtgcatttcttgtctgaaaaatagcaatatattttattaaccttaaaattatttgatgctattaaaatataactgaaaataataataaaagaaaaggcaagtttgccagctctccccgtctccctccccagccttatctcctgactggattcttgctcactcccaataaacacggactcttaattcgtttcagtatttactaacctcaaaacaaggcaatgtaaagatgaataatcatactctgtaggtgatctgcatccacgccaaattttgagatgcgttgaaagaggaagttctttacctctctgccttcaattatttattctcgtttaacccatttcctccgttcattcctaacttgagggcgtttatttacttttatctacgcatgcgcactcctggctgctagagagggcctcttcgcccggcggtcccgccttctgacgtcgaccattggccggctctgccagcgcgctcctgattggtggctgagggccgggccccgctgcttctcaaagttggcgggaaagcggaggcggggcggaagggtgcggcgaggcggaatggcggcggctgcggactcgttctcaggcggccccgcgggggtgcggcttccgaggtcgccgccactcaaggtgctggcggagcagctgcggcgcgacgcggagggcggcccgggcgcgtggcggctgtcacgggcggcggcgggccgcgggccgctg

SEQ ID NO: 15302 - DNA, 2300 bp, Homo sapien
atcaccttctctagctaggaaaagggatagagctgcgtctaaatgtttgagtggtgtccgaagcagaaagggagctgttgtctttcaggggccgccatgcctgccgttaggaaatgccatttgactcgcaaactggttatggtagttgctgatgaagaagatgaggagccaggatgtcattccttttttacacagtctgtcttcctgcccataaccacactttaatcaccatgggcaacgaccgtacttaaattttgcattgtaaaacagggacgcagcagtaatggaaaaagtatcatcactcataaaatttggaaaatgcaacatgagacttctgtgtctgagagagagagagagaattaacacacacaaaccaggaaggaaaatgaaacacaagcatctgcttttcatcagcaaacacaggcaaagcaaggggcagcagaggctgtgtcactgaagtatccgaggatttaaacattcctacatccggactccttggtcaaccaaagcaaggctctctgagaagcatttgaaaaatacgcattgaaaagtgtccatgaaatccacatcattataagcttctaaatagtttcgggattttggttgtttttaacgacagttccaacatactctaaggaatattcctgtgtaaatcttctacctccagttcccacatactttcatggatgggattatcagaaaggtctgtcatcttcacagcctgcaggcagggctcagggctgcaggcctgaaccactcccatcaccatcacatactttcctagaaaaagaagaaaagcccatagtaatgttctttttttttttcttcttttgagacagagtcttgctatgtcgcccaggctggagtgcagtggcacaatctcggctcattgcagcctccacctcctgagtttaagtgattcttgtgcctcagccttctgagtagctgggattacaggtgcctgccactatgcctggctaatttttgtatgtttagtagagatagggtttcacatgttggccaggctggtcttgaactcctgacctcaggtgatccacccaccttggtatcccaaagtgctgggattataggcatgagccactgtacccagccatcttctttggtttctgattttactaggccaaacaaaactgtcatgtaaaatgtaaccacgcccaaggaatggaggagacgctcccatcagagcgagttataattaggcggctctgaggtaggggcagaaaacctcagctttcctctaatcctgttccttgctcaatgctacagagtatgtgactggtttctgtgcacaggacacatcctctttctgcagacaccctctgacagttactaagcaatccaattttccctccacattgccgaaaaggctgggcaggcagccccccgccccattgttccaactgctgggacctatccctgccacctcctccagcacatacaagcaaatccacacaagggccggctgccaccggcatgatctaatgacgtattaactgtgactctcttcccattcccttggggaagtgactctccttgaaagcaaaacttggccagtctcaaccacataaaacccgattgtgtaaaagaaaactccaaatgctgcaggaaggacaggcccggtgccagccctgctgcctgccccgtgaggctttcattgcactgcacgtggggcctggggctttgactgaagccccaggcaagctgacccctgatcctgctgttcaaccccaggcaggatgtgctcaagtatctcagaactccaaccccacattccacctgggtccctccgtgacagaggctagttctgaaaatgcacttgccatcccctctgaaggggcctaaagtgctggtagggttggaacacacagaagtagaatgactgaaggcccacgaagagaaaaacaagcccaagggcattccaaccgggagaggggaacaggagctctactgagaaggcacacacagccagccggatgaactcgaaggcacgcgatgggacaaattgaccttgtaggttctacccacaccctctcccactccaaagcagctctccgctgtctctccctctccttcctgcatccccaccccgcggttgccatgaccattccaatggctccagcccatctcctgccagcttcctcctcttcgaaaccatccccaccccactgctgcagtcaacattgtcaaatccacctcctgcctccagaactcagttgatccaagcgcgatctaggtaagcatggtttctctgattctcctgcagacagagagcagcttga

SEQ ID NO: 15303 - DNA, 2300 bp, Homo sapien
actacacactccacggccccgcaaagaagattctctggaaaagtcatgagcaactacaaatatcatctttgatggccccgccaacctgtaggctccccacccccacgcccccctgatggccaccagctggtcagtttacccaaaagacgccaaaacaagactcactattaccacactgccactacttaatgctctctgtccccgatccccacagatgtgtgtgcggatgtgtgtgtatgaatgtgtgtggatgtgtgtacagatgtatctgtacatggatgtgtgtgtatacaggggtgtgtgtatacagacgtgtatgtacacagacatgtgggtgcatacagatgtatgaatgtgtgtatacatggatgtgtctgtatgtagacatgtatggacgtgtgtgtgaacgtatgtatacggatgtgtaaagaggtgtatatatatggatgcatgtatatgaatgtatgcatacagatatgtctacacgtggattgtgtgaatatggatgtgtatggatgtgtgtgtacggacatgtgaacagatatgtatatatggatgtgtgtgtggatatatgtacagatatgtatatatatggatgtgtgtatatatgaacgtatatacagatgtgtctacatatggatgtttgtgtgtatgaatatgtgtgtatggacgtgtgtttatggacatgtatgtgtgtaaagagatgcatatatacggatgcgtgcatatgaatgtgtacagatatgtccacatgtggactgtgtgaatatggatgtatatggacgtgtgtacaccacggacatgtgaaaagatatgtatatatgtggatgtgtgtatatgaatgtgcatacagatatgcatttggatgtgtgtgaatatggatgtgtatggactctgtacagacatgtgtacagatatgtgtgtatatacgaatgtatgtacagctgtatctacatgtggatgttcgtgtatgtaaatatggacgtgtgtatgatgtgtatgtgtatggacatgtgtatgtcatatgtgtatggatgtatgtgtgtgcacacacgaatatacagacacacccttctccttccctttttacagaaacagatgctcgctctccactctgctcccagcttttcctgctggcaggcacattcgagcgatggctttctccagtctgtatcagaggctgtgcagtgctcgtcagagcttcctcaaggtgcacatgaacagggtgaacacagaatttctcacccaaaccggaacactttgcagttaaagagaacactagttgtaaatgtgtcacgtcaccaggcgtaaactggggctctccaggcaacccacgacccaacccctgcacactagcaggagggggcactgaacagaacattcttccctaaaccaaccttaaatcccattagctttgagacaagttgaacataagctctgggacttcgtattcatgagctcatctgcctcagtttcttcatcttgtattgggttacagaggacttgaaggggggacctcctgtctgctgaaacaggctccagaaagttccggagttccggctgttactgtaattgtgatgagtctggggcagacggaactagaatttctccaaaggcaaacatttccaggctgcaggcagctctatagggaccagcaggaagatccacggggaggtagaggcaatccgtgcttgcacatttagcaaacaactagaagttcaagggcccctgggaattctgaaaatgaggcataagtctcagccatcaggcaggtggagctttaggaggaagacagctctcccctgacataggtcttcccccacccaggctgacggcagagctggaagaggagaatgtatttttgcagcaagacatccagctccggcttcagatgctccactccaggcctctctgagaagacactggaaactgaggcagaatcaggagatccactgccgaaggtgcccagcaatcatgcctggtgggatcaagtctaaagctgctatttgtaccctggctggaatgcagtggcatgatctcgactcactggaacctccacctcccagattcaagcaattctcctgcctcagcctcccaagaagctgggactacaggcatgcgccaccacacccagctaatttttgtatttttaacagagacagggtttcaccatcttggccaggctggtcccaaattcctcacctcaagtgatcctcccgcctcagcctcccaacatttgtatactttttgaagtcacacatcttcctgaaaagtggatagaagttttcaaccttcttcgc

SEQ ID NO: 15304 - DNA, 2300 bp, Homo sapien
gccactgccccgccccccacgccactgcccctcatggtcctacctccatctcgatttagctccagcttgtgctgaaggcagtcggcaacgcgggcttggcagccatggctctcacccctacgttgagtgcctgtgcatctctgagaagcagcacacccgagatccggctgggggccatccaggccttccgaagggtcccctgctctgcagacgtgagcccttgtgtgctgtttcatggggttggggttgggtggtggtgggtctcgaaccacagtttgctaattcacttattcagttgttcattcatcatgtatttaatgagcacctactgtgggctgggtactagtgtgaacaggtatccaggtctaagcctgtgtgtagtgtgggaagcagattatttatcaaaaacacaaccatatgattaccagtgccatctgtgccccctctagtacagggtttggcagactacgggccatgggccactacctggcccttggtctgtttttctcaataaagttttatcggaacacaggcatgcccactcacttaggtgttatctatggctgctttcctgctccacctgcagagtcaagtcattgcaagagaccgcatggcctgcagagtctaaaagagttctctgtccctttacagaaaaagtttgctaatccctggaccactacctcccttcttactcagagtcaaagttacagtcccttcattgacttcccaggccctgagggatctgacctctgggcctcacctgctcctgtcacctcccatccctcctccccagcacattgccctttctgttcttcctcaaacacttgtgaccctctcttgccccaggccctttgcacatgctctttcctggtacacttttcctccagatgtccccaggcctttctttttcacatcctgtacgtcttagcttaaaaggcactttcactgtgaggtctcccttgacaatttcacctgaaattgaacctcccaggtccccctggctctggtcctgtttccccatttcattttcccttccttagggtttattaccacctaactttttttttttttgagacggagtctcactctgtcacccaggctggagtgcggtgtcaccatctccgctcactgcaagctctgcctcctgggttcacgccattctcctgcctcagcctcctgagtaggtgggactacaggtgcccgccaccacgcccggctaatttttttgtaattttagtagagatggggtttcaccgtgttagccaggatggtctcgatctcctgacctcatgatcctcccagctcggcttcccaaaagtgctgtgattacaggcatgagccaccgcgcccggccaccacctaactttttatgtatttcacatgctaatctcattgactgtctccctgcactaggataccagcttcaggtggacaggggctgagttggtcttgtttatggctgtcacctagcacagtgctgagtgcatagttgttgcttatgttaatatttgttgcatggatggatgggtgggtggatggatgatgggtgggtggatgggtgaatggatagatgggtgggtgggtgggtggctggctggctggctggctgtggaggaagccaataggtattgagggagtcacaatgtggggaggtgaattgcttaggaattgcctaggaaggccaagacatttaaaggcctcctgtgtggcgagacactatgctgttttcgtaaatagttttattggaacgtagccatgcccatttgttggggaattgatgaggctctaggctggggctggtagagactgggaattaggcaaggtcagtgaacccctgctacctcccacagctgcgccacaggtgagtgtgtgtcggggaagcctcccgcagtaggggcatcaggacagctggggctaggcagcaggtccacctgctgcagccagggacatcatactcctgggtggaggtaggtaggccttgggtgatggctttccttctgcccaagccagagatcggtgctctcccgtctataccaatccctggaggaggatgctgagatccgtatcaatgcctacctggccctgatgagatgccccagtgaggaggtgtttgcccaggtgcggcgcacccaggcaggcgagctctccacccagggtgagccatgggtgtgtgtgtgggaggggtgtgggcaggggtggggctgggagggcacctcctgaagagtgcaggggatttgagagcatcctctccctccacccctttggtattctgctgtgttcttgttcccctgtttctctac

SEQ ID NO: 15305 - DNA, 2300 bp, Homo sapien
cacgtgttctccaagggactttcaaagttttctagaatgcagccccaacctatctttacttactgactttctttttatcacgttcactcccccgcctctattccactttgtttcgtttgtttgtttttgagacagagtctcgctctgtttcccaggctggagtgcagtggagtgatcatggctcactgcagcctcaacctcctaggattaagcaatcctcctgcctcagcctcctaagtagctgggattacaggtgtgtgccactacacctggctactttttttattcgttgtagagacagggtctcactatgttgcccaggctggtggtgaattcctgggctcaagtgatcctcctgcctcaacctcccaaagtactgggattacaggcatgagccactgcacccagcccttttgttttgttttgttttagagatgggggtctcaccatgttgcccaggttagtcttgagatcctgggctcaggctatcctgccacctcggctccacagagtgctgggattacaggtgagccaccgcacctggtctctgtttccactttgaggtgaataccctttcttcggttcctccagagaagtctcctctttggggcttggtttagaggcagggcttctgagaaggactctacccttctccctgcagtgggattaattgctgccttggcttcccacgagttctagaaaatgaggcagacagtgtcgggagaggggagtggtggttgtggctcgctgccccggagcctcatttcccatttctcccgagacaggtttgaatggctcttctaaggcagcctgaaccctgcccagttagaaaaacagccacacaaagaacagcactgtgtctgcttccagctgccccatggctgctggatcatggaacatcagacaggagcacactctgggtgcagggtgtaattctaggcgagcagcagctctgccagggctggagggaaatcctttctttgccctcacaaaagaaaatgtgtgcctggctgctctggtgctcatttttcaaaatgagaactggagtctatgtgtatttccttcttaaaaagctataacacagaggctgggcgcggtggctcatgcctttaatcccagcacattgggaagccaaggcgggaggttcacttgcccccaggagtacaagaccagcctagatagcaaagtgagacccccatctctacaaaaaatgaaaacattagccgggcgggggggcacatgcctgtagtcccagctacctgggaggctgaggcaggaagatcacctgagcctgggtggtggaggctgcagtgagctgagatcacaccactgcactgtagcctgggtgacagatcttgtctcaaaaaaataaaacaaaacaaaaaacaaaactataacacacatacaaaaaagtatatacattttaattgtacaactgagatttttacagactgaacatacctctgtaaccagcccccaggtgaagaaagagaacaggacccgccccccgcaaaggccccctcatacccctttccagattcttcttcctcttccaagagtaaccgctccatggattcattttgcctatttctgacctttatttaaatagcatcatacagtgtgcattttgtggcatctggcccctttgctatttgtgataatttgtggttggtttttgaatgcctttatcttttccgttacctgaaacagttagtgaaaaccacagtggtttaaaaaccaaaaaaaccacaaaaaaacaaacaaaaaaaaacaacgaagaagaaacaccagatatggaaggtacgtaggtcattgtctggtaatggtttaagatgtgaagaagaaatgacccttatttggttgatgtttccactttggattttccaggttttggtgattttgggtagtaattatttactttttgattaattctggggtcttgaagggacattaaccctcttcctagcttttggacaaagctggatggaagtcattttctcagaatttctgtttgccagaaagaaaattgaagacttaggtgaaaaagagagggagagatcaactgaatttcttatctggtatgttctgtttctgttttaggtaaaatgtcggttccaggaccttaccaggcggccactgggccttcctcagcaccatccgcacctccatcctatgaagagacagtggctgttaacagttattaccccacacctccagctcccatgcctgggccaactacggggcttgtgacggggcctgatgggaagggcatgaatcctccttcgtattatacccagcca

SEQ ID NO: 15306 - DNA, 2300 bp, Homo sapien
tacagtgcagtggctcgattatagctcactacagcctcaacctccggaggtcaaggaatcctcccacctcagcctcctgagtagctggcacatgccaccactccaccgctttattattattcttttaattaaaaaaatttttatagagatggagtctcactatgttgtccagcctggccttgaactcctgggctcaagagatcctctggccatggcctcccaaagtcctgagactataggcaagagccactgcacccgcccccttcatattttaaaagcagtaaaatgttgcccacactaataacatctacatgggaacctcctatgcttgggagaactttgaaatcccttccaacttggtaactcgtccacggctgagggtggcccgtcagtggacatggcgcaaggtggcaagaacttggggctggggacactttgctgagggacccgggacaagccacactccctatctgggcctcactatctttaggacctcgggtaaaggcatgggatttgggcaccggagggttctaagatccaggtctttgccagcatggggctcggaagctccctgtccaaatggcgtttgtttgtggatggccacatcatggttctgcccatctcctgactctgtgtactctgaaagccaggcatgcttcttaattccctctaatgatttcccagagagcctgctggatccaggctgctgctgttatcactgcagccggccgatggggctccaagcagacgggcagatggcacccatttaggggcggatgtgaaatggggctactgatttccagagcttgctttcagtgatggctgagaaaggcctacctggcggcacggaccaccctgggggcacaaagcggacaggcagctgataagccttacctaatacctatcctgtgctaaaaactttaccatcttcccagttcactcccagtcggtcttaggagacaggaccgctattgtgcccattttgcagacaggaagccgagctcagagaggatgggtaacatgcccgaaggcacagagagtgtcttggtctgtccggacgcgtctgtagagttacaggaagagaagggccgccctccagagggccgggagcgccccagcgcgggtccggggtcgaggttggtggtcccgccgcctggaagtggtggagcggcgcggggaggggggaaagtggggagagccgcgagcggcaaatcaggagggagggccaggctgtcgggggcggacgggtggggctggcaccgagaggcaggggcaggataggagagtgggggagacaccaggtccgcgccaggcgtctcgggggtaagcctgggaagctctggggtggcgagcgagccgggtgtgggatggagcctgggggcgatcagagtgaggcggggaaccggcggtggtctcgcctggggcccaggtgcgggccgcgggggcgggagaagccggaagcccaagccggccgcgctccgccccggcgggtccagcccccgcccccgtccccgccgcccggcccttttctcggggcgcccgagaggccagctcagacctcccggctcgacaggcggcgcgggcggcggtgagtgcggcgcggggacgccggggcgcggggaccagcgggagacagcggggggccggtggcgccagcacctgctgggggccccgggcactgagcccttggctggggcctcctgggatgccagggggcgcgggtcgggtcgcgggcatcgaggcgcggcggagggcgtgggggcccggccggggcggggtccggcctcccagcgctggtcccggccgcgtctccggttgggttcagctcctgcgtcccagagtggcccgatcgcgcgtggcggggtcgtccggcccccacccgaacgagcgcccttcgcggcccgccgcgtccccctccccggagaggacggcccctgggctttttagaaaaaggcgcgattctctctagtgactcaggttgagatttccagaaatatcccccgggggttcagaaacaaaaccaaaacaaacaaaaaaaccccaacgaattcccaaatgctatttgccaaacatttgacttctaggggcgcgggtacccgcgtttctctccctgcccccgcgacttcgcgcaagatccgggaaggacacccgaggcccctgggagaccctggggaggtgaaaatcagagagcgaagcgggccgtggcccctaggcctgacccctccccgcggggtaaggcgggcaccccgcgagcgcaggggtcctcttactgctgatggcacccagctctgggcccagac

SEQ ID NO: 15307 - DNA, 2300 bp, Homo sapien
tttaggatggataaaaacacaaagctggctcctgttgctgctcagcagttggggaaagaaaaacaaatgaagatgtggtagtattcagtaaaggacagaagaaaattcaggcttactactgctttttacaggaaggaagggaggaagcgaggaagggaggaaaggaggaagggaggaaggaaggaaggaaggaaggagaaaaggttgggagggagggagagacagaaaggaaggaaggaagaaaagcattcatacagggatgtttcttgaacgttatctctgagagattttccctaggtgttatgtctccctagcaatggtctgtgatattctgtcttaatgtcagtataataattggtacctttgcaagccttggttgcatcctgagaatggaggaatggcagaggttgggtgtaatccaatttcctgttcttctcttctccctccctccctcccttccttctttccttctctttcttttccctttctttctttctctttctttcttctttttctttcttttttttttctttctcttttccctctttccctctttctttctttgttgcttgcttgctacagtgcagtggctcgattatagctcactacagcctcaacctccggaggtcaaggaatcctcccacctcagcctcctgagtagctggcacatgccaccactccaccgctttattattattcttttaattaaaaaaatttttatagagatggagtctcactatgttgtccagcctggccttgaactcctgggctcaagagatcctctggccatggcctcccaaagtcctgagactataggcaagagccactgcacccgcccccttcatattttaaaagcagtaaaatgttgcccacactaataacatctacatgggaacctcctatgcttgggagaactttgaaatcccttccaacttggtaactcgtccacggctgagggtggcccgtcagtggacatggcgcaaggtggcaagaacttggggctggggacactttgctgagggacccgggacaagccacactccctatctgggcctcactatctttaggacctcgggtaaaggcatgggatttgggcaccggagggttctaagatccaggtctttgccagcatggggctcggaagctccctgtccaaatggcgtttgtttgtggatggccacatcatggttctgcccatctcctgactctgtgtactctgaaagccaggcatgcttcttaattccctctaatgatttcccagagagcctgctggatccaggctgctgctgttatcactgcagccggccgatggggctccaagcagacgggcagatggcacccatttaggggcggatgtgaaatggggctactgatttccagagcttgctttcagtgatggctgagaaaggcctacctggcggcacggaccaccctgggggcacaaagcggacaggcagctgataagccttacctaatacctatcctgtgctaaaaactttaccatcttcccagttcactcccagtcggtcttaggagacaggaccgctattgtgcccattttgcagacaggaagccgagctcagagaggatgggtaacatgcccgaaggcacagagagtgtcttggtctgtccggacgcgtctgtagagttacaggaagagaagggccgccctccagagggccgggagcgccccagcgcgggtccggggtcgaggttggtggtcccgccgcctggaagtggtggagcggcgcggggaggggggaaagtggggagagccgcgagcggcaaatcaggagggagggccaggctgtcgggggcggacgggtggggctggcaccgagaggcaggggcaggataggagagtgggggagacaccaggtccgcgccaggcgtctcgggggtaagcctgggaagctctggggtggcgagcgagccgggtgtgggatggagcctgggggcgatcagagtgaggcggggaaccggcggtggtctcgcctggggcccaggtgcgggccgcgggggcgggagaagccggaagcccaagccggccgcgctccgccccggcgggtccagcccccgcccccgtccccgccgcccggcccttttctcggggcgcccgagaggccagctcagacctcccggctcgacaggcggcgcgggcggcggtgagtgcggcgcggggacgccggggcgcggggaccagcgggagacagcggggggccggtggcgccagcacctgctgggggccccgggcactgagcccttggctggggcctcctgggatgccagggggcgcgggt

SEQ ID NO: 15308 - DNA, 2300 bp, Homo sapien
cttttaccattaagtgtgtcattagctctgggattttcatagaagccctaaggttgaggaagttcccttctatttctagtttattattatttttttaatcatgaaagcattattggatttcttcaaatgctttttccgtctattgagatgatcacgtggcccagtttacttttaccccctggttggaagccttgggttggaaattcaatctctgtggttttttggggatcaaagaaaagagttacagtcttatagctctccccataaataattgcaagctcacagccgtggtaagtgtttaggatggataaaaacacaaagctggctcctgttgctgctcagcagttggggaaagaaaaacaaatgaagatgtggtagtattcagtaaaggacagaagaaaattcaggcttactactgctttttacaggaaggaagggaggaagcgaggaagggaggaaaggaggaagggaggaaggaaggaaggaaggaaggagaaaaggttgggagggagggagagacagaaaggaaggaaggaagaaaagcattcatacagggatgtttcttgaacgttatctctgagagattttccctaggtgttatgtctccctagcaatggtctgtgatattctgtcttaatgtcagtataataattggtacctttgcaagccttggttgcatcctgagaatggaggaatggcagaggttgggtgtaatccaatttcctgttcttctcttctccctccctccctcccttccttctttccttctctttcttttccctttctttctttctctttctttcttctttttctttcttttttttttctttctcttttccctctttccctctttctttctttgttgcttgcttgctacagtgcagtggctcgattatagctcactacagcctcaacctccggaggtcaaggaatcctcccacctcagcctcctgagtagctggcacatgccaccactccaccgctttattattattcttttaattaaaaaaatttttatagagatggagtctcactatgttgtccagcctggccttgaactcctgggctcaagagatcctctggccatggcctcccaaagtcctgagactataggcaagagccactgcacccgcccccttcatattttaaaagcagtaaaatgttgcccacactaataacatctacatgggaacctcctatgcttgggagaactttgaaatcccttccaacttggtaactcgtccacggctgagggtggcccgtcagtggacatggcgcaaggtggcaagaacttggggctggggacactttgctgagggacccgggacaagccacactccctatctgggcctcactatctttaggacctcgggtaaaggcatgggatttgggcaccggagggttctaagatccaggtctttgccagcatggggctcggaagctccctgtccaaatggcgtttgtttgtggatggccacatcatggttctgcccatctcctgactctgtgtactctgaaagccaggcatgcttcttaattccctctaatgatttcccagagagcctgctggatccaggctgctgctgttatcactgcagccggccgatggggctccaagcagacgggcagatggcacccatttaggggcggatgtgaaatggggctactgatttccagagcttgctttcagtgatggctgagaaaggcctacctggcggcacggaccaccctgggggcacaaagcggacaggcagctgataagccttacctaatacctatcctgtgctaaaaactttaccatcttcccagttcactcccagtcggtcttaggagacaggaccgctattgtgcccattttgcagacaggaagccgagctcagagaggatgggtaacatgcccgaaggcacagagagtgtcttggtctgtccggacgcgtctgtagagttacaggaagagaagggccgccctccagagggccgggagcgccccagcgcgggtccggggtcgaggttggtggtcccgccgcctggaagtggtggagcggcgcggggaggggggaaagtggggagagccgcgagcggcaaatcaggagggagggccaggctgtcgggggcggacgggtggggctggcaccgagaggcaggggcaggataggagagtgggggagacaccaggtccgcgccaggcgtctcgggggtaagcctgggaagctctggggtggcgagcgagccgggtgtgggatggagcctgggggcgatcagagtgaggcggggaaccggcggtggtctcgcctggggcc

SEQ ID NO: 15309 - DNA, 2300 bp, Homo sapien
tattagctctaataggtatttagtacattctttagggttcttacatataggatcatatcacctgtgaatagagatagcttcactttatccttttcaatctggatgcttttatttttcttgcctaatggcaatggccagaacctccaggacaatgttggacagaggtggccagagtgggcactttggcttgttcctgttcttaggggtaaaacttccagtcttttaccattaagtgtgtcattagctctgggattttcatagaagccctaaggttgaggaagttcccttctatttctagtttattattatttttttaatcatgaaagcattattggatttcttcaaatgctttttccgtctattgagatgatcacgtggcccagtttacttttaccccctggttggaagccttgggttggaaattcaatctctgtggttttttggggatcaaagaaaagagttacagtcttatagctctccccataaataattgcaagctcacagccgtggtaagtgtttaggatggataaaaacacaaagctggctcctgttgctgctcagcagttggggaaagaaaaacaaatgaagatgtggtagtattcagtaaaggacagaagaaaattcaggcttactactgctttttacaggaaggaagggaggaagcgaggaagggaggaaaggaggaagggaggaaggaaggaaggaaggaaggagaaaaggttgggagggagggagagacagaaaggaaggaaggaagaaaagcattcatacagggatgtttcttgaacgttatctctgagagattttccctaggtgttatgtctccctagcaatggtctgtgatattctgtcttaatgtcagtataataattggtacctttgcaagccttggttgcatcctgagaatggaggaatggcagaggttgggtgtaatccaatttcctgttcttctcttctccctccctccctcccttccttctttccttctctttcttttccctttctttctttctctttctttcttctttttctttcttttttttttctttctcttttccctctttccctctttctttctttgttgcttgcttgctacagtgcagtggctcgattatagctcactacagcctcaacctccggaggtcaaggaatcctcccacctcagcctcctgagtagctggcacatgccaccactccaccgctttattattattcttttaattaaaaaaatttttatagagatggagtctcactatgttgtccagcctggccttgaactcctgggctcaagagatcctctggccatggcctcccaaagtcctgagactataggcaagagccactgcacccgcccccttcatattttaaaagcagtaaaatgttgcccacactaataacatctacatgggaacctcctatgcttgggagaactttgaaatcccttccaacttggtaactcgtccacggctgagggtggcccgtcagtggacatggcgcaaggtggcaagaacttggggctggggacactttgctgagggacccgggacaagccacactccctatctgggcctcactatctttaggacctcgggtaaaggcatgggatttgggcaccggagggttctaagatccaggtctttgccagcatggggctcggaagctccctgtccaaatggcgtttgtttgtggatggccacatcatggttctgcccatctcctgactctgtgtactctgaaagccaggcatgcttcttaattccctctaatgatttcccagagagcctgctggatccaggctgctgctgttatcactgcagccggccgatggggctccaagcagacgggcagatggcacccatttaggggcggatgtgaaatggggctactgatttccagagcttgctttcagtgatggctgagaaaggcctacctggcggcacggaccaccctgggggcacaaagcggacaggcagctgataagccttacctaatacctatcctgtgctaaaaactttaccatcttcccagttcactcccagtcggtcttaggagacaggaccgctattgtgcccattttgcagacaggaagccgagctcagagaggatgggtaacatgcccgaaggcacagagagtgtcttggtctgtccggacgcgtctgtagagttacaggaagagaagggccgccctccagagggccgggagcgccccagcgcgggtccggggtcgaggttggtggtcccgccgcctggaagtggtggagcggcgcggggaggggggaaagtggggagagccgcgagcg

SEQ ID NO: 15310 - DNA, 2300 bp, Homo sapien
tgggcagatgtgggggcggagctgttctgagatgcccggctttggcctgtggggcagctggctgaagctgggctctcctctgcctttctgtcctcccttcctgcgcaactcccagctcacctcctgtgcctggcttcctgactaggctgccgctgaacccgccctggagttctgcagtccgatcattcattcattcaacatccatgtattcagcacccactgtgtggcaggcactgttctgtagacacagcagtgagtgcaatacacctagtcctgggagagaagaccaaaagttcatcacacaatgtcaaaaatgtacaatttcacaatgggtaggctgggcatggtggctcaagcctataatcccagcactttgggaggccggggcaggaggatcacccaggagtttgagaccagctcaggcaacaacaagagaccctatctctacaaaaaattaaaaaattagccgggcatggtggcatgcacctgtagtctcagctacctgggaggctgaggtaggaggatcgcttgagcccaggttacagtgacctatgattgcaccactgtactccagcctgggcgacagagcaagaccttctctctaaaaaaaagaaaaaaaattgcttcgtcaaatctgcccacattcatagatataggctgagtgggacgatggcttgagcccaggaaggagttggatggaggctgtagtgagctgtgattgcaccactgtactccagcctgagtgacagaccaagaccccgtctcaaaaacaaaacaaaaaaccccaagggagctactcttggctgggcgatcagggagggccctcctgaggaaggggcacttaagctgagatcgggaagatgaagtagaagagttccagctgcagggagccacataggcaaaggcctggcggtgggaaaggcttggtgcactgggcgcagggaagaaagcccagcgaggctgagtggagggagtgagggcctggccacctcagcctcgtgagcccaacccgccatgctcttccagaggcttctgcttgagaatgggaaagaagtttccagcaaataaggcccccgttcccaggaggaggtcccagctcgccctgccccctcctgtcttctcaagtcccctgggccacagaagccttgagggacccaccctcaccccttctgtgggccccagggctggggtgtcctctcgccgatggccttcttggggtggatgagtggagattactccaataactggagcctctgtcttcccaggtagacaggcctggcctcaaaaccctctctccatcaggagcaggctgtgggacttcagctctttggagcctcaggttcctcatctgtaaaatgggaagattctttcttccggagtcatcttaataaaatgtgttgggctgtttatacagggcaggcatttggtgggggccaaaccaccgggtaattatgctaaaaataactatgattataggtggcagaggggtgcaaatgcctcacagcctcatcccgcagaggaatgagagcttcgtcagggccgggaccttgtctggctcgtggctgctcccacgacgactggcgtggcaggcacgtggtcagtgttccgccatcgactgactgggcggatgaatgatacataaatgaattcgcgaacgactgatgcccagcttcctcccgaagcaaggtcattcacctcagcggtcgcgcctctcccctgcccctgccccggattccccgccgctctcagctctcgaggagtatgcagcactcttccgtgcagcgtgcctcagtttcctccgctgtaagcaggcgggaccaaggcagcctgccggggtcaggatgaggctggcagaggaagggcgcctgtagtggggccccgtacccacgggcgcccaatccgcgctcgccagggccgagcccgcccgccgcgcgcagcccccgccccaccgcctgccggccccgagcacacgtgactccgccccggcccgccccgccccgccgtcccagcgcgggctcccattggcctttctgggaggccccgtccccagccggggaggagccgggccccgcccgccgcagcgcggggctcctgcgtcccgagtgcgcggcggccggaccgggcgggcggagccgggcccgcggggctgctgcggggcgatcgggccgggccgctgccgcgccatggtgagccgggcggggcaggccgcgcgctcgggccgggcgggggcgccggggcccgggggcgggaagggggaggccaggacgaggaggggcgcgcgcggcggcggggccgggccg

SEQ ID NO: 15311 - DNA, 2300 bp, Homo sapien
ttcttgacccagtagttttctggtgggttataaagtgactttttttatgccgagaactattgaaacaatttatttttgtgtacaaatatgtatgttttgaattaactataaatattacgttataaaacttttttatttttatttttataaaacttgtgtttttaaattggaaattacactcattgaattgttttacacatgcagacacacagacacacacacacacacagcgaaacaaaatcctgagtgacagcaccctgtaactaactgtggtgagatttgattcaagttgacagactcttctgttttagagagtaaatgcctttggattataacttacatgtctttctcaggaaaccagaatgggaggtgggtaacgaaatattctttttggaaatggaagaatcttagaataaaatataaattcaaattgccaatactggcttgacggtaaagtggcaaatctcaccaagacagaggattgtgtgcattaccctgagctgccactcattcatcaggggtttactgagcatttgttatgtgcctggccctgtgctaggccccggggatggcaggataaatccaatgtggcttctgcctgtgaggttctgtaagtttgtggggaagagggatgtctcagcagaagcttgtgagactgtagaaggggtctcagggacactggaggtgcaaaaactagctcttcctggagtgggagtaggactagcttccctgaagcagctgccctggtgctgggccttgggaacagatggaggagccggtgtccccagccaggactccgtaaaggtgtggcattgcaggagggcctggtctgttctgaagagggtagggtgagactggaaagccaaacgggccagattgtgtggaggttttatctcatgggcagcgtaccatttggcccaggagtgccatgcctggggttgtatttttaaaaatatagtaaccatctccccctgcactctcatctaccctgctgcgtattcttggtgatacgttccaagacccccaatgaatgcctgaaaccacagatggtactgaaccctgtatatactacacacgaatttcacttttcttcacaatttcatgggtagaagattcgttcttaccgaagatcttaacatccttacctctttttttttccttattgagacttttgccgtttcacttaaaggaagcatttttggcttctctttggcatatctgaattgccagcatcactatccttacactttgggggcccttctaataaataaagggttacttgaagacaagcactgtgatactgagacagttgatctgataactgcgttggctactaagtaacaggctggcagcatccacagcatggacacgctggacaaagggatggctcgcagtttttgtaatggcaaaaatttcatcacactactcagagcgacatgtagtttaaaacttacgacttgtttatttctggaattttccatttagtatttttgaaccggagttgaccatggataactgaaattacagaaagtgaaacgtggctaacggggtgctagtccctcagtcatccccaagcccttcaccaactctgccctgtatttcagatcaccgaagtggccttggagtacaacaactgtcatggggaccaggtggtggagcgtctccttcagcacctgcggcgggtggatgctccagtgctggagtccctggccctggaagtgccggcacagctgccagacccgccaacgatcacagcgtccccctgctgcaacactgtggtgctgccccagtggcactccttctccaggacccacaacgtctgtgaactctgtgtcaaccagacctccgggggcatgaagccgagctcggtcagcgtgccacagtgcagcttttttgaaatggcagcagctctggattctttctacctcaaggagcagaccttttatcatgtggcatcagacagcatagaatgcagcaattttttaacttcctatagccccttcagctactacactgcatgttgcaggaccataagcaggggtgtgtcaggcttcatcgactctgaacaaggtgtctttgaagcccctactgttgcattttcttcccttgagaagaaatgtgaggttgatgccccaagctccgttcctcacattgaggagaacaggtatctctttccagaagtggacatgactagcacaaacttcacaggcctgagctgcagaaccaacaagactctcaacatctaccttttggattcaaatttgttttggttatatgcagagagactgggtgctccgagc

SEQ ID NO: 15312 - DNA, 2300 bp, Homo sapien
agtgtattttgaaacaaatttataattgtttcagaagaacgttctgggccagctgcagtggctcagacttgtgatcccaggactctcggagtccagagcaggaggatcacttgaggccaggagttcaagaccagcctgggcagcacagtgagatcccatctctacaaaaaataaaaaagagaacattctgctgccagagcagggccccagttgctcagaaagtgaagaggaaaggaggcattcttttgttaatccagggtggttttctggtcagtaagacactgccttgcatttgctcacaaaggactatgggttttgtgagattaaaccacagacaacgaaagtactttggaccttatgaagccctgtgcaaatgtcagatgtcttatggaagtgtagggtaaattctgttgcagcaagctacagtgaatgaggacactggtgacttttgaccatatttattttctttagcaataaattgtgtaactctaatctacacaaaggaatcaacagaagtataagtggcaaattagaaggttaaaaaaactctgtaactatatattttttctcagctttttaaaacaagattaacactgtatggttgggtttgtaacatagataataagggtaataataacacaaaacagagatgagggacaagttaaaaataaaggaattaatgttatacgagaaaatagctactttctacaaaataaggcagtatagaagaaacaaaaagatgtgacaggtgggcgcagtgactcatgcttttacataatcctaacgctttgggaggtcgaagggggaagatcgcttgagcccaggagttcaagaccagcctaggcaacatggagagaccttgtctccacaaaaaaaaaaaattagctgggcgtagtcgcacacatctgtgttgcctactacttgggaggctgacgggggtggatcgcttgagctggggttgtcaaggcttcagtgtgctatgattgcgccattgcactccagcctgggtgacacaagaccctgtatcaaaaaacaaccaaaaaaaaaaaaaaagtgacatatagaaaagaaatagcaaaatggtcggtgtacatgaactcacaacatgttgggcctgggtggttgacacattaaatgtctggccaattgagcaagacagccattgattgccccattctacatccacagaagcagaaccagacaggaagtgatgagatttgcacgtgggtcacatagctgacctgtggcagaggtggcgtctcagctactggccgttagctgtgccttctgtttgtggcataacaccatattgccttaatgccctcgaagttttatttgtctagtttgttgttattgacattggaggacaagtcctttttttttttttgagacaagagtctctctctctctctcccccagacgggagtgcagtggcgccatctccactcactgcaacctccgcctccagggttcaagcaattctctgcctcagcctcccaagcagctaggattacaggcgcccgccaccacgcccggctaatatatttgtatttttagtagagacgaggtttcaccatgttggccaggctggtcttgaacgcctggtctcatgtaatctgcccgccttggcctcccaacgtgctgggattacaggcttgagccaccgcgcccggccgtgttttttttttcttcagttaagttgggataaaaaacggcacctacgtgcttcggggcctgtagtgagaatggtggacacgattattgtcgttacggctcctaaaacccagcgcggcgagagcagactacagcggtgtcaaggttccaagtattccccgcgggccttatcccaagggagcagcttctccacgccccgcgacggcgcctgcgcagactccgtgagcggggtcgtgaccggtggggccaagactgggctgcgggcggggaaggcttccgtgcatttacgtagggtgcagggcgtggcccgttgggggcggggatttgggcggtgtcggtgcccgcccggactccgtgagcggtgggcggagctgcgtgctctggggtgtgaggtggggcggaccccgcggcggcggcgcggctgacgtggagcgtccgggttagcgggtgcggcgagctgcgggattggggagcaacgggccgggccgggccttcgggcccgaggcggcggcggcggtataaagccggcgactgggagcatgtaatgtcggaatgcggaggccgcggcggcggcagcagcagcagcgaggacgccgaggacgagggagggggcggcggcggccccg

SEQ ID NO: 15313 - DNA, 2300 bp, Homo sapien
cagcaagggatacgtagctacaagacacctaactttataagactttctaaaagtaacccaaagaaaaatgttcaatgttagaggaacatgttcttcaaaaactagaaaatactaggctaacttaaagttaggacagtatttcattcacacagtgccacatttcatcttggtacactgtagcaccttacctgatcttgaagatgattgtctgagcaaaccacttgagttgtcctggactttcctcttcatgagagagagggtctggagagcatctagaggcacttcacacgtgcgttagcagacagggacacttggagcatctacaggtagtaagctctctacctggatggaggaaatgtggagggaaccttttgcccagagaagcagggcagatggactgtagagtccccgtgtaaatgaggcctctctctgaactgcaagaaggagttgaagaagaggtagatgtatttttcaccacctacagtaccttgcagttttgtaaaacttacacaagtaacacagccagccttttcaaggcgttggtaggtttgtgttttatccaaagtggttttagactcagattttattaatgggttatgtaggagggggaaaggggtttatttggaaccttgatttcctgtggtttaaaggatgatggagataatatgtatatcaagtactttgataaaatgagtacaactgagaacaaccctggttcctgaggcagctgcttagagtattggttattctttaattttgaacatggtgtactactgtgcaacattacagtagcttatttcctcttttttttcccctgccatactaggtattgctaagggactttttttctttttttttttttttttttttttcattttttcttgctctgtcacccaggctggagtgcaatgttgcgatctccgctcaccgcagcctccacctccacctcctgggttcaagcaattcttctgcctcagcctcccgagtagctgggattacaggcgtgtgccaccacgctcagctaatttttgtaattttttttttagtagagacgaagcttcaccatgttggccaggctggtctcggactcttgacctcaagtgacccacccgccttggcctcccaaagtgttgggattacaggcgtgagccaccgtgcccggcccgggaccttttttcttaaagaagaaattatactgtatgtgtgtatgtgtgtagagagtgtggtgaggcttaaagacaatgggcttcaaagtctgccagaagggccccagtcaagttattcagcctcagtttgctcacctgtaattgggaataattatgtgtgatggtgttatgtaaacacctggcacagtgcctggccttctcctttacctgcttttcttcctgctccttatcattgagctttgaaagactatggtaaatgtttccctagtaatatgactaagtacttactggggtttgacgggggaaagaatatgactattttatccagtactgactttatgcagaagattttaagggtggggtcactgacattggtccaagggaggaaatgtacagtgttaagggggctgagcgagttttagccaaaactctgaaaaacgtgacagatgctaagcatttaatgccacgtaagctaaataatgtagggccagctgccgttgaagcacaaactaagataagctaataattagttgtactaggatttatacctcatacagacaagtaggttgatggtattcaagaatgcattctccgtgatggaggttttcttggttcctggctcataattcttagggaagtctgcgttctgctgatcacgatcactttattttcctaccagtatcactgtatttactttgttaaataaaaatacaaataacctgaagaggtattatttgaaagctgtgtaactccatggtatggctagtgtgataattgtcttctgataatgcatatgtagtgaattatggccgaggttagtttccagtactggttataagtaagttaaatttctgaaatgttttgggcactgttcagtaccctttggagtagcctgcagtttctttactgctttcaagtgctgatgtggaggaatcattagtgttgggcagggaaacaggagctgtcagactgagagggccagggatgttcattgtggagattaaatgttctgagtaagtgagtttgtagacattttcttgtaagaaaatgttccatgctttactctgttttggacattttcttttgaaaaattttgagatagaaaccttaatatcatttcatatatttagagca

SEQ ID NO: 15314 - DNA, 2300 bp, Homo sapien
gttcatgtctgcttgtaaatttacctgtaaaatgaaatgatattttttgtgcatataagcaatcctctttacatctttttcaggccctaagttaatggatttcacttaccatgctaacatagatcataagtgtaagaaagatattttaatcggtaggataaagaatgttgaagataaatcatggaaaaaaatacgtccaagaccaacaaaaacaaattatgaaggaccatattatatatgtaaaggtatgtactgtaattacttaattagtatacattacataagtgatgaactacagtcatgcttagcttaatgacaggatacattgtgagaaatgcatcattaggggaacatcacagagtacttacacaaacctcgatggtgtagccgacgacgcacctagcctatccatgacatagtcagtggctcctaaactacagacttgtacagtttgttactgtactgaatactgaggctactgtaacacaatggtatctgtgtatctaaacataggaaaggtacaggaaaaacacagtattaatcttatgggaccaccattatatatgcagtctgtagttgactgaaatgtcagtatgtggtgtaggactgtgcttgctacatttattataacatctattaatatgtaatttattacattatgttattataacagtattgactgttataaaaaatgtttagagctaatagcaagttccttggattgagatgttaatattttttatattatttttactgttgtatttaactttttcttttttgagacagagtctcattctgtcatccaggctggagtgtagtggcgcaatctcggctcactgcaacctctgccttctgggttcaagtgattctcttgcctcagcctcccgagtagctgggattacaggcatgcgccagtacacctggctaatttttgtatttttagtagagacagggtttcactatgttgcctaggctggtttcaaattcctggcctcaagttatctgcctgcctgggcttcccagagtgtaaggattacaggcatgagccactgtactggccaaggttttattttatttatttatttctcaattttttgtgacagagtctcgctctgtctcccaggctggggtgcacaggcacaatctcggctcactgcaacctctgcttcccaggttcaagcaattttctcatgactcagctaccgaatagctggaattacaggcgtgtgccgccctgcctcactgatttttgtattttttagtagagatgggtttcttcatgttggttaggctcgttttgaagtcctggcctcaaatgatctgcctgcctcggcctcccaaaatgttgggattacaggtgtgagccaccacgcttggcctatgaccagattttaaacagaagactgtctcaaaccttaagttctctctaaacagaatcaaaacactgagctaaggctttgaaaagtgtttaagatgcttttgagagaacttggtattttcatgtttgtcaaacaagtttgtgtgaatgagcttagaatgtccctaaatgatttttttttttttcagctgaggtgtggtccatgagagaatcaaggctcttctcacagtctgtgataaaaataattaaggcttgtggtacttctcttttttagagttgatacgatccatccccagataatatgcatatcattgtttgaggctgtccatgaattgttagacaagttcaaatgatgccctaaatgttatttatattcattggctttaaggaaacaattaccatctttttttgtttgtttgtttattttgacactgggacttgctctgttgcccaggctggagtgcagtggcaagatcattgctcaccgcagccttgaactcctgggctcaagggatcctcccacctcagcctcccaagtagctgggagtacaggccaattgccatgttttcaatgtctgtccattccctgtctttctagatgttgctgctgaggaggaatgtagatattcaggccactgcacgtttgcttattgccaagaggagatagatgtgtggacactggagcggaaaggagcattcagccgggaggctttctttggcggcaatggaaagattaaccttactgtgttcaaacttctccaggagcatcttggggaatttatattcctttgtgaggtgtgttctccaaaacttattttccactgtaaagttgaatttgcaagcccagtggtattgtcctgccatgtgataaaacattcacttggtaaatgaataaatattcatttatttatatgataaataa

SEQ ID NO: 15315 - DNA, 2300 bp, Homo sapien
tttctacttttttgtatttgaaatttcataaaataatttaaaaaataaaagtaatactgctaacttggagtttagagggagggtaataggatggggtattaatttgtttttattacaggaaggcctcagtgcaagaaatgaattgtttgattgctgactttattctttggtcttacacaccagggtttccatgataaagttttggaggactgcaatatagtcctcagtttaaatgccagtaactgcaaagctctgtatcggaaatctaaggctttaagtgatttaggaagatacaaaaaggcttacgatgctgtagcaaagtgctccttagcagtgcctcaggtatggaatttatagtttatttgtttacatcgtaaccatttacatcataataaatggcatttaaagagttaaattttccagtcatccatcaacctgcttcagttgggtataaatgctaatgaagcaggtgtcttgatgggaaacttccctgttttgtctattcttcttcaccattagtaaatataaccctgttaattatacatacttatttttttcaggatgagcatgtaataaaactaactcaagaactagctcagaaattgggatttaaaataagaaaagcgtatgtcagagctgaggtaagctggagttctctgcataaggtgttttcattttgttttagaacttggagtcagttctgtttttaaattagtgtctttattttatttcagctctcattaaaatcagttcctggggatggggctaccaaggtaaagttattttttctgtcaaaattatatttttttttaaagggaaggatgggagcaattctacttttagtatttttggtgtgtgtttatttttggaacctttttaattcctcaaacacgtaattggcaataccctcctgtcactttatttatttttttgagacagagtcttgttctgttgcccaggctggagtgcagtgtcctgatcttggctcactgcaacctccacctcctgggctcaagtgatcctcccacctcagcctcccgagtagctgggaccacaggcacacaccaccatggcctgttaaatttttgtattttttgtagcgatggggtttcaccatgttgcccaggctggcctcaaactcctgagctcaagtgttcctcctgccttggcctcccaccaaatgctgggatcacaggcgtgagccatctcttctggcctcttctagtcactttacaaaagaacatctacaactcaagtaatatattttagctgtaaccagcatttcctgaatgctccagtggggcattttataggatgttaatagatgttaggtttcagtgcaataagagtggttcagggccaaatactagttttgggagtcatttgtgataaaattaacaaagggtttttttttgtttttgtttttaattttaaaattaaaattttcttggggctaataggatgctaatggctattgtgagttgggcaatgattggtggccaaattcatccctgttattctgctgaatagcctttgagaaatgctggtccacgagaaataagtggcagcactgctagaccagcacctcacctaacaccacatgtatacaggtttgcgtgttccattcatttcttggatcttaattgggagttgaatttctgtggaaacctgcattgttctcttagggtgagttttttctttttttcttttttttttttttccaagacagagtctcgctctgtcacctaggctggagtgcagtggcgctatctcagctcactgcagcctccacctcccgggttcaagcagttctcttgcctcagcctcctgagtagctgggattacagatgcctgccaccatgcctggctaatttttgtatttttagtagagacagggtttcaccatgttggccaggctggtctcaaactcctgacctcgtgatctgcctgtctcggcctccccaggtgctgggattacaggcgtgagccactgtgcccggcctagggtgagttttactgattgttttatggcttagagtcctgaaaatattataacccattgtttggtttaatttctaggctttgaaccattctgtggaagatattgagccaggtatgttttcacatatcatcttaacaatttgaatagtgccagctttgtacctgatgtctttgtatgtgatgtattgtcaaataatatcgctgtgtggttatattcatattaatgtattaatatgaaagtgaaaatgatttccaatgctccctttgtgcctttggatgtgccagtgagtgactgaaaa

SEQ ID NO: 15316 - DNA, 2300 bp, Homo sapien
aggggctacaggcatagtgggtagaggcagaaatactgccaatgtcctgcaatcacaagacaaggaattagctagcccagaatgccaagcctgaggaactctagtttgggccactgggagatgatgttttatctcagatctcttctctgtggctctccttgaacttggggaactgctcggtgaacgttgattagtggaggtggggcccaaaagaatgatatgtgttgacatttgcaagtgttatattgaggataacattttaatatccagaaaattccaatggaagtaactttatatcattattttatctgttgtatcaacaataatcattttggaagtttgtgggacaaaatatgtataaggtttaaacttggcttacaaggaagtcagactccctcggaggcaagcggatgtgaaacctttttatttctggagagcttccagaagcaaaacaaggctggaactgttctagggacagcttatgcgtgcgtgtagacagggaaaaacaaaacctgaagccaaaggagggaagaggaaaggaaggggagacatgactttttcctggagactgctcaggaggggtatacaaagtctgcatagccattcagccttaaagaatgtgaaaactggccaggcgctgtggctcacacctataatcccacactttgggaggccgaggtaggtggatcacttgaggtcacgagttcgagaccagcttgaccagtaaggtgaaaccctgtctctcctaaaaatacaaaaattagccaggcgtggtcgcaggcatctgagtcccagccactcaggaggctgagacaggagaattgcttgaaccctggaggtgaagtttgcagtgagccgagatcgcgagatcgcgccactgcactccagcctgggcaatggagcgagactccgtctcaaaaaaaaaaaaaaaaaaaaaaaagaatatgaaaacggtgtgcttatggtgtgccggaccacaggggagccacaaagatgactcctgtacggtccctgccgtccaggaccctggagtcaagtcagaaatggatgtgtccacagctgattgtgtgacaaggtctggatttgtgggtgttttcattggagtccagggaccctggtaccttatgtgcttttttgccttgtttctttccagattgctcatttagaaagtggatgtgtgggataacatgtccaatgtgtccgaggagagaagaaaaaggcagcagaacattaaggaaggactgcagtttatacagtaagagcttcagagttcttgtgttcttgccgcgtcctaattctttggtgtggatgtatgttttgtggagaggaagaactctttagtcatgtttaataggtccagttaatttgggttagaaactccatattctagcaatatttttttcttttgtccatttgaacattcttgcattcggaagcaagtgttacttttgctggcttttagggctacaattgttagtctcccccaaaacgttagactgagaaatttgaatttgttctatgaacagtgctgctgagtggaaagtgactgaaaatgaacatctggcggcacagagggcttctgtgatcagacgtgtctgttcagaagctcagtgtttaattggacttcttgaagcatgtcaatgatgagacagctgtggtttggatggacatgtccgggcagaagggcctctttgttccttcctgggaaggagacattctctctatactgcagtaaattggatcaaatattgttagtggctctgtactatttttaacctcttttttggcagttgaagaattagggtttttaaaaaatagaagtaggtttgaaagtaaagtgttgtacttaaaaaatactaaggaatagtatatatatatatatatatatatgtatatgtattttttttcccataactgtagtcatctgtgaataatggtagtaaaggaggaggaagtctttgaaatatgccttgaaccagtggcaagctaatggaaccacagatttaagatgacttctggctgaacaggtcccgataaggagcttgataattacagttaatttgtttcttcttcttaggtcaccgctgtcatatccaggaacacaggagcaatatgcggtaatgactccgggaaggtctgcttgaaagctctgcaagtggcttgtgaactgtaatttgtagcaggggttggcaaatgatggccttgtgggcccaatctggcctgctgtccttttattttattttattttattttatttttttgcaaataaagctttattggaacacagccacactcatttg

SEQ ID NO: 15317 - DNA, 2300 bp, Homo sapien
gaactcctgaccttgggtgatccactcgcctcggcctctcaaagtgctggattacaggcgcgagccactgcgcccggcctcttttaaaattttttgtagagatagggggtctccctgtgttgcccaggttggtcttgaactcctaggctcaagtgatcttcctgcctttgcctcccaaagtgctgggattacaggtgtgagctaccatgagtggcctgagttaatttaaaaaatctttttcttttacaaatagtgcttccttaaattattttgtacatataaatttttagaaaacatttataaattaaaaaaatatataaatttttttaaaaaagcatttctattaaggacatgggccaacatgtccaagtagctagaagggtggaatgagcttccatgcccctcatccagctggaaccattatccatatttttggcattcttgttttatttccacccagctaccccccttttggctaaactgttttaaaagcacattccagaaatagtgccattttactctagtgtcatggacttcttaaacttcttattttgtaatgtttcaaacacatacaaagtccagagaatagtactgaagaatcccctgcacttctcaccctcccctggttatcagcattctgctgtttcctccccacctcacagccccccccttttttgttgttactggagtattttaaagcaagtcccctatgtcatatcctttcccatgtaaacacttcagtaaagtaccaactttataggacaaaaatattgagaactgacggtgtttcaaagaagaaagggtttagcaccagttatcagcatttgggacattccaacccccatctcacccttatactttgaaaaaaatgagatttaaaaataaaactgtaaatgccaagcaataatgaaactaaaaaatttcagcaatgtacttcaaacatgagtggaatttcccttcctgtcacctgggtccaaatacgtggtttatgtgtaagatgttgtcttaactttaggtctcagttgttctcaactggggctgattgtgctttccccaccctgacatttaacgatatctggagacacttttggttgtgagtggggttggggtgaggggctacaggcatagtgggtagaggcagaaatactgccaatgtcctgcaatcacaagacaaggaattagctagcccagaatgccaagcctgaggaactctagtttgggccactgggagatgatgttttatctcagatctcttctctgtggctctccttgaacttggggaactgctcggtgaacgttgattagtggaggtggggcccaaaagaatgatatgtgttgacatttgcaagtgttatattgaggataacattttaatatccagaaaattccaatggaagtaactttatatcattattttatctgttgtatcaacaataatcattttggaagtttgtgggacaaaatatgtataaggtttaaacttggcttacaaggaagtcagactccctcggaggcaagcggatgtgaaacctttttatttctggagagcttccagaagcaaaacaaggctggaactgttctagggacagcttatgcgtgcgtgtagacagggaaaaacaaaacctgaagccaaaggagggaagaggaaaggaaggggagacatgactttttcctggagactgctcaggaggggtatacaaagtctgcatagccattcagccttaaagaatgtgaaaactggccaggcgctgtggctcacacctataatcccacactttgggaggccgaggtaggtggatcacttgaggtcacgagttcgagaccagcttgaccagtaaggtgaaaccctgtctctcctaaaaatacaaaaattagccaggcgtggtcgcaggcatctgagtcccagccactcaggaggctgagacaggagaattgcttgaaccctggaggtgaagtttgcagtgagccgagatcgcgagatcgcgccactgcactccagcctgggcaatggagcgagactccgtctcaaaaaaaaaaaaaaaaaaaaaaaagaatatgaaaacggtgtgcttatggtgtgccggaccacaggggagccacaaagatgactcctgtacggtccctgccgtccaggaccctggagtcaagtcagaaatggatgtgtccacagctgattgtgtgacaaggtctggatttgtgggtgttttcattggagtccagggaccctggtaccttatgtgcttttttgccttgtttctttccagattgctcatttagaaagtggatgtgtgggataacat

SEQ ID NO: 15318 - DNA, 2300 bp, Homo sapien
tataaaagattaccaatgacatcttttactttctttctcatccgaagtttttaaaatcagatgtacgtttcacagctgggaccgcaactgaaactggccccatttcgtgggctccatcgtcccaaacggcggggggtcagtggccaccgtactgggcatggcaaggtccttcgtggttcaataccgaacacgggcaactccttttcatccctagacaggtggggacaggaaaatacccaactcctggcaaatccacccagtcccgactcaggctcgacctcggaggccccggccgggcctcaggcggccccacccctttgctgcccaggcctgaccggaagccccgctaatgggaactgacaggtcccggtcccggtcctcccgggcggcgcccccgcctccgcggaccccaaggcctctccccgcccggcccagggctgcaccccgcgcgaaaaaataaaaaaatcagaaaggggggtaaaaaagacggatgagccccaaattaatgcgccaagctctccgccggcatccttcccgcccccaagcccaagacgctgaatcgggatccccgcgatcaccagagcagacagaaataaccaaaaaaaaaatttttttttagtgaaatcaccaaaaaggagacattttgccgagggaatggcaggcagaagtgggtcacgttattctcggtgggggaaggggacggcgcgcccacccgtccctccgcgcgcacaggccccggcccggctcctctcagggtcctctcgggtccgcgggccccggaccccgccgcccctcccccgccccgcccgccgtccgttaacggccgcgcgcgagcacgaggcggcggcgcgcgcggggggggcgggggcgcgggcgcgcgcgtttccttcatgcccggcggcgtccccctacccctacctgtggggacgacgcgccggccggcggcagaaggcaggcggaggcgggcggcggcaggcgggcagcggtggcggcggcggcggcggggcctgggtgctcgctcgcagctctccctcggttagcggcggcggcagcggctcggttgcgcccgcggcggcgccctctagcggcgggaggccgcgcttgccgcccgggagacgccgccattggctgcgccggagctacgggctgggggcggtggcgccacgtctgactgggggcagggacctgggcgcgccgttcaatccggagccccggcgtcgacgcgcggcccactgggtgagccaatgggaaggccacgttgcgcactggacgcgctcggactcaagactgattaaccagcaccggggttttctggggcctcgcctgggccgcggcctgagcagaagcgctaggaggtagaacagcgtccagcggggagaggagctagagtcggcatcgggaagcccaccctggagcctgcttagcttgacgagccctcaaccggggcgccctgctctgcgaagagtaaccctgcatcctcagaacaaccgtgattgtcttcattcctacatatgaggaacggaggcgcggagccccacggcagccggggatccaaagacagcctccctccagttccatctgccggctcttggaaggcctggatccctgtccttcagggcccagcccaaatgccgcctcgtccatctgcattttacggccaggtgccccgctgcgggcacggcttcttgtaaaatgctcagctcagcagtgggcgaggcagggtccctgccccatgggatggagggcggagatcaggacccacaagagcccaaagaagaccattttggtcggtgaagaccaaagaaattcaagcaggaggatgtgacaggagcttttgggaaagcctctgaggaggtgacagccatgcaaccgtgttcggggaagtgtgccgcaggcagaggggaaatgagtgcaaaagccctgaagctggagttcggtgtctggataacaggaaaggcctgcatagctgatgtgtgccagaggggagaaagatctgtgacacaggggggccgccatgtttaatttggagttttgtgtggaagggggtcattcattgagtctgaattgggagttccgaggtctcatttatattttagaaagttctctcctgctactatgcagagattgggctgtaggagagacaagaggggaagtggggactctagctacagtagctcttccaggggtctgggtgacgtagatttacaaaccagagtattagctcaggctgccatgacaaaataccccagaccaggcagcttagacaacaggaatttattttctcacagttttagaggctg

SEQ ID NO: 15319 - DNA, 2300 bp, Homo sapien
cttgaacttctgacctcgtgatccccctgcctcggcctcccaaagtgctgggattatagatgtgagccagtgcgcccggtataatccacccctttcttagaggagcttccctaaaaccacagcccatcagctctccaatatctgttgcagcacttacctggtgttacggactgaaacgctccccgctccgcacatacccaccccggagtccgtatgttgaagctctaaccctaatatggctattaggcatattaggcagtcattagggttaaatgaagtcataggacccttatacttttttttttttttttggtacagactctctctctcgcccaatatggagtgcaatggcgcgatctcagctcactgcaacctctgcctcccaggttcaagcgattctcctgcctcagcctcccgagtagctgggattacatgtgcacgtcgccatgcccggctaattttttgtattttagtaaagacggggtctcattgtgttgcccaggctggtctccaactcctgagctcaggcaatccatctgcctcggcttcccaaagtgctagaattacaggcgtgagccactgcgcctggcctaatacgactatttgaatacggccttttaggtagtcactggggttaaatgaagtcatagggtggggccctaatctagtaaaattgttgttcttgtaagaaaaaggaagacacaccagggattcctgctcacagagaaaaggtcataggaggacacagtgagaaggcagctgtttgcaagccagggagagaggcctcaccagaaaccagccctgccggcacccagaccttagatttgcagcctctaaaactgtgagaaaataaattcctgttgtctaagctgcctggtctggggtattttgtcatggcagcctgagctaatactctggtttgtaaatctacgtcacccagacccctggaagagctactgtagctagagtccccacttcccctcttgtctctcctacagcccaatctctgcatagtagcaggagagaactttctaaaatataaatgagacctcggaactcccaattcagactcaatgaatgacccccttccacacaaaactccaaattaaacatggcggcccccctgtgtcacagatctttctcccctctggcacacatcagctatgcaggcctttcctgttatccagacaccgaactccagcttcagggcttttgcactcatttcccctctgcctgcggcacacttccccgaacacggttgcatggctgtcacctcctcagaggctttcccaaaagctcctgtcacatcctcctgcttgaatttctttggtcttcaccgaccaaaatggtcttctttgggctcttgtgggtcctgatctccgccctccatcccatggggcagggaccctgcctcgcccactgctgagctgagcattttacaagaagccgtgcccgcagcggggcacctggccgtaaaatgcagatggacgaggcggcatttgggctgggccctgaaggacagggatccaggccttccaagagccggcagatggaactggagggaggctgtctttggatccccggctgccgtggggctccgcgcctccgttcctcatatgtaggaatgaagacaatcacggttgttctgaggatgcagggttactcttcgcagagcagggcgccccggttgagggctcgtcaagctaagcaggctccagggtgggcttcccgatgccgactctagctcctctccccgctggacgctgttctacctcctagcgcttctgctcaggccgcggcccaggcgaggccccagaaaaccccggtgctggttaatcagtcttgagtccgagcgcgtccagtgcgcaacgtggccttcccattggctcacccagtgggccgcgcgtcgacgccggggctccggattgaacggcgcgcccaggtccctgcccccagtcagacgtggcgccaccgcccccagcccgtagctccggcgcagccaatggcggcgtctcccgggcggcaagcgcggcctcccgccgctagagggcgccgccgcgggcgcaaccgagccgctgccgccgccgctaaccgagggagagctgcgagcgagcacccaggccccgccgccgccgccgccaccgctgcccgcctgccgccgcccgcctccgcctgccttctgccgccggccggcgcgtcgtccccacaggtaggggtagggggacgccgccgggcatgaaggaaacgcgcgcgcccgcgcccccgccccccccgcgcgcgccgccgcctcgtgctcgcgc

SEQ ID NO: 15320 - DNA, 2300 bp, Homo sapien
ttgcttgaacacaggaggcggaggttgcagtgagccgagatcgtgccactgcactccagcctgggtgacagagccagactccatctgaaaaaaaaaaaggaaagaaaaataaataaaagattagtatcacctgcttatataactcagctgggtcattttcttttttctttttctatttttttttttttgagacggagtcttgctcttgtcaaccatgctggagtacaatggtgagatctcagctcactgcaacctccgcctcctgggttcaagcaattctcatgcctcagcctcctgagtagctgggattataggtgcacactaccacgcccggctaatttttatatttttagtagagacggggtttcaccatgttggccaggcttgtctagaactcctgacctcaggcgatccgcctgcctcagcctcccacagtgctgggattacaggcgtaaaccaccacacctgaccagttgctatgcttttaaacttaggttgtgcattttgggggatgtggtgatggaaatcatgggaaggttggcaaatcctctccaagccaccccttttctactgaatggagcaatggacctcagaaacagaaatgaaagaaagtggctggacgtggtggctgacgcctgtaatgccagtacttagggaggcagaagtggggagatcacctgaggtcaggagttcgagactcagcctgattagccgggcgtggtggctcacgcctgtaatcccagcactttgggaggccaaggcaggcaaatcaactgacgtcaggagttcgcgaccagcctgaccaacacggagaaaccctgtctctactaaaaatacaaaataagccggatgtggtgatgcatgcctctaatctcagctacttgggaggctgaggcaggagaattgcttgaacctgggaggcggaggttgcggtgagccaagatcacgccattgcactccatctcgggcaacaagagcgaaactctgtctcaaaaaaaaaaaaaaaaaaattagctgggcgtggtggtgcacacttgtagccccagctattttgggagcctgagacgagaatcgcttgaacccaggaggcggaggttgcagtgagccgagaaggtgccactgcactccagcctgggcgatagagggagattccatgtaaaaaaaaaaaaaaaaaaaaagtatctcattatgttgtccagtttgaactcctggcctctagtgatcctcccacctcagcctgccaaagtgctgggattataggcatgagctactgtgcctggccagtgcttattttttctctccaaaatgggattagtatcacaaaatattttcatgccttctgcaccctttagtctgtaaataaaacctgtaaataataataatacatatagttccacttccaagcataagcacagttaatatttaatatcttgatttttttacagtattttttcctgtgcttatttttcttttctttctttctttttttttttttttttgaaacagagtctcgcttggtcgcccaggctggagtgcagtggcgcgatctcagctctcagctctctgcaagctccgcctcctgggttcacgccattcgcctgcctcagcctcccgagtagctgggactacaggcgcccaccaccatgaccggataattttttgtatttttagtagagctggggtttcaccgtgttagccaggatggtctcgatctcctgaccttgtgatccacccgcctcggcctcccgaagtgctgggattacaggcgtgagccaccgcgcccggctcctgtgcttatttttctccctttgtttccttctggtctatattttccaagattccttcaatgatatgattttgtagtgaacaaatgccagccctccttcaactcatccctctgaaatgtctattattgagagcatgataaaaatatttaaagatttctggtgggggcaggtggtatttctgaaaaatgcacactcctggtcctgctgcagacctgcttaactggaattactgtatacatgcgggacttaggaatctgtgttttgaccaagaggccaggtgattcttctgctcagttagtgctgggaaacagtgctaagaaggatacagtggctagaagtcgtcctgtcgtcctgcctcacagtaacatcgttaccgaattctcagcaggtgaaccaaatgaaatggtcaactgaaagccaaccagggtaaaacagatcttttatttcttgttgttgttattattatttttttttatgtggggacattcaagtgaactgctatatgcatttgcc

SEQ ID NO: 15321 - DNA, 2300 bp, Homo sapien
acagtattacaggtgcatcaattgattgttcatttaaaagaaacaaagtatatgtagacgatgttactcttttctttgtttcagaagtgggagagcgtgaaactcctgtttgtgaaaactgagaaatcggctgcacttcccatcttttcctcgtttgtcagcaattgggatgaagccaccaaaagatctttgcttaataagaagaaaaaagttagtagaattttaaatacttacagaatgaataatgaagggtgtaaattcagtcactaggagagaagtagaccatcatcgctgcccgacttttcagttatcttctggttttgtggtggttgtgcttttgtcactttacatgaggtaaaatgggtatgcttttgtcactttacatgaggtagttgatgttagtaatgcgcattaagatagaaatatcttgtatttattgataaattggattttttttttatttttgttagatccagtgcttgctgggtttttttagagagacagggtctcactctgtcccccaggctggagcacagtgacgtgatcaaggctcacggcagccttgacctcctgagctcaagcaatcctgtttcagcctcccgagtagctggcactgcaggcatgcttcaccatgcccagctaatttttaaattattttttgtacacacatggtcgccctgtttcccaggctgatcttgaattcttgagctcaagcgatccgcctgccttgggctcccaaagtgctgggattacaggcatgagctactatgcctggcctggattaactggcttttgagggggcctgagttaagttcctaccacatatttccggtcatagaaacatcaccatacttctaaataaagaccaaaacatttaaaatattaaacattgaaataaatgtgagctatatatacatttgaaacagtaataaaaggaattgacataattatttacccagttattcccatccacggttgtaggtggctggagtttaatcctgatagctcagggaaaagggtaacaggcaagagccaaccctagaaaaggcgctgtttcatcacaggacaaactcatacacctacattcgttgggactgggactgggataacttcaacacaccagttcacctaatgtgcacgtatttggatgtcggaggttatgctcacagatacctcctgagcttggtttgtaggttttcagtattactcgtactctagcaaaagaagctttcggaaggagagaaaatttaattttttgctatttgttagactgatctcctagtgtttctctctttagccatgttaattgtgtccaatgaatttttaattttgtttttgagacagagtttcactctgtcgcccaggctgaagtgcagtggcatgatctcagctcactacaaccccccgccttccaggttcaaatgattctctgtgcctcaccctcctgagtagttggaactacaggcacgtatcaccatgcccagctaatttttgtggttttaatagagatggggtttcaccatgtttaccaggctgatctcgaagtcctgacctcaagtgatcctcctgcctcagcctccctgagtgctgtgattacaggcgtgagccaccgcgcccagctgagtattattctttacactctaaaccatactgtgtttcacaaaagtctcttaactgtatactttagatagtcagattctgaaatgccggtatataatttactgcataaaatgcatgtttggctgtgagtcaaaaactgcggttgaggttccagtgctggttagggagtttgttctctgtatagatcgaggtccatttaggggcttatggataatcaaaactgcacgtggtacatctatgccgtttgttaaccaacagaactgttcctgctaaaatgtttgtatggtgttttttggtaggaggcaaggagaaaacgaagagaaagaaattttgaaaaacaaaaggagaggaagaagaagaggcagcaggctaggaagactgcatcagttcttagtaaagatgatgtggcacctgaaagtggtgatactacagtgaagaaacctgaatcaaagaaggaacagaccccagagcatgggaagaaaaaacgtggcagaggaaaagcccaagttaaagcaacaaatgaatccgaagacgaaatcccacagctggtaccaataggaaagaagactccagctaatgaaaaagtagaggtattgttttaatatttactgttcataatggattggttcagtggctactgtgtcaggcaggtactgtgctgagcaataaatgatgaaaaa

SEQ ID NO: 15322 - DNA, 2300 bp, Homo sapien
gcgcatcacgagggcagaggtcagatcgagaccatcctggctaacacggtgaaaccttgtctctactaaaaatacaaaaaaaaaaaattagccgggcgtggtggcgggcgcctgtagtcccagctactcgggaggctgaggcaggagaatggcgtgaacccaggaggcgaagcttgcagtgagccaagatcgcgccactgcactccagcctgggcgacagagcaagactccgtctcaaaaaaaaaaaaaaaaaaaattagccaggcatggtggtgcatacccgtaatctcagctactggggaggctgaggcaggagaatagcttgagctcaggaggcggaggttgcggtgggctgagatctcgccattgcactccagcctgggcaacaagagcgaaactctgtctcaaaaaaaaaaaaaaaagtagccgggcatggtggcgtccgcctgtagtttcagctactcgggaggctgagacaggagaactgcttgaacccgaaagggagagactgcagtgagacaagatcactgcactccagcctgggcgtcagggcaagactccctctttaaaaaaaaattggccgtggtggttcacgcctataatcctagcactttgggaggccgaggcaggtggatcatgaagtccaggagttcaagaccagcctggccaggatggtgaaaccccatctttactaaaaatacaaaaattagccgggcgttgtggcgcgtgcctgtaatcctagttactcgggaggctgaggcagagaactgcttgaacccgggaagcgaaggatacagtgagcccagatcgtgccactgcactccagcctgtgcgacagagcgagactccattacaaaaaaaaaaaaaaaaaaaaggaaaaaaattaattaaacccatccaacaagagaaaggagaagtatctcctaaacatgcctagaacatctctggaaggttccaggagacactggtaagggtacctctggggaggcgggtggagtgggaggaagacattacaaagcaaacctgtcctacccaagggccgcgtgcggccctggaggccaggctttgaatacagcccaacacgaattcgtaaacttccttaaagcattacgagattttttttagattttttttttaaagctcgtcggctatcattagtattagttttatatatgggcccaggcaattcttcttccagtgtggcccacggaagccaaaagattggactcccctgttctaaggtattccatttgtcagttatccagcctccactcctaacctgtttgtttagcgacaaggtctcactctactgcctacgctggagtgcagtggcgcggatcagaactcaccgagcctcgaattcctcaagatcctccatcctccgcctcccaagtagccgggactacaggcgcgcaccaccacgccggctaatgtttataatttttggagagacggagtctcgtatatgcacggactggtctccaactcctggaatccctccgcctcggcctcccagagcgctgggattccagacgccagccacgcgcacgaccagccacgcttatttgtacaggatcttacctcccgcctctctgcgagaccagaagctcctaagagactggcccagactcatctttcggtccctcatgctgcttaacgtggcaggtcgggtggctccgggtggctcccgtgccttatatttcagggactcctcaccagcctggggttggcgtcgcctaaagtcaacgggcaggtgggcagtggagccaggattccgcgctctgcccatgccacgcgcggccttcccggaggcggggaccgtggagtgtggaggaccccactgggcctcctgacgggactcttctctcgcctcaaggcgctttcttgatttctatctagtaagagtgagaggacacccaagctactccccacagctcatggaaagctggagaaaagcggaagagcaggtgcctcctcaaagaagggattctgacagcagccactgccccggagagcgaaaccccacgctctcccggaaatgacgcacagaggctcggttcccgccccctcgcttccggggccgggcttgctcgcgcgtgcgcaccagaagccagcagtggggttgcacacgcgcctcttcacgaggtggaaacaagatggaggattcggcctcggcctcgctgtcttctgcagccgctactggaacctccacctcgactccagcggccccgacagcacggaagcagctggataaagaacaggtgagtggttcctggggagggtggcttggaagcagtgtg

SEQ ID NO: 15323 - DNA, 2300 bp, Homo sapien
tttgggaggccgaggcaggcggatcacctgaggccaagagttcaagaccagcctggccaacatggtgaaaccctgcctctactaaaaatataaaaattagaatgggcatggtggcaagcacctatactcccagctactcaggaggctgaggcaggagaatcacttgaacccagaaggaggaggttgcagtcagctgaagtcgcaccactgcactccagcctgggtgacagagtaagactctgtctttatgcagtggctcatgcctgtaatcccagcactttgggaggctgaggcgggtggatcacctgaggtcaggagttcaagaccagcctggccaacatggtgaaatcccgtctcaactaaaaatacaaaaattagctgggcgtggtggcaggcatctgtatctcagctactggggaggatgaggcaggagaattgtttggggggtacggggggagataggtttttgatacagggaaccatctctttaccagcccccccaaataagaccctcttattaagactacctaaatagaagtatcatgggtttggcagtaaagctagttaattagtaacttacattgtaaaaaatatttttgtgatttaaaataataagttttaatatcttatatagacttgctgttaactactgaaagatttttttaaaatttcatttctaggtaagaccattgcaattggaaaagttctgaaactggttccagagaaagactaagcattttcttgatgaccctgcacaatactgtgaggaaaattgactgcagaagcctacttcacaccgccttctcttattttctgcccattgataaacctctccccatattttgcaaagaggaaattcacagcaaaagtccacattatgtcagctttctcatattgagagctctgctatgccactgttgaatttttcccaagattcctgtccctagccctcacttcaaactctgcttccttggacagatttggcaatagctttgtaagtgatgtggacataattgcctacaataatgaaaacctacaggaatttttttatttttcattttccccttaggcatatttagtatttttcccccaggcagatcattctgagtgtgcgagtgtgtgtgcacatgttacaaaggcaactaccatgttaataaaatattcaatttgaaatccttttcggtatttgaattgcttttgaataatgttttttatctggatgtaacattgttgcattagctttttaactttcccaagtaattgaatacattttattacttggacttttataaactctttccctacccactataaatgagacattcacagcgttcaagtttgtattaaaggaaaggattagtttgaccccttcttttgatggttaatgcatacatgcagttaaatccctttatgcaaatgtgacactgctttactaggtcttttagttatttatttattttttttttttttgccaatttatattgtaacatgatttcttgaacacagtaagttgttttaaaataaaagaacagcatactgtagtttttataagtaaagcgtaatgaaattgtacccctagagaaaattccattaacttgttaaattagtggaattaacaacaaataaagcatgtttgagacctggcaaaaattcctctggtagtatttataaatagagctgcatgcctctagtatgaaaaccgtatcagttgcaagtgccacttctacaagttactcagtttactctttgtatcagtaactttaaaggttggatgatccttgctggttaaagctaaatctcaacctagcaactaaatgaaaatatttagaatcatcagaatctgaacagactaaaattatcagcgataagcagaatcaagcagggtataagttttatctcaattatttgaaattgactgagttttcttaagtgtaaagctgaaatttgctaaccatgtttttgatgaaccacagtgcagcattgtgtgggttttagattgaatgactctctgctataattatcatgactttgaaatttttcatgagaataaatgaggaatggaggcaatttgtgggtttatccaaagcccccttgatgttgagtgttgccattgatcaaagatagcctcttttagattgtgatttctctctaaataagatactttgtatatttaatgacaagtctcttccctataattttgctcctcagaaaagaaaagcctagacagactgtatttccagtcacagaacataaaacttaatctaatgggtgttttgttttgttttgagacagaggctcac

SEQ ID NO: 15324 - DNA, 2300 bp, Homo sapien
gcacaccacgcccggctaattttttgtattttcagtagagacagggtttcaccgtgttagccaggatggtctcaatctcctgatctcgtgatccgcccaccttggcctcccaaagtgctgggattacaggcgtgagccaccgcgcccggcctaacttgtatttttagtagagacgggggttccaccacgttggccaggctggtctcgaactcctgacctcacgtgatccatctgcctcggcctcccaaattgctgagattacaggtgtgagccactgcgcctggccggtatgtgtttttttaatccctaaagcttggtagtttaatattaaattcaaattactgtagcctaggactcttttgaaaaatacttgacagcttcgtttttgacctatctcattaggctgagttctcttttatctttacaatacagatgtttaaaattaaaatacagatcggccgggcgcggtggctcacgcctgtaatcccagcactttgggaggccgagacgagcggatcacgaggtcaggagatccagaccatcctgtctaacacggtgtaaacctcgtctctaataacaatacaaaaaaaattagccgggcgtgatggcgggcgcctctagtcccagctactccggagactgaggcaggagaatgttgtgaacccgggaggcgggcttgcagcgagccgacatcgcgccactgcactccagcctgggctacagagcaagactccgtctcaaaaaaaagaaaaaagaaaattaaaatacagatctagatctggattttgttaggttttttttttttttaacaacctaaggttgttcagaaacatctattctatgtatgtgcttctttagtctgtaatttctaggcagattagttgcaccctgtctagactcctttcagaaaaatactaacaatatgtttttctctgtcttgggctccacatgggtgaattacaggaaagcttaacaggtactcagagcaacattttttcctacttcatgaagggcctaaatgcgaactcttaagtatttctcgtttgcttttgttcttttcccaggtttacctaatctgtaagtgtaagatgcagtcgatgaaaagtactatgggaattcttgagcaaatcagaccattcaaaaggaaaccacttcacgtaatggtgcataaggaagctagactcaccaaaataaccctgttaggtaagccggatacaccatggaatacggcaatcctctgtttaatttgcaaaccctttggcggggaggaggaaaggatggaaaaatttgggtgaaggctttatatgactagtcaaacaaacggtgagtcattgaaattttccagttaacaatcccttctgcctgggcagagcctgggccccagcgctttatgagccacactgcagttttaagccggaatatctcacggttttattgtttcttccacgaaatgattacataaaatgaaatcagctttgcaatctgcaccggctttgaaatgaagggcaaaatctggctgggggtgaggagaaagaaggtggagagagaataaggtacggagactgtgaggcagagaacgcaggaaaggtggtgaaaagagagtacaagaattttcgggagctgagtgtatttttcttccccatgttatagatgctgtccgttttcccccagcctgtgtccagcaggccagagtggacccctcctatgggctaaaatactctcggtcttcggcccagcacagagctgcaccaaccagggcctgccgctgcccccccaccaggtgacaggtggggccgccgagcggccaccagacctccgcctcctcgcgttgcctgccgggagccggagccgcttccggttgcgccctgtccctgaacttcgactcccgtcggcccccgggaaaaccgcagcggggtagcgcgggcgctgccggaacttgtagttccacctcccgccgcgctaaatagccggaaacgggggcggccagaacagagaactaccgaggcgaaggtacgggtggcggcgaggggtcaatccgcgccgggggtggggttggctgtgaggccgtcggaggtggttgggtgggaggagatccgctcacacacacgaggaggagggttgagctgccgccgccgccgcctctgtcgtcgtcgcgagtgtggagtcgggactggagctgctgccgcggcgacgccggggatctttgtcgctagctcccggcccttctgccccgccgccttccctcagtcagcgttgcccactcctctccggccgggcgcccctgcctccatttcccgctc

SEQ ID NO: 15325 - DNA, 2300 bp, Homo sapien
cagatcgcactactgtaccccagcctggcaacagagggagactccatctcaaaacaaacaaacaaacaaacaaacaaataaataaaaaatcatccaggctaggtggctcatgcctgtaatcccagcagtttgagaggccaaggccggtgggtcacctgaggtcaggagttcgaaaccagcctgaccaacacggtgaaaccccgtctctaccaaaaatacaaaaactagccaggcgtggtggcatgcacctgtcatcccagctactcaggaggctgaggccagagaatcgcttgaacctgggaggtggaggttgcagtgagccgagatcgcgccattgcactccagcctgggcaataacagtgaaactccagctcaaaaaaaaaaaaaaaaagaataagtttttaaaggttggggtgcttggaggatgaaataaagtagaagggatggcaggtttccttggcacactccttgggccttaagaaagtgtaaagaataagaaaaatacaacaaaaggaaaacaacaaatatcaatgtatccaccactcagcttaataaagaaaatataataaacacaggtgaagccttttttgtgctccccttcttccccaccacttacctcagagataatcactatactgaattaggagtttgccatttcctcaaattttaattgagtcctgcatttttgacaaacatctggacgtctctatatgggtatttcactcagtatggttaaaagcaaattcaagctgggcttagtggctcacacctgtaatcccagcgctttgggaggccgaggtgggtggatcacttgaccccaagtgtttgagagcaacctgggcaacacggcaaaaacccatctctacaaaaaatacaaaacttaccaggcgtgctggcgcatgtctgtagtcccagctacttggaaggctgaggtgggcagatcacctgaacccaggaggtggaggctgcagtgagctgtgattgtgtcactgcactcagcctgggagacagagtgagactctgtcaaaaaaaaaaaaaaaggcaaattcaagtgatccatttatgtaaacagaaaaatgcactatataaatgtatctatctagaattcagggatcggtgaaacaaaagacatcgcatcggcaggtctgtttgcaacttctgggatacaccaggtgttagcggtgatgacttctggatgcttggactgtggatttttaaaatggttttatctgctcatctgtatttctaaattttcaacaatggaacatagattattgtattattattataataccccaaacctatcttcctctcagccctctttccacgagctcttaccctaaatgtctctttttctgtcagtggcattgtgcgtcttccttagtgcatcacctctgatcttcctgtagaattttttttttttttgagatagagtcttgctttgtcacccaggctggagcgcagtggcctgatcttggcttactgcaaactccgcctcctgggttcaagcacgtctccctgcctcagcctcctgagtagctgggatcataggtgcctgccaccatgcctgactaatttttgtatttttagtagagacggggtttcaccatgttggccaggctgttctggaactcctgacctcaagtgatccacctgcctcggcctcccaaagtgctgggattacaggagagcgccacggcgcccagcttacaccagactactttttaaaatgtttttgtaaagtcagggtttcgccatgttgcccaggctgattttgaactcctgggctcaagcaatccttttgccttttgactcccaaagtcctgggattacaggtgtgaacccctgcagctggcctcaatgttaagatcttaaggggcacagcacagaccttgtcttgtctatctccctggcacctctcacagagtacagcttattaacagatgttccagaaactgttactgaacattcggcttgatgctgtgggcttgtctgcatcttgcaactgtcacctggctgagaaatttcttctataaataagcagtttctgtttcagatgtgatatgccctgatatttacaccctgtctcttaccccatccaagactcaaacttagaaacttgaattagatgtggtattcaaatccttagctgccgcgaagacacagacagcccccgtaagaacccacgaagcaggcgaagttcattgttctcaacattctagctgctcttgctgcatttgctctggaattcttgtagagatattacttgtccttccaggctgttctttctgtagctccct

SEQ ID NO: 15326 - DNA, 2300 bp, Homo sapien
atctgcctgtctcggcctcccaaagtgctgggattacaggcatgagccaccacacccggccatacccaggagtttttgtgtgcttaaaatgagttagtataggccgggtgtggtggcgggcacctgtaatcccagctacttgggaggctgaggtaggagactcttgaacctacctcttgaggtagaggttgcagtgagccaagatgatgccagtgcagtccagcctgggcaacagagcaagaccccgtctcaaaaaaataaaatgagctagtacaggtgaagcacttagaacagtccctggcacgttagtaagactatataagggttagatatgattattatagcaccactcacattttgggctgaaaacagtatgtcgtgcaccgttatcacagtttgcgattacacatttacttgtgtaattatagtaatgcctgatgctttcattaagctggaagctcacaaggccaagaaccacctgtgcactgcacactgaattcgtctggttgattctaggcttctcctgtttgcagaagtacataagttagctttcctttaacaataaagagaaaaggccaggcacagtggctcacgcctgtaatcccagcacattgggaggccaagacaggtggatcacgaggtcaggagttcaagaccagtctggcgaagatggtgaaaccctgtctctactaaaaatacaaaaattagccaggcgcagtggcgggcacctgtaatcccagctactcgggtggctgaggcagagaattgcttgaacccgggaggcagaggttgcagtgagctgagatcgcaccactgcactcccgtgtcaacgacagagcgagactgtctcaaaaaataaataaataaaattcaaaaatcaagagaaacatccgatccttcctgaaatctgtatgtatgtatatcggagagaagcgccctaaccatagaagcgtatgactggggccgggcgcgatagctcacaccggtaatcccaacactttgggaggccaaggcaggtgaatcacctgaggtcaggagttcaagaccagcctgaccaacacagtgaaaccccatctctactaaaaatacaaaaatcagcagggcatggtgccacgtgcctgtaatcccagctactcgggaggctgaggcaagagaatcgcttgaacctgagaggtggaggttgtagtgagctgtgatcatgccactgcactccagcctgggcaacagagcaggactccgtttcaaaaaaaaaaaaaagaaaagaaaaagaaattggttactgagatctacagaatgctgtttttttcagtaagtcaagcgtttagaggtctctagtgagaagattgtcatgtcagcatgttcaaggtgatgagcatcagctaggatgattgaggttgtttgcaacaacctcagtggagagtggatagtgtggagaaggtctgtgttaaatgctacacagataacaccattgtggaccttaagaagctgattacagcccagactagggctgtaacaagaacaaccctttcaggaacaagactcctgaataagtggtatacaatttttaaggaccacatatctttggggcactataaaatccagcagaagatgaagctggaggtctttttgtttgtttgtgttgttttgttttgagacggagtctcaccctcttgcccaggctggagtgcagggatgctatctcagctcattgcaacctccacctcccaggttcaagcgattctcctgcctcagcctcctgagtagctgggattacaggtgcctaccaccatgcccagctaatttttgtatttttagtaaagacagggtttcaccatgttggccaggctggtctcaaattcctgacctcaggtaatctgcccgcctcggcctttcaaagtgctgggattacaggcatgagccaccgcgcctggccaaaactggagctttattatcaataggttagaattctttccccctcccacctttctctcccaccctcaccccccacactggtatacatgcttgtttttaaaaactcacgttaataaaaacttagatgtcaggaaaaaaaagagtttaatcatgaaaccaaggaagtttctaccattaagctcccaacagtaacctagagaaatatatctaacataaagagtttccacagttagaggacaaaaagctgtatcggcaactgaaaaatacagtcatcctaaagagatctgacacatcatctattctgacaaaagatttttaaagtggcactgctcgagtcgaaatggttaattacctagcagaaattgatt

SEQ ID NO: 15327 - DNA, 2300 bp, Homo sapien
cttaagtgtatgcttatgtgtacaaggttatgatataaaatacatttcttcactcggggtgtgggcaaaacaagttgggaaaatactccttcagtcccttttccccgatgtgtaaaatgggacgaaaccctggacttcataacaatgtgcagggcgcggtggctcacgcctgtaatcccagcattttgggaggccgaggtgggtgaatcacgaggtcaggagatggagaccatcctggctaacacgttgaaaccccgtctctactaaaaaaatacaaaaaattagccgggtatggtggcaggagcctgtagtcccagctacttggcaggctgaggcaggagaatcacttgaacccgggaggtggaggttgcagtgagccaagatcgcgccactgcactccagcctgggcgacagagcgagatgccgtctcaaaaacaaaacaaaacaaaagaacgttgtgaatgtgtcacacttgtgttcacactcaatccatcaccttttttttttttttttttttttttgagacggagtctcgctctgtcgcccaggctggagtgcagtggcgggatctcggctcactgcaagctccgcctcccgggttcacgccattctcctgcctcagcctcccaagtagctgggactacaggcgcccgccactacgcccggctaattttttgtatttttagtagagacggggtttcaccgttttagccgggatggtctcgatctcctgacctcgtgatccgcccgcctcggcctcccaaagtgctgggattacaggcgtgagccaccgcgcccggccaatccatcaccttttctatctccactgccaccactgtagacaggcaccatgtcttgcctggacaactgcaataactccttaaccacctgctctttctccaccctgcccccattataattcattctcatcccaggaagagccatttttgttgttgttgttgttgagagggagtctcactctgtcacccaggctggagtgcagtggtgggatctcggctcactgaaacctctgcctcccgggttcaagcaattctcctgtttcagcctccccagtagctgggactacaggcgcacgccaccatgcctggctaatttttgtatttttagtagagatggggtttcactatgttggccaggctggaatcgaacttctgacctcaggtgattcacccaccttggcctcccaatcatgccttgggattacaggcatgagtcaccgcgtccggcctaggagccatatcttaaaacctaattcagatcgtatcactcctctgcttgagtcctttttttctttggtagagaacggcgtctcgctacgttgcccaggctgctcttgaactgctggcctcaagcgatccgcctgcctccgccctcccaagtgctgggaccttcctagaattaggcagaaaagcccaaactccttcctctggcctgcaaggccctccctccacctcctcaatctccttttctcactcaccctctcgaactcctgacctcaggtgatccgctcgcctcggcctcccaaagtgttgggattacaggcgtgagccaccgcaccaggcctattttctcactcatcccctcgctcctgtcaacccctccaggcaggggccttgcaattgcccctccttatggaacactttccctggggatcttcccggactgggttcctctcatcatccaggtctgggctcagaagtcgcctccttagagaggccctccgggattgcccatccgcctgtgcccacgctttgtcccgttcctctatttttatttcctttcccgctcgcatccctctctgggacgaagtcgccccatcactcgtgggaacctcaggaaggcaggggaggcgtcttgggcacttggggacagcgacgcctcctcgcggggtctcgggtttaccctgagtctccagcccgcgtagcctcagcaccgctctccacaccgggtccggcgacttggatctgcgccgcggtttacgttccgggtcggcgggcggggcctcgtcggcggccaggctctacttccggggcggggcggccggggcggggctcctgtctcccggcctgtctggagctcggcagccgcagaagcggcagcggcggcggcgcggcgcaggcaccggcccggggagaggcaccatgagcggtgagtggcggccccgccgctgtcacctgccccggccgccccggctcccgccgctccagctgcacactccggcccctgcgtcctcgcgccccgctccctcgcagaccccctcccagtcgctcccttttcca

SEQ ID NO: 15328 - DNA, 2300 bp, Homo sapien
tcctcttggctgtaatttggggtcccagggtgctattacatccttattttcaaacctagctctagagtggaacttcctgactaccgtaaaccatattagatgccatggtcttacctggaacagtcaagggttctgctctctcaaaatgacattgcttgtaggaagcttgtcgcagttagttcagtgtcagaaggaattggtgttgccagacccttccagggggtggagtctttttttgctatttattttagaaaatgtgactaggcatggtggcccatgcctgtaatctcagcactttgggaggccaaggtgggaggattacttgaggccgggagttcaacaccaccagtctgggcaagtgagaccctgtctttacaaataaaacaacaacaaaaattatccagatgtggtggtgcatgcctgtagtgtcagctacttgggagactgatgtgggaagatcacttgaacccaggagttcaagccttcagcgagctgagattgcaccactgcactccagcctagttaacggagtgagaacctgtcttaaaaaaaaaaaaattggaaaatgcaacagtaaatgaaaaaagaaaatcagtcttaaccctcaacttcattatgttgttgatgttttggtacttttcctcctagtcatggtgtgtgtgtgtgtgtgtgtgtgtgtgtgtgtgtgtgtgtgtatctctgttaaccatgtgatgaccgtgctgttctcaccaaagacactaaactttatttttcatgttgtaaattatttgtaaacatacagttgattcttattattcccagtagttgtattctataaagttgctatgaagactgaaccagtgctcctaggggaagtacatggttaagttgctttgaggctctggtcacacattttgtttttgagatgaactgttgctcttttgcccggggctggagtgcagtggcgtgatcttggctcactgcaacctctgtttcctgggttgaagtgattctcctgcctcagcctcccaagtagctgggattacaggcatgtgctaccacacccagataatttttgtatttttagtagagaaggggttttgccatgttcgccaggctggtctcgaactcctgacctcatgtgatccacccgcctcggcctcccaaagtattgcgattacaggcatgagccaccacacctggcctggtcacagcatttttatcaactgatcaacacataacctggttttatgtctgttcctgtttaaagacaccttgtttaatgtatgcagttgattcattaacattgaattcacagccagcagcactgtaagccatgcctgaatgaagcatctctaactcacaaattatctccatacggcacatcacagccttcctgtgcttaggaactgtcggcagtaccacttcagcactgtgcttggggacattttaaacaataaaatcaagtggaaaaaaaggccgggtgtggtgggtcatgcctgtaatcccagcactttgggaggctgaggcaggtggatcacttgaggtcaggactttgagaccagtctggccaacttggcgaaaccccatttctagtaaaaatacaagaattagtcgggtgtggtggtgcgggcctgtaatcccagctacttgggaggctgaggcacaagaatcgcttgaacccaggaggtggaggttacagtgagccgagatcacgcaaaagaaagaaaagtggaaaaaaaaatgctaaaaacatggcagtaaatagacagcaaagaggatgcttgtttacggtgtgagatctgaggtcccagctgttcgacttcagctgagattatgcacattagggagtgaaattattggcctctgcacgtgttcatgaatgattgtgaaagcacctcaagtattgactttggggttacaaataaattttagtgcgtagatgaatttccaaatacggaatctgcagataacgaggcctgactaatttccaatgactgcctctatcccttctagtagaggtaccggagtaaaccgacctctgctagtttttggaatggtgagggtgtgtactttcagtggccgagtgtaacttcctcctgcctgctttttcctagtgtggaagccagctctccaggccacggaagtcctctgagcagcctgttaccttctgcctcagtgccagagtccatgacaattagtaagtactttcgcagccccctccaccagctctgggatgacttctggcccacgtctcatggcggtgcctttgtgcttctaaccctgtgactgtgggttcacgtcaggtgtgtacgtcc

SEQ ID NO: 15329 - DNA, 2300 bp, Homo sapien
ccgccctctgggaactcggtttcaattcattcctgcagaatgcacttttaactctccatgcttgttagaactaaaataaacattagttcctttgttccttccttccttccttccttctttaaatgtctcttgaacaactacttgtcaggcaggatttgggggaggaggaaaatggcaattaactagcagacaaagtgtgtctactcagggagcttgtatcccagtgggggctacaggaaagaaactaaagaggggagtgaggttacagggggctctgaaacctgaagtcagcagccagggaagtgctgcacttggggggatgggatgagattgcctgtgctgcgctcttctagatggacggccagggaaagagggcctcttgcaggagcacctccgccgagtagggctgcgaaaacaaaacaccatggacccggtgcactgtgaacgacagggactgattttctcacagttctggcagctggaagtccaagatcaaggcaccgacagattcgggatctggtgagggtcctcttcttggttcactgatggcgccttcttgctgtgtcatcattacatggcagaaagggtaaacaaggtctctggggtcccttttttttttttttttttgagaaggatcttgctctgttgcccaggctggagtgcagtagcatgatcttggctcaccgcagcctcaaactcctgggctcacctcaaagtgggctcacttccaagtagctgggacaacaggcacgcaccaccaagtctaatttttgtgtgtgtgtagagacagggtctatctgtgctactcaggctggtctcgagttctgggatcaagcaatcctcctgcctcagcctcccaaagtgctgggattgcaggcataagccatgatacccaacctctggggtcccttttttaagggcactaatcccactcatgagggctccagcctcatgacctaatcaactcccaaacgcccacctcctaacaccatcacactgggggttaggattccaacctaggaattttaggggcacacaaacattcagtctatagcaaaggggacatcctgagacctgggtgcttttctctgaaggtggggcattacacaagcttgtgggtctccaggaacggcaaggagggggagcgggtgtgaaccctgcctccaccacccaatagcagtatgaccttcagcaaagcctctcagtttcttcaactacagaacaagtctagcactcctattttacacggatgctatgaagattaagcattagtgaaggtaaagcctggtttatggtaggtaaaatgaataagaaagtatttgtattattactattttccaggcgctcttttttctttttctttcttttttttttttttttttttttttgagatgaagtctcactctgtcgcccacgctggagtgcagtggtgtgatcttgtctcactgcgacctccacttcctgggttcaagtgattctcctgcctcagcctctcgagtagctgggattacaggcatgcaccaccacacctggctaatttttgtatttttagtagagacagggtttcaccatgttggccaggctggtcttgaactcctggcctcaggtgattgatctgcctgcttcagcctcccaaagtgctgggattacaggtgtgagcctccatacctggccttccaggcactctttgaaggaaaatctagaattgccccagaaataggaatgaacttacggatggatttgatatgtgaagactggcagaggccatctggagagaaaccaggatggaaatgggaaaccaggcagcatcctagaattcaaaccctaaaccccgggactagggtttggagctggcacttgaacccttggggagctaccaaatgggcttaaaaattggtcccaagggggtctccagatgtgacttcaagaggaactggcctccctggagcaacgccaccacctaccatcaataaccgcgtgaggcggcacggaacatttacccccattccctcccactgcctctgcattcctgcgcaaagtcctaacccggaagaactagagccccgccgctccccaccgtaaaagcttccaggtagctgagaaggctccaatcacaaaggatgcccggttccacactcaagtctaatgccttactaagctagtacgtttggacctcagaacacccctgagacgccggtgagaatgtcctcatttcacaaatgaggacaggggaccagagagtctttaaggaaaaaagaaagagaaatctagttaggaagtggtggagctgaggctggaag

SEQ ID NO: 15330 - DNA, 2300 bp, Homo sapien
tttttagtagagttggggttttgacaggttgcctaggctggtcttgaacttctgagcttcagtaatctgcccaccttggcctcccaaagtgctaagattatagacgtgagccactgtgcctggcctctaggcagctgttagtcatcattaatcaaaggcctgtctatctaccatgttgcaggcatctgagcacttatcttaaagtttgcccaaatcagggatacttagggcaagatgaaattctggctcccatctgacttatcttgactgtggggtggtcatagagggcttacctgcagttaccccctgaacttctgcaagcatgattcaactgcctccctgggacgtggggagaggggggtgtgtgttcacgtcaccctttcttactcacacgctcttttacacacagtcatgattctccttcaaacctcatttttggtcctgcttgacaagcttctctcttgtcctttctggaaacatataaaagcaaacaaacatgatttctaaaacaaaagaggatgtcttcaaaaggaatctttagaccgcaccattttccaagtagaataaactttcaatagagggcttgcgccattgagggattctttgtccatgctccagctggggctgttatcttggaagaagccatagattttgtcttaccttgtgaagaacaatagtcactgtctgttacttttttgtacttcccagaaagaaaagaaaaattataccatgtttttgtcagggagccccaggccccaagaggggaatttcctcaaagctctcaaggaacacaagtcttggagatttcagtgaatgatcagagtgtggtgggggtcagatgtttttgattatattcttttttttttttttttttgagacggagtcttgttctttctcccaggctggagtgcagtggtgtgatctcggctcactgcaacctctgcctcccgggttcaagcaattctcctgcctcagccccccgaatagctggcattacaggtgtgtactaccacacctgagtaatttttgtatttttagtagagatagggtttcatcatgttggccaggctggtctcaaactcctgacctcaagtgatccacccgccttggcctccctaagtgctggattacaggcgtgagccaccctgcccggccttgtttttgcttatatcctgatgtcacgtggcaagtgtcctctggatttagtatgtagatgtaccatggttggtaattgttttccagaaacagccaggtagaatgaagtaaatggttagcagcaccatggttggctctctcctaggcggtcactggtgatggtttctagaagacctgctgtcttctcctttatttaagaccagggatgacaaatacacaggtgaatcctgtgctggctgccagccccctgttggagggttaacaaacttgggaatgtaaaatgctatctctgctatctcagatgctttagtgatataagatattttttatatatgcttgtttcacctgaagttggcaatgaaacaggctcatagtgtgttttataggcacaggtggaaatgagactagacgtttatgagataatctgagtatatattctatttttatgcctcagattattgttttggcctctcctggcatcctttccttggttaaatctctgacctggtgtagctgtgacaaaatggtctcattgtaatgtgctacacctttgagtggggtatctgtaaagggacttggctggaatttgctcacctcattgttttcccttgatttaagctgtcagaaggctggcctgctcgcaggcaatcagggacatggagcccaggccatagatgactgtcccttaattcttactctaaggctatcaattagagtttgctatctccagttcacatgagatagacttgaattatggtttatgcagagccttgtggaaaacgcatggcttaggacttgacttatgttaggaactgtgtcctgggctcagtggggtctgggttgacagcttctgaacagatgggtccctctcttcccagatcactgcgaaacctgctcgacggtgagatggagcactcagccgcgctccggcaagaggtggacaccttgaaaaggaaggtggctgaacaggaggagcggcagggcatgaaggtccaggcgctggccaggtaggagagggtgagggatggagaggtaagcacgtgggggcttcattaaaacctgagcatactgggccgggcacggtggctcatgcctgtaatcccagcactttgggaggccaaggcgggtggatcataaggtcagga

SEQ ID NO: 15331 - DNA, 2300 bp, Homo sapien
gacatcacaccagtgtcatgagagcattgtgaggattttccaaaacaatgaattcagagtttctagtatggtacctggcatataataaatggtggtggtttttttgtgtgatggagacaggattagaatctggctatggcttatttagtaatagtataaagatgtgaatgtttttgaagcttgtatatttcttttggttactgtttgatcaggatcagcttattggtgatgctatttgataacatgccttgctttattcatatttgggtcagtaactgtggtcattctggagttatcagtgcagaattaatcatctttctctgtggcctcatgcccttttcatacagatattgctattatggccctgaattcatctcattatacagaattatttatatgttggtctcccaagtttttacatctcatctctgtttctccagcaactggctttttagtcattcactacattcattacatacttggaatgaatagtatttgtctagccctttacagcctttccaagcaagctcaaatgtactctgatttgactcagtaaccttgtgatgagtaggtatttttctgttattttaaagtttgttattagaggcttaggagagcttaaggggctggtatatgtgtctgtggtggaaatgaactcacgcatttttctccaaacctctggttctttgcattataaaatgcttttaactttactgtgcagaggaattgcctggggagcccattaaatatacctctttccaggacactgccgctgggagttactccagtggacttaggatgaggctgtagatttgcacgtctagataatgtgactctaatgcaggtgacctgtggacagcaccaccaccttttgtgaaatctacaagttacttacacagaacttggattcagtacaaaaagaccattaaagtcgggttaaaaagaagcaccactgggcttgcttttgatttgaaaacctcagcgctacacaatgcatttctaagtaggaaaattttgaacctaatttgcaggttccatatgcccattctccccaaatgggcctatggaacctacagtgtacagaatggtttttcatagcagctgaaggtccatttccccagaccgatcctgagtgccctgagccacagctggatatgagccatttcaggatgtagttgcggcagctcttacatgaattagagcggttacgtacgtacggcgactccacctagcagcagtctcttacttctgcattattacattcttgtgtaaaaagcctccaggatttaaacaaaacaacttaaaatgaacttttagaataaacattggcaacctttaattttacaggtatcaaatttcagattcccacccttttttttctctctccaagagaatcattatttaagcaccaaaataaggactggaatttgggtggcttcattatctaatggaaagttttttttgttttatttttcttccccgaatgtggtccagaagtgaggttgggttatttgcctctcaagtgctgtttttccttggtgatgtcagatttgccggaagtttacacttttatttgcgcttttgaatctctcacctcagggcaaattcttcatgctcttcctccagcattagaaccttggtgcaagggctgccatatctaccaggaacttgcctggcaattccacttcgttgtaactcttactggtcatttgattaattctgttgttaatggcgttggacaccctttctcctcgccacggagccagtgtagggaagtttcacttatgaaagtaggaaatcacttaaaagaggaggcgatcctcctcctctcctttcacttacgagagcaggagatccctctgaaaactcatgctttcattttgggcttattgctgaaatgtgaaacaagatgtttgcaagttggcttcctgcctgcagagaggccccttggcagctcactgaggggtctggggagagcaggtgcatcacttcaaccttagggttgtgtggacaagactggctcattaggagtgggctcacattagccactgtcaggtggactggtggcgtgggaggtgacatttctgaagttgtgtagcatggccccgctgtcaggtggactggtggcattggaggtgacagctctgaagttgcgtagcatggccctgctgtgaggtggactggtggcattggaggtgacagctctcaagttgtgtagtgtggccccattctcaggtggactggtggcattggaggtgacagctctgaagttgtatatcgtggccccactctcaggtgga

SEQ ID NO: 15332 - DNA, 2300 bp, Homo sapien
tgtctttgacatgcatcctgccctgcgtaccccttcctcagttctctcttctcctctctgaccctgccctccctcatcctcccttcctctgaactcctctcccctccctcccatacctttcctccctctcccttgccctgccctactgtgcctgcctttctcctgccctgcttgttttctgtcctcctctcccctccccttcctagtgctccctccccagccctcctgccttgccctcctctccccttctctcccttcccctgcctgccctgccctgccctgctctcttctcctcagccttcctctgccctgccctgctctcccttcccctcccctctactcagttctctttcctcctaccctctcctcttccctgcgctgccttcctctgctctctccttcccttccgtacccttgcaaaacaccttcagctaaagacttcatctctcccctcttctgtccatgcctggtgcgttccaggtggtgatcacctagaaaaaggcctgatgaacaagctgcaggacctgttccagcctctcagccacgccgttgccccgctgattggcccagatgggagcctcaggaccttcctcatgaatatttggggccaagtcccagtataaagattagaacagttttcttttctaaatttgcaattgtattattttccccaaattaatcaggggaggccacttcgtgaagctttgctaacagcgcccagtcagcagctgataaaaggagctctgtgacatttgggaagccaccgctatgagggccaccatgcccgactatttgttgctctcagatgtctctgtggagagtttttaagtggcaataacaggaattgctctcgtcagcttcccaattagcaaccgcacagtgggctccccagaaacaactgctcaggcctgggtgctgggagcccaggcgtcccccgttataaagcagagttcacaggttggcatggatttgccgtggattgcggcttgctccctgcatcccagggtggcaggattgggcctgtggttttgatgagttccacacctcccagctggctaatgcttgaaagaagaaaggcagattttcaatgctccagggataaaacagaggggctttttaaaattgaagactcagagctgttttcagtctcatagaaggaatagctgattctcactctctggcttaaaatgcctgtcactccttggggaaagtccagattctctcatgtggcttcctagggctgccctagctccccctacctcaggcgcctctgctcctgaatcttgtggtccccctaagctactgtctttggcatcttcaggctcctccctgccctggagctgcctttctctcccactgtcgtagagcagagtggatataagggcactggctcaggaatcaggcctcttggggccaattcttgtttctaccccccaactaaggagttgtggacctgggcgcctctgagtatcagcttcattcttctgaaatgggaacatgaaaaagcccctctcttggccagacatggtggctcatgcctgtgatcccagcactttgggaggccaagacgggcaaatcacttgaggccaggagttcgagaccagcctggccaacatggtgaaaccccgtctctagtaaaaatagaaagattagctgggcgtggtggcatgtacctgtaatccctcctactcgggaggctgaggcaggagaatcacttgaaccggggaggtggaggttgcagtgagccgagattgtgccactgcactctagcctggacaacagagcaaaattaggtctctaaaaaacaaagaaagaaagaaagagagagagagagggagagagaaagaaagagagaaagaaagaaagaaagaaagagagaaagaaagaaaaaagcccctctctcgatgggctgctgagaataaatgaaatgatgcttaagcataggtgtgcctagcccagtgcctggcagagaaagcactccaaaaatgttgctagtgacggctcctcctgctgctgctactaataatgatgatggtcattattatgtcacatagtcctgtgggagggctccctaacccccattcagatcaggcaccctgtcctcattctcccctatggaagaccttgtgtagcccttcatcaggcgtgtgttgtggctttgtcacactgttttgtaatgatcgctttgcatgtcttttccagctgactgtaagttccacgaaggcgggatccacaggtctcatttatcttttaactggaagtgcctggctcacagtaggcccccaaagaatgcatgctga

SEQ ID NO: 15333 - DNA, 2300 bp, Homo sapien
tcgagggtgaccaacaaagttatagcccagggctgaggggtttcccaggatgtgggacttttcagtgctaaaaccagaacagtcctgggcaaaccaggctggttggtcaccctaatttggaagaagacagattccaaagcataactacaagcattactacaaatttgaagggcccaatataatgcagtcggcctacagggtttgcctaccagaactgcacagggggatcttacttacatggggaaaataaaacccacaaaattgaatgtctctactggcttccctttgaatgttttgtattttacagatagagcctcagatcctgggcatcgatattccacatggatcctgtttgtacctcttgtattcacaccggggaaactgcaaagggaagactgctaagtaatgtaagggggcccgtgcctgcacaaattcttcctagcaggcacactgggggccttagcagcgtatgtgttgtgagcgagtaacactttgcatccgcaacggacttcatgcctttcagacaatctgccagaccagtcctaatggcaaccttttaaaaaaggatgacaagtccttctagcaggctgtcacatgttgccagattaaaacattgtgtaattatttacaggagacggtggggtgtcagatcatttggctggaaagaccatgtttccaaataaatttgagagatagctacagctgctctaaaacagagcaaaatatatggcaacaaaaggaagaagaacacattattgaggcaaatcatgcaattaagtatccactctttgtcatagggcattttggctgtccctgcttctccaggcaagcttttggaatattctgaataagagctggagagtcaaagaaagagaaaacaaagcccctttctatctcccatacttttccttcctgcaggaaaagggacacagtaccatgcagttgaacaccatgtcaagtgaggataaaggaaaacagccatgacatcactccattactgccacccccagtgtgcctcacaggccctgcaatttataatcttgtttaatcctccaagcaaccgaggaatacagatatcatcgcccctgctgtacagataaggaagcagaggctcattggggtccaggagcatgcctgtggacaaatagctcctaaatgacattgagttttaaacccaatctccaaaaagcctgtatgttttgagcgcctatgatgtgtcatcagacagtgaggcaggtacttgggatacaatcagataaatggcagagaacctatccaagaagcccacaagctggaagcgaatacaagaaacgccatcactcatagccatgacaattactgagtgcctgtcacatgcctggcattgttcccattcatgacttcagttcagcctcccaccagcccactgaccaaggcactattttccatgatgtcttcactttctgactttaaaacccagactcttcaccattagatcatgtgcctgagatcaatggcaagagatgaaagcctggccaaagcactgtgttaataaagtaggctgattatacagtttactacaagtagaaggaattgccacaaactggtacttctggagcagtgttcaggaagaaggcaggaactgcagctgaatctagtaataagacacgatgatgatgatgatgatgacagcaatgacaacagcaacaacaaaaatagaggctgggtgtggtggctcatgcttgtaattccagcactctgggaggcagaggcaggaggatcgcttgagcccaggagtctgagaccagtctgggcaacacggcaagaccccatccctacaaaaaattttaaaattagctggacatggtggcatgtatctgcagtcccagctactcagggggctagggtagcaggatcacttgagcccaagaagtagaggctacagtgaggtatgatcacaccactgcactccagcttgggcaacagacgaagactctgtctctaaaaaaaaaaaaaaaaaaaaaaagacaaaaaaaaagtgctagagaaccagatttaaagcagaagcagtccggaaatcacatgcaaaactgctcccagggagaaacgcaagcccaggcacagagccccgcttgatggcaggtgctggacaataacaatgctgggatccccgcctctgctgccactttcctcaccagcatggatcctgccctctcctttgtgtcactcactaaaggctcaaagtctggttcaaggtgagtctgagtactagggcctgggatacatgcctgtgtcctaactgcaaagaaagcagagaggcc

SEQ ID NO: 15334 - DNA, 2300 bp, Homo sapien
tgtgctcagcttccccttcacattttttttttttaaagacacagtctcactctgtcgctcaggctggagtgcagcggcgggatctcggctcactgcaacctctgcctctcgggttcaagtgattctcctgccttagcatcccgagtagctgggactacaggcgtgcaccaccacacccagctaatttttgtatttttagttgagatgaggtttcaccatgttggcgagggtggtcccgatctgtagacctcatgatccgccacctccacctcccaaagtgctggcattacaggcctgaaccattgcgcccggcctccttcacatttcttgggactcctcctctgggccaggccatgttcagggaatagggttatagtgattgattaataataacaatggctaatattcattgagtacctaccatttgttattagaactattattctaagcactttgatacatgaactcatttaagcctttctgcaaccctatgacctagatgctactattgtttccatttcacagatagggaaactgaggcatagagaaactatgcaattttcaagagcatacaaccagtaagtgggtagaaccgggattaatccaagcccactgactccaggactcataggcatttatactcttaaccactatgattcatgggtgactcttgtcaaggattagagaacagtagttatggccatattagctactcaaacagtgctttggatgtaggcagctagtttagaaaagaatttcccaaatttgtaagatcataagagctcccctgcagtgcttgttaaaaacagatcattttcaggccaggcactgtggctcatgcctgtaatcctagcactctaggaggcccgggtgggtggattgcttgagctcaggagttccagatcagcctgggcaacatagtcaaactcgtctctactaaaaatacaaagtattagccaggcatggtggcgcacgccaatagtgccagccacttaggaggctgaggtgggagaatcacctgagcccaggagatcgagactgcagagattgtgccactgcactccagcctaggcaaccagagtgagaccctgtctcaaaacaacaacaacaacaacaaaacacagatcattttcatagagatttggattcaataggtccattctggaatttgtattttcaacacgtttgacaaatgctggctaagtagttcactacaatggctcttgagttgaagagacactaatttggttactcgcagctttactacctctctagatgtgtgtcaccttgtgcaagttcgttcatctctctgagcgtcagtttccccaaatgacggatgcagctaataacagcaccacctcctagggctgtagtggggattaagtgagcagcgtgcaaagtgcttagcgccctgcctggtgcatagcaagcaaagataataacagaaagatggtggcagccactgggaagttcaggctgagacagtcttccaagacgtccaccttttcatcttttttttttttttttttgtattggcaaggtctctcgccgtgttgcccaggctggtctccaacacctggactcaagcgatcctccctccttggcctcccaaagagctggggttacaggcgtaagccaccccagtggctccttctgactttatgatagagttgtcagataaaaaaaaatcaggacgcttccattcaaacctgcaaaaagagaaaaatttaaaaaaattaggacgcccagttcaattggaatttcagataatgaaaaaaaaatttaacgtaagtagctcccaaatactgcataggacatatttataccaagtcagtcattctttaaaaaaaaaaatctgaaattccaatttaaccgggagtcctgcatttttacttgttaaatctagtaactctgcctttagggaaggactgaccccaaagccttatccccgcccacgcgtgccctagacagtctccactcgccaggcgcgcaggtcgatcccagaggggccgctggcgcctccgctccgcccaggcagcactagtggcgccccgagccaccgggcccctccccgtcccgccccagtcccgccccgagatcaaagggcgtcgcccaaagcgggacaggtccagcggttgttctgtgtgaagtcgcgcggcttccacccacgcagtgttctaagtgaaggccagaaactcgctcgccatgtcggctgcagaggcggggggtgttttccacagagccaggggcaggaccctggccgcgtttcccgcaggtactgcccgcccctcacccgggga

SEQ ID NO: 15335 - DNA, 2300 bp, Homo sapien
ctgagaagcccttgactgcagccaagtggagaggagggttgtggaaacattatctccttgcaaatcgcctagcagcctgcaaagtgtatacttagttaatgcaattaaaaaacaaaacgccggggcgtggggagatctaaatttggtgtagcagctttggtgcaaatcctgttttggggctactggagtcaaattcaagcagaggagagaaagaggtgggagaaatgagagagggcctccggggagctggaattcgctaggagagagagggcagatttggaaacacagaggagacgggaggctggaagctgaggaagcaaggcagagctctgcagcccccggtgaggatttccggggggatccgtggggacaggggccagccagctccagagaccgatgcgcgggctccaggtccgggagggtggctgaggctgggtgcccaggccttgcgctgcgccagatccgggagcgcagaggcggcgccgcggtgttccctcctgtggagcgcagaaaacgctgcgggggcgaagagggacagaaagcggcaggttcgagaggctgggggacttccaaggaaagaccttccaggacacgccatagcctcggccttgttcggctgtcccctcttacccccgaccttctttgattcgttcatcccgagcccctctcccccggagggtgcttatccctggctcaggggcttgccacctgtccttcccagctccgcctgggtccttgcttgggcccagagagttgagccatgcgggttgcgctcagggctggagggcgcagccgggaagggcaaggaggccccgcacgcctgggaggggcgatcctgaccagactgcacccagtctgtcttggagtgaaagccatttagtctgtccccatcctctccgagtcatccttcccctgatgcacagatttcggccgccgctcctgcacacgcaccggtgaaaaagctacgagctgagccgcctctgcgctctggacagggctgagccgcgcctcctacccagagagggcgcgggaggtcctgccgcggttttccacctgcctggaaatccgagcggctcctctagcctcggctgctgccgagctcgctcctccccgtccgctcgcctggctcagctctgcacgccccccagctagctcccgctctagtcacctcttccccgcgcccccgcccctctagagctcgcgcccgcccccccccacccgcgcctcctctgcccgccctcctccccctcccccttccctcctgccctcccttcattccacaagtgtcgcttcgctctcttcagcgcacttggcgagctggtgaggtgagagggatactgcgagagggctaggggcggccagtccggggctgccggccaaggctaggcgctgccagcccgattctcctctgctctccacccccgcctcacccagtggccggccggacctgcaccccgcgcttgaccccgctcatcctccccccgcccggccgggcgcgctcctccccggccggcccctcggcgcgcggcgcgctggaggcgaacgcgggctgaggcgaacgcgggctgagccgagcgcagtggccgccgaccaccgagcgccccgcgccgctccctgcatgtgcggcccgcggcggctcgcagctcccggcagcagcctcggcagcttcggccgcgcctcgagaggcggccgcagaggctccagcggcggccgagcggccgagcccgggctgggagacaccatgcgccgcgtccttcggctgctcctcggttgcttcctcaccgagctgtgcgcccgcgtgtgccgggcgcaggagcgagcgggacacgggcagctggcgcaactgggcggcgtgttgctgctggcggggggcaaccgctccggggccgcctccggagaggccagcgagggcgctgaggcatcggacgcgcccccgacccgggcgcccacgccggacttctgccggggctacttcgatgtcatgggccagtgggacccgccgttcaactgcagctcgggcgacttcatcttctgctgcgggacttgtggcttccggttctgctgcacgtttaagaagcggcgactgaaccaaagcacctgcaccaactacgacacgccgctctggctcaacaccggcaagccccccgcccgcaaggacgaccccttgcacgaccccaccaaggacaagaccaacctgatcgtctacatcatctgcggggtggtggccgtcatggtgctcgtgggcatcttcaccaagctggggctggagaaagcgcaccggccccaaagggagcacatgt

SEQ ID NO: 15336 - DNA, 2300 bp, Homo sapien
cgtcatctgatcaaacggacttaacacaaattcattatcttccagttctgggggtcggaagtccaaaatgggtggatagagctgcagtcctcccgggagccctaggggagaatccatttccttgcctttttcagcttgtaagggctgcattccttggttcagtgcccgttccacatcactctgaactcggcctcctgtcacatctctgaatctgaccctcctacctctctctttctcttataagcacatttgtgatacattgagcccacctggataatccatataatccccccatctcaagaaccttaacatactcacatctgcaaacccccctttgccacataaaacaacctacaggctccagggattaggatatgaacatctttgggaagccgatattctgcctaccaccgcttgggagtcaggtttgaatttcagctttgtcatttcaatcttcatttcctaaatatgtgttgagtacccccatatcacgtcctgaaatagatctaagaaatacactaactagctcccgtggccttgcccaagttatataacctccctgcacctccatttttctcactggcagaactgacgagattaatatctgcctcagaggaaacgctgtatgtaaagtgtctgccggcaaccctttccacttaaacagcattcaggaattatatgctattttcatcttgacaaaatgtaagcaaaataccagattaagcagtaaagaggtagaggaacagatcctcttggaaacggctagtgtgaatgtgaattggtataggctttctagagggcaatgtggcaatgtgaatggaatgaaaagccttacaaatttttttctctttatcccagtgattattcatttctagacgtgtatctgaaggccacggctgaatttacatacaaagatgtttagtgaaatattatttatattactggaagggaaaaagcagaaacagactaaatgtcctctaataagcaattaggtaagtacacccacataatggaaatctcatcagccatataaaaggactttgtaaaagaatatgaaacatcatgttcagaggtttgccaaatgttaatgacaaagctggggatttaaatcagggatattaattatctcgtgtcggtaaaagaactccgtgtgatgagagaatgtgtatatagatagaaaaaaaaggactaaataaaatagatttcgtgatgttaacagtggttatttccaagtaatggaaacaagtgattttcatttttgtttacttgtattttctattttctaataacaaaggtggggggtttctatacaaaacaattcctctactagttcaactatcaggcatttctaggtatagaacaaacactgcgggaggtgtccctctagtggaaggagggatttttaaaaatagtttattgtattgaagtctttgggaggcaaacagaggtctgaagtcagtaaatgattctgcttattccacagccactgcactccagcctgggcaacatatcaacatcctgtctcgggaaagaaaaaaaaaattaaaagaaggatggggagtaatcgcaaaaggaagggccaaaaaccaccctaggaaacaggtgctactaactcttggcgcatttggaatattgaccagtaactttttcaactgtcgatgtcgggggattaagctccttaggcttacttccccttcccttgctttttggcagcttgaggctagggtgccaggggatgtggaaactcaaaagagacgtgaatggagcctgatatctgcaagctacaccgacagggggcgccagcccctacaggtgactccatgaatcttcggctccactcggctcttcttcggctgagttcggccaacgcttgccttctcaggctcggctctcttcggctttctgagagcgcgcctgtcgtggcctcggctcctcttcggctgcgttcggcccacgatcatctcagtctcagctctcctcggctacgttcggctggctgccgtcctctcggactcggctctcttcggttgagttcggcctactctccactaggagtcggcttccttcggctgcgttcggctgcgacccggaagagcttccatggagtcagggcagccggctcgacggattgccatggcgccgctgctggagtacgagcgacagctggtgctggaactgctcgacactgacgggctagtagtgtgcgcccgcgggctcggcgcggaccggctcctctaccactttctccagctgcactgccacccagcctgcctggtgctggtgctcaacacgcagccggc

SEQ ID NO: 15337 - DNA, 2300 bp, Homo sapien
tgtgagccactgtccccagtcctggagcccatatttgtaaaccagctctgcgggttaatagctgctccctttcactagagaattactgagggtggcagaggggaaaccacacaacataagagcaaataaaaatataaaattaaaaaatagagatagcaccatgtggtataagaacagcattaggctgggcacagtggctcacgcctataatctcagcactttgggaggccgaggccggtggtcacttgaggtcgggagtttgagaccagcctggtcaacatggcgaaacctcacttctactaaaaatacaaaaagtagccaggcgtggttgcaggcgcctgtaatcccagccactcgggaggctgaggccactgcacttcagtctgggcaacagagtgagaccttgtctcaaaaaaaaaaaaaaaaaaaaagaacagtattagcaatgacttctatgtatgtgctgaactgacgaaatgttttttatggccgggcatggtggctcatgcctgtaatcccagcactttgggtggatcacaaggtcaagagattgagaccatcttgatcatcctggccaacatggtgaaaccctgtctttactaaaaatacaaaaattagctgggtgtggtggcatacgcctgtagtcccagctgctcaggaggctgaggcaggagaatcacttgaacccaggaggcggaagttgcagtgagtggagatcgcgccactgtactctagcctggtgacagagcaagactgtctcaaaaaaaaagaaatgctttttgcatatacaattttatttaagctgaaactctcaaatgggattatgatagagttgttaagtcctggctcctatctcctctgcagagataggaattagaactcagggatttgctcacaattacagtaagtgttggagccagggtaaaaatcctgttattccacctccttctctagtgtggtaggcagactggctctccaaacacatgtagactctactagcctctggaacctgtaagtgatgttacatggcaaaagagattttgcaggtgtgattaaaagtatagcctttaaaatagggagattatcctggattttttttggtgggcccaacataatcctaggagcccttaaaggcagagaactttctctggctggagtcagaggtatgtggcagaagaagtcagagagttctacttttagttctttaaggaatctaccatttgatccagcagtcccactactgggtatctacccggcgggaaataagtcattatacgaaaaagatacttgcacacacatgtctatagcagcacgattcgcaactgcaaaaatatggaaccagcccaaatacccatcaatcaatgagtggataaagaaactgtggtatatacgatggaatactactcagctataaaaaggaatgaattaacggcatttgcagcaacctggatgggattggagactattattccaggtaaagtaactcaggaatggaaaaccaaacattgtatgttctcacttataagtgggagctaagctatgaggatgcaaaagcatgagaatgatacaatggactttggggactcagagggaaagggtgggaaggggatgagggataaaacactacaaattgggtgcagtgtatactgcttggttgatgggcacaccaaaatctcacaaatcaccactaaagaacttactcatgtaaccaaacaccacctgttccccaaaaacttatggaaatatattttttaaaataagaagtcatagagattcaaagcatgagagggatttgtcctgctgctgtaggagcgagccacatgggaagcataagaaagaatgcaggctgcctctacgatcaaagaccagcccccagcagaaaagagtcacctcagtcctacaaccacgaagaactgaattcagccaacaacttaattcacccccagagctggtcctgccaacagattgatcttatccttgtgagactctaacagaggacacagctgagccacatgctatccatgggcttctgacctccagaactgtgacataacaaacgggtgtcatcttaagctggtgttagtgccactgcactacaagtgaatagcagggcttggtctaaaaatatctcctccactgacataccacatgggttgatattcctgctgtcagaggcacaccttgaaattaaggtgtcttcctacaaaaagtcttgttgttaagttcagacactgtctgagatgaggtaaggcattagcagcctatcagtaattaccatgcaaccagaggagtttcccacc

SEQ ID NO: 15338 - DNA, 2300 bp, Homo sapien
cagcctcccaaagtgctgggattacaggcatgagccactgcgcccagcccaggttctccagctttggactctaggactcgctccagtggctcccaagttctcaggcctgtagcctcgaactgagagttacaccatcagattccctggttctcgggccacaactgcgactgagctatgtcaccagtttccctggctttccagtttggagatggcacatcgtaggacttctcagctgccatcatacatcccctcttatgaatctatatagttttttcttttttagagacagggtctcactctgttgtccagactggagggcagtggcacagtcagagctcactgcagcctcgactcctgggctcaagagatcctctcacatcagcctccagagtaactggaactccaggcatgtgccaccatgcccaattctttttattttttgtagagacggggtctcactgtgttacccaggctggtctaaaactcctaggctcaagtgatcctcctgactggacctcctaaggtgctgggattacaggaatgagcaaccttgcccagcctacatctatctagaacctagtagctgtgtttctctggagaaccctaatacagggttgttgggagggctaaataaattaataaatagacagcacctggagcagggctcagcactttgtagctgcccagcaggtgtgattttccttcttcacccacttcctccatctggtgagttgagtgaggttgaaacatgcaagggcacccacatgctctggcctgtacacagcaattggttccggggagagtggacaggtttggagcatgggcaggccagcacttgctgacattgatgtgattatcaggtgggctgggtaagcccatgcagacgctgttgcaggtggaaggctacctagaacctccagggctcctgatcttacagcagccggcccagatgagctagctcatgctcgcttgcttgcagaacaggacctacctacaaggtagtgctgggctccggactcagacccaggttcaaatcctatttcacaatggaaacaggctactttctccacctccaggattgcaagaagattggtatgaccttgatatgcccgcaataaatgttagcccttcctctttacaaacaattattatttcattaagacttactcctgggaagaagtcacacttttctgtgtgctaacatcatgtacattctgattctctgtcctgtgtgccattccatcatgctctctaccagcaaaacgccaccagtctaaggaggagacagaaccgcataaaaatagtcacacagtcttcagagctgcacagggagtggcacaggggcttcacaggccttgggaagtttgtaaagtgagggagaagcactttactgtcgccagctccattgaaaacagattgtagcaaatgacttcccaggagctcctcctctcaccttggtgaatgttgggagagaatgaagactgcggctgagaggcagcgccttgagccttgaacggaaagagggacagggcctgggggctgtcactgaggtgcagaaatgggttttgggctgggcatcagacaaccccagatcccaacactggctcagccaattcctggctgtgtgacatggagccattactgtactttccttgccaggcctccatttttcctctctctagaatggggaggctggtaatacccactttggagggcagtgtgaggaccgaagggggctgttaagtgctcggcgcgcagcgagcactcaggacgggtggcagcggtcacctttgtcgccaccgtccaagcctttgcagaggctcagggccgagccccggacatgcgcatgcgcacgcgcacccggccggccaggtgagaaggaggcggccgcctcgcacctgggctttaacccttcccagtcacgggagtgggcggagtgcacgcagggacggagtcgggggcgagcagcgagagaggccgggcttgacccttgaggcggggtgggcagcgtccggggagcgcgccgagccgcttctagcctggggtccgcgcgcgccgcggggaggagggggagtgccgaggggagcgaagtctcgcgagatcgcgcggcggcggcgggagcggcggcggcggcggccggggaggtgagcggcgggcggtggcggccgttgggggctgaggccgggtgagagcggccgagaccgagggctgggtgggggagcgggcctggtgaacatcccgcgtcccaggcagccatccctgttcgtccccgcagcagctgcggcgccgtttggtccgca

SEQ ID NO: 15339 - DNA, 2300 bp, Homo sapien
atttctggaatctgcccgtgttttcttttagtgcttttatggtttcattttaacacctaaatctctgatccacttaggatttattctggtgttcagagtgatatataattcaacttttcctttttccatgtggccaccagttatctttaccgatttgtttcagttttcatctctgaatccagttgatggtggtgtgagtttctggatgtattggggtacatctctgcactttctattctatgacattagtctttctattcatatagcagtactacattggttttataaaatgttttaatatcttttaaaactagtttccccttgttgctttttttttttttggcaattcttgctagtttatttttccatgtgaactttagaatcgttttgtctagttccagaaaacactttttaaagaatcaagatcatgttaagtttatgaacttaaaatctatttgacttctctgagcctcagttttctaatctgtaaaaggagcaatagtgcctgtaagaatgctggagggattaaaagagaaaacgtgtgaaactcatcgcttagtgcccttggtccactcccacctttgttgccaacatgggctgaggttgccattccctcatttttttcccactgttacccatctcactttcaaaaaagaaaaaaagaaaggacccataaagaaaaagttacaagacattagaatccaagttaaaactaagctcttgttcagtttcagcaggacaattaatgtacctgaaaaccagagaacaaattcagcctggcgttcaaggccccctcctgcttctagccttgctgccttagtctctcttggatgtaccctaacaatggtgctgcttatgtttcctagaggccctgtgtttcctggaaccccattcctcccacccagaatatagtgctacgtaattctgccagttcagatctgttactgtcccccacccagtcaaaaacagtatctgtctctgcatgtagcttgtctgtcatgcagcttaacccttgatgaactgtaaactctgtaaggagagaaactgtgttcatcctgcacaccaaataatgccctgcacccaacaaaatactggcaaagattggacattcagatgtttgttaaatgaatgaataattgactttgatctttttttttgctttatattatgtgtctaggtagctcttatttcactgaggacactgtaagcccctggaatacaaagcttatgcccacccctctcccccttttttagagacggggtctctctcatgcaggctggagtacatgacacgggcagtggcacagttatggcttactgcagccttgaactcctaggctcaatcaatcatcctacctcagcctcccgagcagctgggactacaggggcaccaccactcctggcaaatttttttttttttttttaaagagacggtattaccatgttgcctcagtctggtctcaaacttcagggctcaagcgatttgcccaccttggcctcaccaagcccgggaattactggtgtaagccactgtgcccagccaattaataataattattatcatcataaataatgctggtgatggagatggtgaaaggcagatttattattatataataacattataataaaatagtatttattgaacacatatttcaggaactactttagagtccccaatgtggattatttcatataatcctcagcagtgctaagaattgggtactgttgttacacatatgggaaaacaggcacacagagaagttacttaccccagatcacacaggtagaaagtggtagaaccgggatctaatgcagatgctctgagcctagcacccgaactcttagcccgctgcagttctccaggcttgtttgttaaatacagttctttgaatacagtcgtgtataggttctcgaacaatttaggaaaagttttagttacattttcaaatttttactttccttcctgaccattccattttaataacttcgattttgttatttccagtttatcttagacttcacattctccaagagacacaaccttgtctggcatgtagtaggtgctcaataaaaagtaatttctgcctttttttttccaggttcacaataaaggtgctaagaaagagaatgtaagacaggaaaataattaaatattcttaccgaggtaagtttttttataatttttttttaacaaagaaactgtaatttctttctttcttttacctcctcttacagcctgctttcttgaggtctaacagggagattgttttaggagtggttaagttcatagaacctag

SEQ ID NO: 15340 - DNA, 2300 bp, Homo sapien
ggctgctattattatttcatgagtagttaaaatgctttcataaaatcattttagtatgattatgttagctttctttcctctcaccaggagtagaattaccagggggccatcaaagtcatggcttctgctattaagcctgtctcaggatgaaattaaagcctggagctggagcatattctagaagacagaaggcagggcaaggccatagacagacttgggctttagagaactaagactttggttaaattccatacctgctacttagaagctttgtgacttgagtcttggcgtgtaaaatgtctatagcatacacaatcatagcgaccacgccaattgtggagggttaaattagataaaccttgcaaaacagctaattaagtgaccaacctaaagaatgtcctcaaagagctatggttatttttattactcctttaaaagtgcatgagtagtttcttcagaagaatgtaggcgttagggtcagagatagtaacagaacgtttgagggcatttttgagagtgtgataagcttgtcactatttgttcctgcagaggtttggactgccgaggatggacttaaattgcttcagaaggaatttcagttgacaagaagcatgtcctgtgagatgctgaaaaaggatagatagcaatctttctagaacaatatgggtttagtgcacaccagccttggaaccaggcacaaaggacagaatacttcatccagacccacctgtgtttaagtggtggaaagaatattgatttttctgtctgtaaaaatgtaagcctttatcccagaggagggtctcatcaggtgcatgattaaaatgtgtctgtatattttcttttgaagagaaaatgtgcttcctttagagaacttatttagttgctcatctaaaattagtggctcttagttattgacccaggacttctttagaattctgggtattattaaaggaagttttcctgatgcactgtcttctgctttaattcattcactcaaccatgctacagatgtttattgagaacacctaatattccaagcactctgctagaagttattttgaaaaaaaaaaaaggacaaaacagaacctcatgaaacagtattcacagtctactgctcttataacctctgatgggttttatgggaactctttgcaaaggaacacactttgaaccatttttaaaaatcagattattttggctacagaggtatatatctggagtatttggagactggcttatctccacatttgcctggaattcctgtatctagagatttccttccagcagtgtccctatatgcagtgaacagcagcctgtgacttgcaggagaggtgcccatccttgatagctcatgtaaaattaaacttaggctggtcattggtttactctgttatgaaatagaagctgtcagtgttgccgcttttaatgcatggggggagaattttccttaaaaaaaatcatggcaatgttaactctcccagccaactagtggcactaagaaaaactgctgcttgggtctgaattgccaaaggaagaaagctgcaattgcagtacatttccctattacaaagagcatcagctttgccaggaagaggcacatgcaacacaaagcacaccacaaaagaactttggtggtgaaatgactctgtcttcattcacatatgctggtagcatgtttattcagtgtgtgcctctgctgagataagagccgcttccttcagatgccctagactgccgtttgtgtagctggagaacttaatgagtaattgatgtgcttgtctggtcaatataaagtatttccatagcctgtggctgtgtttatagagagcgggagagagaccacaggcagcaatttgtcttcttaggtatcagcaaagtcttctcttttaacaactagaagatttatttttaactgcttgactcagtgtttgtcagatgattcggaccatcaaactgcagactgaagtccccagcgcgggggaagctggaatggcaagggaaagggggctggctgggaaaaggggtgggattttagaatcgtgcctgtgtggctctgcctcccgatgtgggagagagttaagggcttccagcggcatgagtgtatttgcaggtcaagctgggaactaaagggtaatggctgccttcagctgcttaaagacataattggccagtgattggggtattgtggggagcaaccagggacccagggaccagagtgttctgcgcaccgcacttcgctcttctgcaaattaagcttttctcctgcttgatgctgcctgtcttcagaagcctctcaccat

SEQ ID NO: 15341 - DNA, 2300 bp, Homo sapien
ttgatgacatttgggcagtttctgcctcttggctattgtgaatagagttgctatggacatgtgtgtacatgtatttgtttgagtacttgtttccaattcttatttcacctaggagtagaattgctgggctgcaattgttataaactaaaattatattcagtttagaaaagaacttctttaggaaagactttagaaagaactgctaaatgttctaattttgtatcttatggtcttttcctctgataaaaatgataccatttagagccagtgaataacttgccatgcagtttcctgatttctctccccctggctgttgcctttactagttggagcatttcggtaatgcataaccatgtttctcttcttgactttctcttcacagtctacagtgattattccaaacctccttcactggcctcaaaattaactttccctttacccatctcacttggaacagatgacctttctttcaacttctccaaaaagttaaaagccattatctgggaactccctagatgtcccagaccaaagctgtaaagcttcttgcagcagtcgccaatcctcattgccctcctattatgatagaggaagtgtctcttaataaaggatgtctttgtacatctgtccccttcctactgccttcaaggtacctgctatctcttatgctcttgttcattctctcatttgtattcattcttatttctttcttctccccttccctctcttttgctcttcatcaattataaacttgctcaattattttccaacttcaagtttcacaccctcaagttttcactttctcccttgctcttcctgggcagcatcttgaaagcatgcttacactcttgcctctcgttcacacctgacctcctccaacctgacttacatccatcactttacaaaagtagctcctccagggattaaaacagcagcatttgacacacttgatcatgcctcctttaaaaactcttacacacaccctcctggttccctccgcctttttaggcagcttcctctgccttcctttgttggatcttccttccctatctgacctgtaacagggcttctatttgttggctttcttaagagctcagtcccgggctttcttttcctctctatttatattctctacctcagcaaactcctgtggcttcaaatactacataagtgacaacttccaaattccactctctgccaagaccttctgaaatcgggacccatgtagccaactgccattttaacatctccacttcctattcaaacatgcccaagactgcgcttcctaatagccagcatgcattccttatctcagtaaatggtctacccaggtgcttaagcctgaaacccaggatcatctttgtgacctcttcctccttcaaacacactgtccactcccttgccatacactgttgatttgattctaaatgtatctcaaatctattcattacatctctcagccatgatggagttgaagaaaaaataagtcctgtgctcaaagtttctatcctggaacatcagaaaattctatgaaatttggaaataaatgtttggtttcaagagaaagcttaccctgagcttttgaaaaccacggtaaatatttccccattgagtcagaaacccagccccattgtcctcactaattctttttatatcttacagttcttcactgcttattagttatttatattatttgacatgatatcactagtacccttaggtgagaggaggtaatctttgtttctgaatttaaatttaccttaaaacttaatgttatacattgtggggaaggggaaaaataaaaaggtactatcttaccttgtaagctggactacagattggcacaaccatttggaaggcaaagtgaccttatcaaagttttaagggcgtgttccattattagaaatttaatttataggtatatcatcaaaggatgcccccaaaatgaatgaggatattcattatagcattatttgtaatagcaaaaaacctggtagcttaagtatatgaataatacatccatatgttagatacagcctttaagaaagagctagattctgagttccgacccggacccgtacgctgctgcgctgacgtggctcccggaagtaaggctggcgtagggccgccatgttgcagcaggatagtaatgatgacactaaagatgtttcactgtttgatgcggaagaggagacgactaatagaccaagaaaagtcaaaatcagacatccagtagcatcgtttttccacttattctttcgagtcagtgcaatcatcgtctgtcttctctgtgaattgctcag

SEQ ID NO: 15342 - DNA, 2300 bp, Homo sapien
gatacatctgagatttttccccccacttttccactgggttttctgtctctttcttactgattttaaagacctttttatatactctagatatgaggtctttgtcagaaatatgtattacagatatgttgtcctgcactgtggcttgacttttcactgtcttaaagatgtcccttttacttagtgctttttatgtgctgtttaagaaatctttgtctacccaaaggccatgaagatactatcctgagtgtttttctgaaagctttattttcataattcacatgtagattttgggaacaaggtgagatggggccagtcaagagccatgtttttttctgtgtgaatttccaacgtagcatggcaccattgaagtcccgccctctctccactacatcacagtgtcctctttttggtaactcaagggtccgggtatgcagagggccgtttctggatttgctggggctctctcatttgcctgttgttctgtccctgtatcagcaacatcacacattaattacgtgttgatgtctggtggtgtgactcttccagctttgcttttcttcaaggattcatggccattcttggtcctttgcatttccatataaagcttagaatcgccttctaaatttccgtcacgctagcaaacaaacaaaacctgcagggatttcattgagatctaatgtaattggcatctttacaatattcagccttccaatccataaccatggtatttttctcttcataagttagtcaaattgttaatagaagcaatgtcaaatctagaaattattttattataaactctaatttttgttttcttttgaaggccactcaatgacaaaaatagtaacagtgggaattcagctttgaacaatgccacacctaacacaccaagacagaatacatctactcctgtgagaaagccaggacctctgccttctagcctggatgacttaaaggtgacaattgcaactggagcttattcacccctaagtaccacaaacatgtaaatgatttgccagcgttgtctagcagacattaagtagttttcagtagacattcaactttaccaacaatatgataatctttataaaaggtattttctttttacttccactaagttttcttgtaaaacaaccaataactgtcatttactgagtgtgtaccttgtgcaggcacctaccagttctgctggattccagaggctgtgatttttttcttccctgctcaatgccaagtttgggaaaagcaggaaaatgtaacagttaagaatatgagctctagggccagcctttttaggtttctaccacagctcagccttctattatctgtggtaccttcagtgagtgcttcagcctctctcttctttgcctcccgatctgtaaaatgggaagaataatgatacggacacctcatggggtcgtgtgaagatgagtggaaagagtagagcatttccaaaagtgtcttgcacaaggcaactactcaataaatgcagctgtatcatcatcataattcctggtagtatctctctgctttgacgtaaaagcggaattaccctctaaaaacccttaccgtatcactggctcctcaagtgcttctagtctgtagttatctgtttctgtgtgcttaaatataaaaccagttctactttcaggtgtgccgtaacgcagagttgtctgacagacataggcacctttcccatcacaaaagcgtactgtagatttgccagaaagctctaatactaagatatctgctttgtttgtacctccaggtatcagaactgaagacagaactgaagttaaggggtctgccagtgtcaggcaccaaaccggacctcattgagcgcctaaaaccctaccaggaagtgaacagcagcggccttgctgctgggggcatcgtggcagtgtcatcatcagccattgtcaccagtaacccagaagtcactgtggccttgccggttacaacactacacaacactgtgactagctcagtctctactctcaaggcagaattgccacctacaggaaccagcaacgcaacccgtgtggaaaatgttcattcccctctgcccatttcaccatctccctccgaacagtccagtctcagtactgatgacacaaacatggcagacactttcaccgagattatgaccatgatgtcgccttcacagttcttgagttcatctcctttgagaatgacaaataatgaagacagtctgagtcccaccagcagcactctgtcaaacctggaactggatgcagccgaaaaggatcgcaagcttcaggagaaagagaagcaaatcg

SEQ ID NO: 15343 - DNA, 2300 bp, Homo sapien
tgcattccagcctgggtgacagagcaagaccctgtctctttatttaaaaaaaaaacaaggctgggtgcggtggctcatgcctgtaatcccagtactttgggaggccaaggcgggtggatcaccttaggtcaggagttgtttctttttttttttttttttttttttttttttttgagacggagtctcgctctgtcgcccaggctggagtgcagtggcgcaatcttggctcactgcaagctccacctcctgagttcacaccattctcctgcctcagcctcctgagtagctgggactacaggcgcccgccaccacgcccagctaattttttgtatttttagtagagacagggtttcgccgtgttagccaggatggtctcgatctcctaacctcatgatctgcccaccttggcctcccaaagtgctgggattacaccagcctggccaacatggtgaaaccccgtctctactaaaaatatgaaattagctgggcgtggtgatggccacccagctacttgggaggctgaggcaggagaatcgcttgaacccgggaggcagaggttgcagtgagccgagatcatgccattgcactccagcctggccaacaagagcaaaactccatctcaaaataaataaataaataactaaaaaacgagcaagcaaaaaaacccaaagcatgtttatagcttgaacacttgctgggatggaaacacagggtagaaaatggctatctggggcgggcatggtggctcgcgcctgcaatctcagcactttggaaggctgaggcaggcaaattgcttaagaccaggagtctgagaccagcctgggcaacatggcaggaccctatctctacaaaaaattaaaaattagctggacatggtggtgcgtacctgtagcctcagctacctgggaggctgaggcgggaggatcacttgagcccaggaggtcaaggctgcagtgagccattattgtaccactgtactgcagcccgggcaacagagtgagactctgtctcaaaaagtaaaaaaaaaaaacgtaaggcagcatggctcatgcttgtaatcccagcactttgggaggccaaggagggtggatcacctgaagtcagcagttcgagatcagcctggtcaacatggtgaaatcccgctatctccattaaaaatacaaaaaattagctgagcatggtggcgggtgcctgtagtcccagctacttgggaggctgaggcaggagaatcgcttgaacccacgaggcggagtttgcagtgagcagagattgcactattgcactccaggctggcaacaagagtgaaactctgtctcaaaaaaaaagaagaaaagaaaagaaaacaactgtttccacttaaagacctgctaccagacttaccagctgagtctacaggcagatgccaccacacatgactaatttttaaaattttttgtagagatgggatctcacgatgttggccaggcttatctcaaactcctcgcctcaagccatgctcccgcctcagctgcccagaatgttgggatgacaggcacgcaccactgcacctggcctgaacatactttacaatttaaaataacactttctgggggtggctttgaactatgtgctttacctgcagatttaaagatttcctggaggaaagacagggactggaagcacccaggtactcccgcccctgacccccttgcctccaaggacaacagctcccaccaaaaacggccagttgcacccagcaagctgggagcgtgggtagcagagagggagtcccaggcagccgagccggtagtgcccagcccagcctaccacagctcctggccctctgagcatcaaatgtcacaaggggctccagtgccagggaacagcagcaggggctccagggcaaagaggatgactctcagtcaccaacttcagaagcagtgccacctcactcaaccccatgtgactcagcctcagtttcttccataccgtggggctggccaggcctgccacccaggcagctgtgagaactgatcagtgcccacatgtcccggtcacccctgactttccttcccttccctgaagcaccatctcttcacagagaagtaaaaaggtagccacggccgggcgcggtggctcacgcctgtaatcccagcactttgggaggccgaggcgggcggatcacgaggtcaggagatcgagaccatcccggctaaaacggtgaaaccccgtctctactaaaactacaaaaaatagccgggcgtagtggcgggcgcctgtagtcccagctacttgggaggctgaggcaggagaatggcgtg

SEQ ID NO: 15344 - DNA, 2300 bp, Homo sapien
cctgggcatcctgtgtttttatttgtgaaatctggcaactctagctctaagcttcgtcctgattggccagccctgggctgaatgacaggcctgggccactatgtgggggagctgggactggtctaagccatcaggttaatcctgagggagggggtggggtaatgggtgtcaactcctcctcccaaccactggactgaagggctgagggttgccggggagaccaccctggtcccccaccgttgggaaggcaccagctattgtgtgtccttctcctggccaccctggaagactttgactggaacacaaagtccataggcccaggcaacaaccgactctcagtctctcctcgtccctatttaaccaggagtctcacccattttgcagatggagggactgaggcagggaacctggggaaaaaaggtggccagccactgaacagctcattacggagcagcacctatttggcatctctctctctctctctctttttttcttttttggagttggagtctcactctgtgacctggaaatgggtacatggtttcttttttcgtttttttgagacagagtctccctctgttgcccaggctggagtgcagtggtacaatcttggcttactgcaaactccacctctcagcttcaagtgattctcctgcctcagcctcctgggtagctgggattacaggtgcgcgccaatacaaatacaaaaaatgcccggctaattttttttatttttagtagagacggggtttcaccatgttggccaggctggtctcgaactcctgacttcaggtgaactgcccgcctcggccttccaaagtgctaggattacaggcgtgagccactgcgcccggcctatttggcatctcttaatctgtttatgcctgagatttttacagggctggaacactgctgtcacacccaccaaccaagagatatggtcgcccgtcacttctgtcttggttgtgaagcattgttgctctttatatggggcccaagatgtgccggcagctaaatcccattagggagggtcactcctggtcgcacagaggcccaggctgcggaaatgactggcccaggtgacttggtgacttagcaggcaggctgagctctaacctagggctactggcttctgatcccagaggggctctttctaaccacaccagcccagctgaacttgacttccgaggtctcttcccagggaagatatggggactttcagctttgtaaccccacccctggtacttactacactcaagctcgagggaatgcaccagaacctgcccctccgccccccaactttttcaaaagacagggtcttgctgtgttgcccaggctgatcttgaactcctgggctcaagcagtcctcccacttcagtctcccgagtagctggaactacaggcatgcgccactacgcccagcatggccctcttttgtgaaagcctggaagggggccctcctgggtctgcgggttagggagtgacaccctgagaccccccccttctcagaagctggacaggatgaggcactagtactcctggccaaatgcatgatgattttaggtgggacacaggtgagccaggttttatttttgtggttatttactttctgtaaagccttagggggaaaaaagtataagtagcccatcaaacttggcttcaccaggtcgtggtagagtactttcatttccaatgaataatgaatgtctgtttgtgaggccctcttataagatttgtaaggcagctattaggtaagtgaatgtgaagataaaatgcgtggagatggcaaatcctcagggatctgggagcctgggatgaaatttggcaaatgtggcctccgtggaagccgctggaagccagagcccacagtttcctccaccctgagcttcctggttacagccgcaggcaagctctgctgatgggcttggaaagagtgactcccagctggcctgcgtcggaggtcagagtgaccgggagcaggcgccgtgcctgctgcttggcgcgccacgcccagcctggtcagcagctcccatggccctcggtggcccatccctgtggcctgcacatggctcagggctctcctccccagaccaggagttcccaggctctggctcactccctctgccgacatctgaggaaccccccaaagccgggtctgcaacacccctcctgagtcctcccccactgccctgccacagcttcttggtgggactctagggggcgagggggtgcaactggacacccatttcacagatgccccccccagccaactggtacatctaatgcagcacaaagctcag

SEQ ID NO: 15345 - DNA, 2300 bp, Homo sapien
atacttgtttcccctacccgaaggactcttcccctagctcctttcgtatccgacttattctcatcctttgggttttccctgactttcctgattttcttgtcagaagtagttcccttcactacagagcaggatgcatcagcttgtcactgttcattccccagtgcctaatataatgctttggcacagcataagtgccagataaatatttcttgaaagaagactgaatgaatggatgaatgataaacacatttcaaaatcatttgcctttctgttcattttttgagatgtagttaaatatggtaaatctttcctgagtaatttagactctttggtttgttaaacaaattttatgttagacagttacttctgctaatgcattctttttaaaatcgtgtttaggaattccatatttaaatcaggaagaagaaagacagttaagagagcagtatgatgaaaaacgttcacaggcgaatggtgcaggagctctgtcctatgtatctcctaacacttcaaaatgtcctgtcacgattcctgaggatcaaaagaagtttattgaccaagtggtgtaagttcctaaattaaaactaagcgtgcattgtgtgctatatattggggatgacaggcatctatatctcaaacctgtgctttacaaacatagtacacacacgggtgtgatgttgtgaatggcaggatataattgtggcatattaaaaaaaaaatttttttttttttttttttgagacagtcttgctcttttgcccaggctggagtgcattggtgcaatcctggcttactgcaacctctgcctcctaggttcaagcaattcttgtgcctcagcctccagagtagctgggattataggcgtgcaccaccacacccgcctaatttttatatttttagtagagacgaggttttgccatgttggccacgctggtctcgaactcctggcctcaagtgatctgcccgcctcagcctctcaaagtgttgagattacaggcatgagccagcatgcctagccggcatattcaaattagtgtaacagcaacaaattgtaaatagagttccatgtattgtacttggacttgctacatgtcactaggcaagagatttcagtacgtggtcagacctgcgtggattttttattttattttattttttttaatagagacggatctcactatgtttcccaggctggtgtcaaactcctgagctcaagggatcttcctgcctcagcctcccagagcgctgggattacaggcgtgagccattgtccagccccttttcttgttttttaaatgctaatcagctgacttctaaaacttgcatggactgaatacctgacagccactgtccaatgtccttgaaggcagaggagtggatcaggcttatccagcctgtagcatgtccatgttctctttgcttgcagtaaaggtgccgacaagcagatgtgattttggacaagtgtctggtcttgctcagcttagttgttggtgtaaccattttactgggaaagtcaaaaattaaatcacttgtattgacgagtccttgagaagttgtcactaataaatagcagcagtaaccctcttccccccaaaatacgccaaataaagcttttttattttatgttatttattttttgagacagggtctcgttctgttgccaaggctggagtgcagtgatgcgatcacagctcactgcagcctcaacttcctgggctcaggtgatcctcccacctccgcttctggagtagctgggaccacagttacactgcaccactcccagctaatttttaagatttattttttgtagtgaggggctctcagtatattgcccaggctggtcgcgaactcctgggctcaagtgatccacccaacgtcgacctcccaaagtgctgggattctatgcctaggtcaaaataaagcatttttaaaaaagtctttgaactaaaatttctagggtaatttggtagaattacattgtcacatgttcttatagttagactgtttttggttgtgattattttcttggttgatgacttcattccttaaaggtactgatggttatggtctattcttattcctcagagagaaaatagaggatttattacaaagtgaagaaaacaagaacttggatttagagccatgtaccgggttagttgtcctgaacatttctgcatgtcctttttttggaaaggtagatggtttgtggcatttgatgcatctagtcttttaaaaacagctttataaagggtctttttattattgctatgttctcaagaattaaacactaactttagcgt

SEQ ID NO: 15346 - DNA, 2300 bp, Homo sapien
acttatgctgattatttggttttgttttgttgttgttgtttgtttttgagacagagtctcactctcacccgccaggctggcgtacagtggcacgatcttggctcactgcaacctccgcctcccgggttcaagcgattatcccacctcagcctcgtgaatagttgggactacgggcgtgcacaaccacgcctggctcattttaaaatttcattttatttttatggagacagggtctcgctcttttccccaggctggtctggaactcctgggttcaggcgattctcctgcctcagcccccgaaaacgctgggattacaggtgtgagtcatggcgccaggcccccattaaacagttatttatacagatttattaatacgctgcttcccagttcacattcattagcaccactgagcctcaatacaatcccaggaaattgaggtttaggaaggtttaatgcattccagaactaataagtggctgagatagattttgaaaataggtcttctaatcaactttccttttgttcgtttgtttgttttggagacggagtctcgctctgtcgcccaggttggagtgcagtggcacaatcttggctcactgcaacctccgcctcccgggttcaagcagttctcctgcctcagcctcccgagtagctgggactacaggggtgcgccaccacgccaggctaattctttgtattttagtagagatggggtttcaccgtgttgcccaggctggtctcgagctcctggcctcaagcaatccgcctgcctcggcctcccaaagtgccaggatcacaggcgtgagccatcgcatccggcactaaccaacttttcatagttggcttttgtgaaagaccaacctgaatgtattcattcaacccatgcttattgagtgtctactacgtgtcagcccagtgctaggcattggagaacagcaaccccaaaccaacatacaattccattagggccgggcctcatatgttgcactcgacatagtattcccagaggctaatgcagtagctaagggtctcagctttgctttccgtgatcacctaagtaacaacccctattattcttttaatttaatttaattttttttttgaaaacaagtctcgttctgtcacccaggctggagtgcagtggcgtgatctcggttcacagcaacctccgcctcccaggttcaagagattctcctgcctcagcttcccgaatagctgggattacaggcgcgcaccactgcacccggctaattttttgtatttttaatagagacagggtttcaccatgttggccaggctgctcttgaacttctgacctcaggtaatccgcccgcttctgcctcccaaatcgctaggattacaggcatgagtcaccaagcccagccaatttttatatttttagtagagacagggtttcactatgttggccaggctggtctcgaactcctgatctcgtgatccgcccgcctcggccttccaaagtgctgggattacaggcataagccaccgggtccggcctaattttatttttttaagagacaggtctcactatgctgtccaggctggtctcgaactcttcagttcaacggatcctcccgcctcgggttcccaaagtgttaggcttacaggcgtgagccaccgcacccggatcccattattctctattacatcgccccgctctttttcttaatagcgattttcatgtgttaccaaatggcaagtttcactcctgcctgaatttccccttaccccaagtttaagctacaatggggcagggagcacgtcttcctgttcatcactgtatctccacccctgtaagagtggctagcatatcacagaaacccagtcagtatttcctggtcgactggatgtcgagacatgcacattttttctactgaagtgaaagcccgcacaaattaggccacgccttggggacttcgatagccacgcccctcccctgtccctataaggagggaaaggagcccagccttggccccgcccccgccgccgcgcaggcgctgacgcaagcgcagcaggcgcgcgctgtttccggaagtcgcggccggcgtcaccgctgcggctgcctcagctactgccgcagtcgccgcggaattcggcgagtagaaccgctgaggcgggcgcgggcccgggtggggccaaggttccggccactctgcagaatggagataatcaggagcagtgcgtgtccgccgtacacctccccgcctccccacacccggctgcccctggcctgctaggccgagaccatggccggcgtgtttggctgggcctggggctga

SEQ ID NO: 15347 - DNA, 2300 bp, Homo sapien
aggccgaggcgggcggatcacgagatcaggagttcgagaccagcctggccaacatagtgaaaccctgtctctactaaaaatataaaaattggctgggcttggtgactcatgcctgtaatcctagcgatttgggaggcagaagcgggcggattacctgaggtcagaagttcaagagcagcctggccaacatggtgaaaccctgtctctattaaaaatacaaaaaattagccgggtgcagtggtgcgcgcctgtaatcccagctattcgggaagctgaggcaggagaatctcttgaacctgggaggcggaggttgctgtgaaccgagatcacgccactgcactccagcctgggtgacagaacgagacttgttttcaaaaaaaaaattaaattaaattaaaagaataataggggttgttacttaggtgatcacggaaagcaaagctgagacccttagctactgcattagcctctgggaatactatgtcgagtgcaacatatgaggcccggccctaatggaattgtatgttggtttggggttgctgttctccaatgcctagcactgggctgacacgtagtagacactcaataagcatgggttgaatgaatacattcaggttggtctttcacaaaagccaactatgaaaagttggttagtgccggatgcgatggctcacgcctgtgatcctggcactttgggaggccgaggcaggcggattgcttgaggccaggagctcgagaccagcctgggcaacacggtgaaaccccatctctactaaaatacaaagaattagcctggcgtggtggcgcacccctgtagtcccagctactcgggaggctgaggcaggagaactgcttgaacccgggaggcggaggttgcagtgagccaagattgtgccactgcactccaacctgggcgacagagcgagactccgtctccaaaacaaacaaacgaacaaaaggaaagttgattagaagacctattttcaaaatctatctcagccacttattagttctggaatgcattaaaccttcctaaacctcaatttcctgggattgtattgaggctcagtggtgctaatgaatgtgaactgggaagcagcgtattaataaatctgtataaataactgtttaatgggggcctggcgccatgactcacacctgtaatcccagcgttttcgggggctgaggcaggagaatcgcctgaacccaggagttccagaccagcctggggaaaagagcgagaccctgtctccataaaaataaaatgaaattttaaaatgagccaggcgtggttgtgcacgcccgtagtcccaactattcacgaggctgaggtgggataatcgcttgaacccgggaggcggaggttgcagtgagccaagatcgtgccactgtacgccagcctggcgggtgagagtgagactctgtctcaaaaacaaacaacaacaacaaaacaaaaccaaataatcagcataagttctagacgctgtgacctagacgctgggaaggggcgaaacgtggtgataagaaaaccatttcaagctgtacgaggtggctcacgcctgtaatcgcagcactttgtaaggctgaggcaggaggatcccttgacgccatatgttcaagatcagcctggaaaacgcagcgagaccccatctctacgaaaaaaaaaatattttaatagaaataaaagtcatttaattccgattcttaacaccgtaaattgaacgtatagtcctgtgattttctacataaaatgtgaaggcaaaaaataactgtagagagtacggtgcggccttgtaatattttaatttctaggcaaagcttgtatcctccggatacaagaacagccgcccaggaggagcggaaactgacacacacccgtcaccccttgggctgtgactgccgagcccgggtactcggtctctgggtgaagaggaaggggcgggaccggcggtattacgcatgcgcccacttcctccggctgggagtggccgctctaggcagcggggaggtcgcggggttgaggggggttgtgaaaggagagcggcctctcctctatggtcacggggccggggcacgcttcccccactctgtcttgttacttccggtagcgaagcctctccctcttcctctgctcccgcggggtctgtgctgagaataatggcccggttggcccgggacgagtggaatggtaagccgcgacacggctggggggtgctgagggggcgactcgggcttgatatcggggagtgatgtggaagacggagcgggaatcccttctgcggagcctccccagccgggtc

SEQ ID NO: 15348 - DNA, 2300 bp, Homo sapien
ataacccattaggtatcagtgctatgcacgtaaactggagaaacaactgatattcagagcacgcaagtccgatgttaaccatggactcatggagaatcaagatggtcaccttgtccttcctgactccttaaagtgtttgttattaaaggttctgcagttgggcgtggtagctcacacctgtaatcccagcactttgggaggccgaggtgggcaaatcacctgaggtcgggagttcaatatcagcctcaccaacatggagaaaccccatctctactaaaaatacaaaaaattatccgggcgtggtggctcatgcctgtaatcccagctactcaggaggctgaggcagaagagtcgcttgaacccaggaggcggaggttgcggtgagccgagatagcgccattgcactccaacctgggcaacaagaatgaaactctgtctaaaaatgaaaaataaaagactctgcattccatgactcatcatggaaaagataaaatgatctaaattaaatatgtattggtgtgctgaattataaattgctaaaatagttcataaccaatgtttcgtttgtcaaattcatgttcctgggaagacaatcaaagcttcaggtgcatttggctacctcatgggccatttgaacatttcagttgtcaattatcattttcaatgcatgttttctggttgctttcccatgcaagagggctgatattacaacagtagatcattatggtacagtgtattttcaccaggtactgaaagctttttatggctcactgactggggacaatcaattccttcacaatctagaaccaaagattggatcttctgagaacatcagagaaagaatgtccttgccatccacaatacagcaaaacttcaggaccttgaactttgggttcataatctcacaagagggaagtttttcgccagaaaaagatggcatccttgatgtgaacagcttttcccaagatcacagatcaagacttctagtttttttttttgagacagagtcatttttttttttttttttgagacatagtctcggtcttgttgctcaggttggagtggaatagcgcgatcttggctcactgcaacctccgcctcctgggttcaagtaattctcctgactcagcctccagagtagctgggattacaggcgcccaccaccatgcccggctaatttttttgtatttttagtggagacagggtttcaccatgttggccaggctggtctcgaactcctgacctcaggtgatccgcctacctcggcctcccaaagcgctgggattacaggcatcagtcaccgtgcccggccttgtgatagtgtcttactctggcacccaggctggagtgcagtggtgcaatcttggttcactgcaaccttcgcctcccagattcaagcgattcttgtacatcagcctcccgagccgctgagactacaggcacgtgccaccatgcctggttaattttgtgtgtgtgtgtgtgtgtatgtttgtgtgtgatggagttttgctcttgttgcccaggctggagtgcagtggtgcgatcttcgctcactgcaacgtctgcctcccgggttcaagcgattctcctgcctcgggctcctgagtagttgggattataggcgctcaacaccatacccggggaattttttgtatttttagtagagacggggtttcatcatgttggccaggttggtctccaactcctgacctcaggtgatccacccgcctcggtgtcccaaagtgctgggattacaggcgtgagccctgtgcccagcctcagtgtctctctctctctcgactagagagactgaccagggacaatcaactctctccagactgacagagagagagacagagagagcgagaaagagacagagtctggctctcacccaggctggagtgcagtggtgtgatcttggctcactgcaacctctgccttccgtgttcaagcgattcctgtgcctcagcctcccaagtagctgggattataggtccacaccaccacgcccggctaatttttgtgtttttagtagagacagcctcaccatgttggccaggctggttttgaactcctgacctcaggtgatccgccagcctcggccttccaaagtgctgggattacaggcgtgagtcaccgcgcccggccaaataaaataaaatgttaaagcaaattcaggactacccctcctccaagtcttctgttccctttgggcgcccaggtgagcgggggaggggctgggggagtaataacatcaaaagagcgccttttcctcccttattccgaggagacttccctgg

SEQ ID NO: 15349 - DNA, 2300 bp, Homo sapien
tttagtgggccgagatcacgccattgcactccagactgggcgacagagcgagactctgtcaaaaaaaaaaaaaaattatcctgcaaaatttgaaaaggaaattcaaatcaacagcttctaaactactttttaacatgactcataataagaaatacattctacagtacatatatatgttctataattttgaataaaagaattaaccacatcatatttattttacaacatgtaatacatattttttattctccttcatttgttttgaatgctctgtgcagtctacaaaaagtccagtagtaataattaaattattcattaagttgaacattatcttgtcttttaaaatgataatctcaaaaatgatcttttatttttgagatttatatagatacacacacacacacagacagacacacacacacacacatatatatatatatatatattttttttttttttttgagacagagtttcactctgtcccccaggctggagtgcaatggcacaatcttggctcactgcaacctccgtctcccgggttcaagcaattcctctgcctcagcctctgagtagctgggactacaggtgtgcaccaccatgcccagctaatttttgtattcttagcagagatggggtttcaccatattggccaggctcgtgtcaacccctaacctcgtgatccgcctgcctcagcctcccaaagtgctgggattacaggcgtgagccaccatgcccagccaaatctagggctggaacatggctgcagcatataaaaagaattgaattccatacttttgttaaccctgttttttgtttgtttgtagttgttgctgtttttgagacagagtctcgctctgtcacctaggctggagtgcagtggtgcaatctcggctcactgcagactctgcctcccgggttcaaactattctcctgcctcagccttccaagtaggtgggactacaggcgcccaccaccacacccagctaatttttgtattttattagagacagggtttcaccatattggccaggctggtctggaactcctgaccttgtgatccgcccgcctcagcctcccaaagtgctgggattacaggcgtgagccaccacccccagcccctgttttgcttgtttcttagggttgtttttctatttatggtaaaggcattggctttccatttgtagcatcaatagaatatttcctgtttacaataaccttatgtcatagtaaatggtaaagggatttaaagcagtggttttcagctgccagaggcctgagtgagtttgggcacactctgtgtgatcgggcagaaggcctgtgggaagtttagctgaggacagggccaggaaaggtgatggacagtgggggtctgtcctggtcaccaggcccctgggtcctgcccacctgcttggagctccccacccatcacacatgatgcggccaagccctctggctattgtgggcaaataccttaggagagaagctgatgaactttgtttcttgaaatgcacagattccttggacgtccctgagagctcagtcatgaaagtcagcttggttttctccccctcatttgggttcagaatttaaagtccacacacacgggcagtaagatgatatagataaggacatcatcactcggttttggatgttaaaatgtctaggtgggttaggggtgatttgagatcacacaacgttgtgccacaaagaggaattccccggccagagggagacattttattgccatgttatgatctcatcattgagttgaaaggcaatcttgtttcattttggattctttcttatgtttatgtcttataagggcactttgaatttccaagcaaataataattttgaattagcttttaatcattgacttctagcacagttttatgatcagaaacatgctgtgtgatttgattgctctcaaatatattgagatttgctggaacaaaataagtcaggttaatttttgtaaatgtaccatgcatgcttaaaatgaatgtatgtacatttgttcctgagatacaggttgatggacggatggctacatggatgtgatggagatggtttactatcgggaccttccgcatcctgctgatgttttgttgcttaggatatgaatggctgagcggaggctgtaaaacctggcactctgcttgggtatgaggttcttcctgccatcctgccatcatttgttttttatgttttgtcgccaaaagtgaccttgaggaaccctgggagctcaggaaggaaggagcgcccagaagcagggacagggagctggttggggaggacca

SEQ ID NO: 15350 - DNA, 2300 bp, Homo sapien
gcacggagaaaaggagaggcaggtgtcagaggcagaggaaaacgggaaattggatatgaaagaaatacacacctacatgtgagttcagaaactgaaccccaccctcttgggaaacgcccattggagtgttgtttttaacctttgtacaatgtttagacccagtaaatgcagaaatagaaacaaatggtcagaagacatatcgtgagagagagagagagttcacaaaacagaaaacaaagtaccttaatatttaccagtgaccaaaagatgtgaagtagcaaaacggctcctgaccccattgccagctagactgtgtggaaactcggttcataccagccattctaggggtggggtgagttgttgtcatccttaggaaagtgtgttgttgtaggatcaaccacatccttcaaaaggactatgcctgtttataagcccagctgtttctgccctgtgaaacacggtaaagatattaatacaaagagaatacagctttatgataaaagatgctcaatgaaggatgaattagggatatactgagaatggggaaggaagctatcatctcagaagtcagcaggcagtaagcaagaggaggaatcaatacagcaacagtttggatcagactgtacagttttttttgtttttgtttttgtttttgtttttctgagatggagtctcgctgtgtcacccaggctggagtgcaatgacgtgatcttggctcattgcaacctctgcctcccaggttcaagtgattcccctgcctcagcctcctgagtagctgggattacaggtgcctgccaccacccccgcctaattttttgtatttttagtagagatggggtttcaccgtattagccaggatggtctcaatctcctgacctcgtgatccatccgcctcgccctcccagagtgctgggattacaggcgtcagccaccgtgaccggctcagactgtactcttacagccatctgaaatacgttttctaggtagagatagattgtgtaagggtacagttgtgaggataacagaaacatggcagattatttaaaatcatcctgaaagtggtgctttatctgatgaaagtgattgtaatccatagggaaatgtttcaacgtgcgcaagcgttgcggcggcgggcagaggactactacagatgcaaagtaaggagcttcctccccgcagttgcaggatagttcagtgctgatgcagatgatgccacggcccttagactctctcaacattcaatttctcatgtgttggctttttcagatcaccccttctgcaagaaagcctctttgcaaccgggtaagtttgcttgttttccttgcttttggacatagtctgccaggtcaggacatggatacatttttctccctacggctctgtgctcaagccctgcagagggagatggcagagaggaaggctgcctacaagcatcacagtcccatccctgttggtaaccgtgttgcgcaaaaacaccttcatccccacccagtggggcccccatctaatattctaagtgtcagaggttccgtatttgtaatagcaaatgggccctgactgtaaattagtgaagagtgaatgtaacttattacccacagggacaattccaaatgaaggccttaaatgatgctcagctaagctggttcttgtgtggcctctgtaccttcaaaagctgccgagtcctatgattacacgcgatgggacttgtacacttgaagtgaaacacagttttaaaacttgctttgtttagaattcccacctcatttttccatggacaaaagtattctttaggtcctagtgcacttacaatttggtattacctgggagtgaaaagaaatattacagccatgcctaactgacttcttgaggtaagattgttctgtcagaaaaccctctcccagttcccctgcagctcttcaggaatccacatctctccagagctctttgttctcatgggtggcacctccagagtgaagaagatcctttgtcaagaagggaaacagaggggaaatgagagggtcctgcaggcagagctggaatcaacttccactctgcctcttgcaagctgtgtgaccctgggcacaatttctccttcctctggaaacctctgttttcttagatttggagcagggtggtcacactgaccttgcagagttctgagaatcagagacagaacataaaaggcctggaaaacattctccaaaaagaagctgcaacatgtgtggacaatgggcttttcatgcctctcttactgtctcttactgtctattgacctggtgcaagaaacatgctctggtgat

SEQ ID NO: 15351 - DNA, 2300 bp, Homo sapien
tagtgggccgagatcacgccattgcactccagactgggcgacagagcgagactctgtcaaaaaaaaaaaaaaattatcctgcaaaatttgaaaaggaaattcaaatcaacagcttctaaactactttttaacatgactcataataagaaatacattctacagtacatatatatgttctataattttgaataaaagaattaaccacatcatatttattttacaacatgtaatacatattttttattctccttcatttgttttgaatgctctgtgcagtctacaaaaagtccagtagtaataattaaattattcattaagttgaacattatcttgtcttttaaaatgataatctcaaaaatgatcttttatttttgagatttatatagatacacacacacacacagacagacacacacacacacacatatatatatatatatatattttttttttttttttttgagacagagtttcactctgtcccccaggctggagtgcaatggcacaatcttggctcactgcaacctccgtctcccgggttcaagcaattcctctgcctcagcctctgagtagctgggactacaggtgtgcaccaccatgcccagctaatttttgtattcttagcagagatggggtttcaccatattggccaggctcgtgtcaacccctaacctcgtgatccgcctgcctcagcctcccaaagtgctgggattacaggcgtgagccaccatgcccagccaaatctagggctggaacatggctgcagcatataaaaagaattgaattccatacttttgttaaccctgttttttgtttgtttgtagttgttgctgtttttgagacagagtctcgctctgtcacctaggctggagtgcagtggtgcaatctcggctcactgcagactctgcctcccgggttcaaactattctcctgcctcagccttccaagtaggtgggactacaggcgcccaccaccacacccagctaatttttgtattttattagagacagggtttcaccatattggccaggctggtctggaactcctgaccttgtgatccgcccgcctcagcctcccaaagtgctgggattacaggcgtgagccaccacccccagcccctgttttgcttgtttcttagggttgtttttctatttatggtaaaggcattggctttccatttgtagcatcaatagaatatttcctgtttacaataaccttatgtcatagtaaatggtaaagggatttaaagcagtggttttcagctgccagaggcctgagtgagtttgggcacactctgtgtgatcgggcagaaggcctgtgggaagtttagctgaggacagggccaggaaaggtgatggacagtgggggtctgtcctggtcaccaggcccctgggtcctgcccacctgcttggagctccccacccatcacacatgatgcggccaagccctctggctattgtgggcaaataccttaggagagaagctgatgaactttgtttcttgaaatgcacagattccttggacgtccctgagagctcagtcatgaaagtcagcttggttttctccccctcatttgggttcagaatttaaagtccacacacacgggcagtaagatgatatagataaggacatcatcactcggttttggatgttaaaatgtctaggtgggttaggggtgatttgagatcacacaacgttgtgccacaaagaggaattccccggccagagggagacattttattgccatgttatgatctcatcattgagttgaaaggcaatcttgtttcattttggattctttcttatgtttatgtcttataagggcactttgaatttccaagcaaataataattttgaattagcttttaatcattgacttctagcacagttttatgatcagaaacatgctgtgtgatttgattgctctcaaatatattgagatttgctggaacaaaataagtcaggttaatttttgtaaatgtaccatgcatgcttaaaatgaatgtatgtacatttgttcctgagatacaggttgatggacggatggctacatggatgtgatggagatggtttactatcgggaccttccgcatcctgctgatgttttgttgcttaggatatgaatggctgagcggaggctgtaaaacctggcactctgcttgggtatgaggttcttcctgccatcctgccatcatttgttttttatgttttgtcgccaaaagtgaccttgaggaaccctgggagctcaggaaggaaggagcgcccagaagcagggacagggagctggttggggaggacca

SEQ ID NO: 15352 - DNA, 2300 bp, Homo sapien
gcacggagaaaaggagaggcaggtgtcagaggcagaggaaaacgggaaattggatatgaaagaaatacacacctacatgtgagttcagaaactgaaccccaccctcttgggaaacgcccattggagtgttgtttttaacctttgtacaatgtttagacccagtaaatgcagaaatagaaacaaatggtcagaagacatatcgtgagagagagagagagttcacaaaacagaaaacaaagtaccttaatatttaccagtgaccaaaagatgtgaagtagcaaaacggctcctgaccccattgccagctagactgtgtggaaactcggttcataccagccattctaggggtggggtgagttgttgtcatccttaggaaagtgtgttgttgtaggatcaaccacatccttcaaaaggactatgcctgtttataagcccagctgtttctgccctgtgaaacacggtaaagatattaatacaaagagaatacagctttatgataaaagatgctcaatgaaggatgaattagggatatactgagaatggggaaggaagctatcatctcagaagtcagcaggcagtaagcaagaggaggaatcaatacagcaacagtttggatcagactgtacagttttttttgtttttgtttttgtttttgtttttctgagatggagtctcgctgtgtcacccaggctggagtgcaatgacgtgatcttggctcattgcaacctctgcctcccaggttcaagtgattcccctgcctcagcctcctgagtagctgggattacaggtgcctgccaccacccccgcctaattttttgtatttttagtagagacggggtttcaccgtattagccaggatggtctcaatctcctgacctcgtgatccatccgcctcgccctcccagagtgctgggattacaggcgtcagccaccgtgaccggctcagactgtactcttacagccatctgaaatacgttttctaggtagagatagattgtgtaagggtacagttgtgaggataacagaaacatggcagattatttaaaatcatcctgaaagtggtgctttatctgatgaaagtgattgtaatccatagggaaatgtttcaacgtgcgcaagcgttgcggcggcgggcagaggactactacagatgcaaagtaaggagcttcctccccgcagttgcaggatagttcagtgctgatgcagatgatgccacggcccttagactctctcaacattcaatttctcatgtgttggctttttcagatcaccccttctgcaagaaagcctctttgcaaccgggtaagtttgcttgttttccttgcttttggacatagtctgccaggtcaggacatggatacatttttctccctacggctctgtgctcaagccctgcagagggagatggcagagaggaaggctgcctacaagcatcacagtcccatccctgttggtaaccgtgttgcgcaaaaacaccttcatccccacccagtggggcccccatctaatattctaagtgtcagaggttccgtatttgtaatagcaaatgggccctgactgtaaattagtgaagagtgaatgtaacttattacccacagggacaattccaaatgaaggccttaaatgatgctcagctaagctggttcttgtgtggcctctgtaccttcaaaagctgccgagtcctatgattacacgcgatgggacttgtacacttgaagtgaaacacagttttaaaacttgctttgtttagaattcccacctcatttttccatggacaaaagtattctttaggtcctagtgcacttacaatttggtattacctgggagtgaaaagaaatattacagccatgcctaactgacttcttgaggtaagattgttctgtcagaaaaccctctcccagttcccctgcagctcttcaggaatccacatctctccagagctctttgttctcatgggtggcacctccagagtgaagaagatcctttgtcaagaagggaaacagaggggaaatgagagggtcctgcaggcagagctggaatcaacttccactctgcctcttgcaagctgtgtgaccctgggcacaatttctccttcctctggaaacctctgttttcttagatttggagcagggtggtcacactgaccttgcagagttctgagaatcagagacagaacataaaaggcctggaaaacattctccaaaaagaagctgcaacatgtgtggacaatgggcttttcatgcctctcttactgtctcttactgtctattgacctggtgcaagaaacatgctctggtgat

SEQ ID NO: 15353 - DNA, 2300 bp, Homo sapien
gcacagggtgtacccccactgtgatattaggagtcatatctttctgggaggtcacagcgtgtacacgcatggtgtaaattcactgggatattaggagtaatatcgccctagaatatttcgaatcatatcacagggtgtacacccactgtgatattaaaaggaatatctttctagaacattacaaatagtatcacaaggtgtacacccactatgagattaggagtaacatctccctagaatattatgaataatatcacagtgtgtacaggcactgtgattttaggagtactaccttcttaagatattatgaataatatcatagggtatacacccactgtgaaattaaaagcaatagctccctacgatattacgaataatatcacgcagtgtacactctaggtgatattaggagtagtatctccctaggaaattacgaatattatcacagagtgtacacccactgtgatattaaaagtattatctttctaggatattatgaataatattacagggtgtactccctctgtgatattaggagttatatctccctaggatattacaaatcatatcacagggtgtacacccactgtggtattaggtgtagtatctccctaggatataacaaataatatcacagggtatacacctacggttatatcaggagttatatcttcatagaatattacgaataatatcacagggtgtacaccctctgtgatattaaaagtaatatctttctaggatagtatgaataatatcacagggtgtactctcactgtgatattagcggtaataactccctaggatatcacgaattctatgacagagtgtacacccaccatgagatttggagtaatatatctctagcatattatgaataatatcacaggttgtacacctactgtgatattaggagtaaaatctccctcggatattacaaataatatcacagtgtgtactcccactgtgatattaggagtaaaatctccttcggatattacgaataatatcacaggatgtacacccactgtgatattagaagtaatatctcccttggatatttctaataataccacagcgtttacacacatggtgttcacccactgggatgttaggataatatctcccttggatattaccaatcgtatcagaggctgtacacacgtggtgttcacccagcgtgatattaggaataatatctccctcggatattaggaacagtctctccctgggacttagcagaacgtagccccccagtgttaaataagcgaccacagcaagaggtagaggcgcagggactgaaatgacgacaaatatctgacaagtttaaaacacgtatttaaaatagaatttataaaatgcttaatctgccgactcaggagcccgcggtgcagggtggggtgggagttgccaggtgaccgctacaccagcagagtaagactgcagggctgcggccctccctcctatgcccttctgttcagacacccgaggggcccatgtgcactcctgggatcatacgaccagaaaacaggaccctagaggtttcttgagtttctgcttaccagggcggctgggtatagccctgccagcccattgcataatcttctaagttctccccaccaccctccattccagcagcgaggtgcctgtgacgcggtctccatcctctcggcctcgacccggtggtccccgggattggacgcttaggcggtcaccaggcctccttgttactaacgtgtgcacacctttcagttctctcatcaggatgaactcctggaaattgctgggtccaaagtgtttgggaagtttggagtgattcttgttgcagggggaagagggaactctggaggtgtcactgaactttcaggggttccgggaccccccaacccggtgcccgtcccagctccccgagcgcctctcttcccccatcccccacctcgcctgttttcacctcccgtggcctcactcccgccgcgcagctggaccttgcccggggcctcccgatcctggagctcgaatcccagccggaccagcccagcccgaccagcccagccccgcctcttctccggcaggatcgcggccgagcagtctgcccagagacttagcgacagacagacgctgggacccacgacgacagaaggcgccgatggccgcgcctgctgagccctgcgcggggcagggggtgagtgccccccatcgcgccccactctccttttccaggcttggtttggctgcagatctctcgggctgcgatactggggagaggagagacccccaaattcctggacccgggaagcgag

SEQ ID NO: 15354 - DNA, 2300 bp, Homo sapien
aaaacttggggatcccacttcctgctttttttttttttttgagatggagtctcactctgtcgcccaggctggagtgcagtggcaagacctcagctcactgcaacctgtggctccctggttcaagtgattctcctgcctcagcctcctgagtagctgggattagaggcatgcgccaccacacctagctaatttttgtatttttagtagagacagggttttgccatgttggccaatttggtctcgaactcctgacctcaaatgatctgcccacctcggactcccaacatgttcatattacagtagtaagccacggcttctggccccaattcctgctctctagctccgggaaaacctatggctgcatgcagagtcttagacaacttccttttcctctctgggcctcagtttcccattctgtaagatgagaggtttccataggcctacactttctaattggtggctttcaatcctctggtgatttgcataaaaggcatctatttcaattgtggttataaataacaaaccccaataagtagacgaattatttaaatggtttctcattatcactgaatagttgagagtctactgtatttgagtgaaaatgcagcacgagaaactgaaatcagatgcactcatgattatgaccctgaggtcaatgtgtcattcccttcattccctccttgcccccatgaaagtttgactactgtatggtttgaacctgtgcttcttagttgtttattgcttaagttttagccacaatggcaaattgcagcgggaaattcagtcttactttgtcatttggaaacaaaatacaaaacctatcaaaataaagcactagctttttttttttgagacaaaatggaagaaatcctaatattaggtaagaaaagcaattttttggtgtttttttaattttatttatttatttttttgagacagagtcttgctctgtcgcccaggctggagtgcagtggtgcgatctcggctaaccgcaagctccgcctcccaggttcacgccattctcctgcctcagcctcccgagtagctggtactacaggcgcccgccaccacgcccggctaagtgtttatatttttagtagagacggggtttcactgtgttagccaggatggtctcgatctcgtggcctcatgatctgccagccttggcctcccaaagtgctgggattacaggcgtgagccactgtgcccggcctctttggtgtgtattttgatgtggtgactggtagttaaattcagtgtacatatgaattcactcttgggacaaaatatgctggatttgagcttgtttttaggcaaatcatgtttcatcttgcagagctaattcaaagtatactgactgcatgcacttcttgcttaggggaagaaaactcatcaaaatttgtttctaggcatatgttattagagctaggattaaaataaatcttacatactttctttaatatgctaacattaacacgttttgcttaaaaaagtatcgatcatttatcatggaaaaatacaccagcttacacaaattcttaaagcgtttttcgtgtgtgtttttcgtgtgtgtgtgtgtgtgcgtgtgtgtgcgtgtgcgcgtgtgtgtgtagagatggggtttcgccatattgcccaggctggtctcgaactcctgggctcaagcgatccacccacctcagcctcccaaagtgctgggattacaggcgtgagccacacacccggccctaaagctttttgtgagattatatattttacctgcgaaatatatgggtcagaaagatttgagaaagttgttagataattccaccaacaaaatctcccgtcctttccagctgtgatggtgaattctaaagtagaattcatctttggagcttctccctgtaggcatgcaccttgcgttgcgcctgccagatgtcgcgcggagtcctccaggcctctagaaggcagagatggtctcgtttccttgccgagcatgcgccttagttctctcttctggggctgtgaacgtggggtcgaagcgcgcgtgcgcggcggctctggcggcggcggtggggcggggcctgggctgtcagccggcctaggaggaggaaggagcctgcggcgtgcagtgtgaggggcgggacccggctgccggcggtgggtctagctgggggaggtcgggccatgctggtgggccagggcgcggggccgctggggcccgcggtggtcaccgccgcggtggtgctgctgctgagcggcgtggggccggcgcacggctcggaggacatcgtggtgggctgcggtggcttcgtcaagtc

SEQ ID NO: 15355 - DNA, 2300 bp, Homo sapien
ctccgcctctcgggttcaagtgattctcctgccccagcctcctgagtagctgggattacaggctaatttttatattttttagtagagatgtggttttgccgtgttggctaggctggtctcgaactcctgacctcaagtgacccacccgcctcggcttcccaaagtgctgggattacaggctgagccatggtgcctagtcttcctttaaagtaaaataaaaaaattactcaatttattgtaaaaacaaactctttggcttctgtccaaatgactgtgaaaatagatttctctcaatatccaccaatattacctgtttctgtccatatatgtatttaaaccctgttgaaagaatttattgatacaaatcaatttttaagggcttcagtataacggaacctttttctaccacccttttggtttatttttccagactaagccagtatagatttgaggtttagggaaaataggcacttctttttaataagaatgtgggctaaaacagatcttatggttcaaatatttacaacttaaggaggcaaagagatttgataggaaatagacaaggtgatgtgtcctctgacaggtacacaaatcaagagaatatgacaggtccttgggaatgattgtgtcagtgttcgcttcccatccttttattctgaaagttcacagtaggggaatgtgagaaccaaaatgcatatgctaggtcagggactgggacactttctctgtggagagccagagaataactattttaggctgcgtgagccatacggtctctaggacaacagctgagatagacaatttgtaaatgaatgggcagagcgcaacacaactacatttttggacaccacagtttgcatttcatgtaatttttacatgtgaaatattatctttcttttgatttttttttttttaactttaaccacttaagagtgtaaaattctttttctcggcttgcagttcatacacaaacgggaggggggtccttgggtggtagtttgctgacccatgctggagatagtgagctcatatggctgggcagtcccttcactctgaagaaatggctgtgtttttcatgattcctagatttcacatacacaatcttccaccatttccttgtgttttccactgttttttttatttgaggcggagtggtggttccaacatttaatgtacccctaattgtcagaatccaacattcttgattatctttatgtcagaagtaactaatttttatctaaaatgattcttgaagattctttaaaatgaacagttgaaaagacaactgtgacccccagctaggatgtactattacactttaacacaccagctgcttcagaaatgaagaccagcactccaaggatgatggtcgttgtaggggggcctctcgtgtgttattcgagggatgccttgcaacaccttactccttatttagaatctcaaatctgaagcattaccttaatagggcttttcagttataagttacatttgtggctcctacctcccaaggagttcaattttagctttgcattttttaacttaattaccttttctgttccaatctccctgtttgctttcatccatgtattatatataatcacaagcaaggaagacgtctttgataatcctgacttatttgatggcctggtaatgccacagtttcttaggcagcttagagctcttgcttttaagggctagcccacattctcagtccaaggccgctccgctgtcaacgatccaattacctgaaacgtttttattatctgcagattttcttaaaattgcctctgcagtgggggattgccagatgtcacccggaacacacaaacagccccactacgggcccctgttctgtagaaagatgcccagtcttgcttctgaaggttgctttttaaaaccagaatgaaggttgctttttaaaaccagaatcatctggactgcattctgtctcttcattaagattagactattctcaggaacaagggctgggagagggctgcatcttttttggtctataagagcctttcctgttataattgagtcctcgtgctggaatgaatggtcttctctttgcaggttcagtgtctgtggtcagatatcaatcattcgcttccccgacaccgtcaagcagatgaataaatacaaagttgtcctgtcatctcaagacaaggacaagtctttggtcaccgtggagacagatgctcatggatcattttgttttaaagcaaaaccagggacttacaaagtgcaggtgcgatgcattgttttaaatttaaaatgttttgagaaaaagcagtgat

SEQ ID NO: 15356 - DNA, 2300 bp, Homo sapien
gatggagaggaaaaacatcttagaagagtaagagcacatagtatgcttggaattttgaaataagaaaccaaatttgatttattttggggtaggagaaaatgaaactgagttgggatggaaggagtcgcaaaatttcagatgtttcaacactaggggtgttcttaaaggaactctggactcttaaggttaacaggccacagattaggaaatgaggggagagaaatgctcctgtcttaatgatctcgtgcagccaaaccaggcttggaccaggcacgatacgacaagccccctttctagagagctgactcctgagtttttttgcagccgggatgtgtgtaccacgttcagctcaaggcagaaggcaacgaccacattgagcgggcgctcccccaccatagggtgattgaggtaaggcattcagtgctgccgctgcacctgggtgtgggtgcctccctgatcagaagtcctcccgtctcctctggctgtctgcctttcatctgtggcggggggaactttcatcctaattaagggtcctcttagaatagtgtcatcttcacaagcagcatcttatgtgggtttttaatgaacagcgttgctgtcatgcatccagaaaggaaattggaactgttgtatcctccccgcgacttgccctgtaagctctgatcattattctgcaagttaaggaacttaaggcctaagcagcatttcaaatcaagggacaataatagaacatgggcttaatgggtggcagggccacgcagttatcttaggttcagatgacctttttcctgctcccattttgtgggcagagtcttttgatactcaagatcatgacctagctaaattaatccctaaagaggacatccttcgagtcacagaatgtggcctgggaatcatttgaagtaaggcttttctcttactgagtaactctcattgggaagactagagggcttaggtagggtaagaggggctgcctcttagtggctttatttaggtggcttcattatgcatgaagattgtgagggaggatagaacttttgacctaggaagtggattttcttttctttttctttttttttttttttgagacggagtctcaccctgtcacgcaggatggagtgcagtgccgtgatctcggctcactgcaacctcctccttgtgggttcaagtgattttcccacctcagcctgtagctgggactacaggcacacaccatcacacccggctaatttttgtatttttagtagagacggggtttcaccatgttggccagattggtcttgaactcctgacctcaggtgatctgctcgcttcggcctcccaaagtgctgggattacaggcatgagccaccgcactgggccggaagtggatttccttgacgtctttacggtgttggcattttaaatggctgggatgactgcatctcacaccaaaatgctttgcatgttctcggtgtagtaacttaggccaggatcactagcataatgtggactgtggccgggcaggtatgaaagggaagggggccggccctctgggatctcgcaaactccatgtacagacctcacgcagagggggtgctgtgactctgcccctgctctaacaggcaagagcatccttctccttttttttttaagagaagctggaaaatctggcttcatatatgaaatttcttaatttttaacatgttggcaagtaattcaaacgtagaaaaaaaatactgtgctttcgaaatgaaatgtgtctatgggccagggacatgcccctgctctaacaggcaagagcatccttctccttttttttttaagagaagctggaaaatctggcttcatatatgaaatttcctaatttttaacatgttggcaagtaattcaaacgtagaaaaaaaatactgtgctttcgaaatgaaatgtgtctatgggccagggatagccatcttctgtcagtttgtgaccttggacgtagggtactcaatgacaaacttcgcttccttaatgtaagaagcaaagtttgccatgaagcagctctcaggccatcggacagctggcatagaagttcctccaccagctttctcattactggtattccctctttctctctctaggttgggaataatgacatcgatgatgtaaacatcatagttttccggcagattaatcaatttgatttaagtggaaatgtgatcacttcctctgaataccttcctacattatgggtaagtccagacttttaagctccaagtattgtgttccctttggctttgagacaagtacgaatgggatgtttttgggtttgtgcctgt

SEQ ID NO: 15357 - DNA, 2300 bp, Homo sapien
ttcattttaggaaaattccccttgtgtgttatgtagaaaggtgccagtgtgggcccagggaggtggtcctggcattctcttgcggcaggtgcactgtggcatcctcacagcctttgccatcagccagggctgcaccttaaccctgctcatgccccatgccgtgtgggagtgagaacaggcaagaaccccagaaataaagccagaaacaaagtactccagtgcctcctgaagcagcgtggagagccacgtacatgatggaatgcgttttgagtttaacagattggtggagttaaggtgacatcatatgatgaggcagtgcaaggcgggaaggaccctcaggagtcgtcagggggttgagtcccaggctctaccatgtgtaagttgtgtgaccttaggtgactttggctctctgggtctccatagggataataacaatacctgttttgtagtcaggattggcgataatgtagataaaatatctggcgcctgcctggcatattacagatgttcaacacgtgttagaagctatttttaatattactattatattaacttatattactattttgagcaagaacatgggtagtcagaatctgatttgaatcttaatttctgtgcatgatacataactggatggagtctcagatgacagagggatgtgtgatgtctatggagggagctttctttttcaaatatccatgtttccaaagacacccacccagaaagcggctgtcctgaggatgtctgctatgaaatattgattgtgtttcagtttcaaagcatgtctgactttgtttctccctccaggtcaagctttacaaaagcgaaaacctcgacaatccaatccagacagtttcccttggccagtccctgttcttccatttccccccactgctcagagacggcgaggtaatgcctgtggccggattctaccttctgcctttgttttaataattctgctgtttagtttaaggaagcacagttctctccttttctccctaaataccactctgcagaaatacgctctctgaatcaaaagaggttgggttctgtagggattattttttcttcattgtttttctgtttacaaaaagaatacatattcatggcaggagattttgggaaaaagaagacataagcccatcatccagaaatagccactgctaacacggtgattggtatcctttgggtcttttttcaggcacgtgtgcgcatgcatgtataaatataaatagacatttattttaataattcaaaactgacactgttttgtacattgttttgtaatccgtgcttttcaatgaagaatttatcacaaatctgttcctcatcatcaaatctttcttttttttttttttgagacggagtctcgccttgtcgcccaggctggagtgcagtggcgcaatctgggctcactgcaagctccgcctcctgggttcacaccattctcctgcctcagcctccgaagtagctgggactacaggcgtgtgccaccacacccggctaattcttttttttttttatttttagtagagacggggtttcaccatgttagccaggatggtcttgatctcctgacctcgtgatccacctgcctcggcctcccaaagtgctgagattacaggcgtgagcccccgtgcctggccaaatctttcatactatgatttttatggacagtagtccataaactaggaaacgccatgatttatttaaccaaggcctactgttgggcatgatcgactcttgcactttgaacatatcaccccatgctttcctgctaagaagtccacttttaaaaatgccttgtaatttttaaaaattcctctatttaacattctgctattgagtttaaggaaatacagtttcctcatgatgggggatcccttgaatgagatgagttgcttttctcttgctgctttgaacgttctctctgtctttgataatctgattataacgtgtgtcgtgtagaacacttgcagctccaccttttcagtgtcctttgggttccatgaatctggatgtctccctccttggaactgggaagttttcagccattattctggccgtcatttactgattataaagtgcttattatcaattctatttggacagagctaacttgtagttggtgtggggagtgcaaactttgcaaagaatttggttcttttctggtggtcttagcctgaggatgtcaagtgtgagcctagagggtgacgtttcctctcctggctccttaccacctgccgtgaagatgatctactctggcctttctctgtggaaaatggctgcaaaataatgaa

SEQ ID NO: 15358 - DNA, 2300 bp, Homo sapien
tactttatttctatgttaaatgtgttgatttttttcttattgcttctggattttagagtcataggaaggttttcttcattcccagcttttacaggaatttattgtgtttttttcaggcagacttttatagtttctgtttttacatttaaatctctctatccatttggagtttttcctggtatagatgtgaagtatggctccagattgtctttttccacatgctatccagttaccatttcatgcttttcaaacgccatcctgcatggaaggtggacaggaattacctttcatttagagatgagaagatgggaacctagaaggagatgtgagcagcccaaggtcaccagctcacgtggagcagtgctagggcttgagcagagctctgctgctgattccgggcttctgtgaagagtgattcatgctcagtgagcctgtaaatatgatcttacctgaacaagagagtttttctcatgacccacgaggaaacacttccttgttactcacagtagagacctggttagaaagtgccggagagggctaggtgtggtggctcacgcctgtaatcccagcattttaggaggctgaggtgggcagatcatttgaggtcaggagttcgagaccagcctgggcaatgtggtgaaagtgaaaccccatctctgctaacaatacaaacattagccaggcgtggtagcacgcacctgtaatcccagctactcgagaggctgtggcaggagaattgtgaacctgggatgcagagtttgtagtgagctaagatagccccagtgcactccagcctgggcgacagagcaagactgtttcaaaaaaaaaaaagaaagtgccagaaagataagcatatacaagaaccacttacctttgcttggggctgcactgtggccccagttgctgggagaggcttctgtgaaggccgttgatagctgcaggcagtgacattctcaggggcccctagcagacaactcatccgggctcagggacacacctgggagccagtggcaggaatgtggagacactgcttggtggtggccaagcagcccagcctcgtagctgctgcctgtcacttctgagaatgtaagaaactgtgccctggtgtgtgatgttccccttcctgtatacctatgtaactaacctgcacattgtgcacatatatcctaaaacttaaagtataattaaaaaaaaaaaaaaaaaaagctatgcctgctggggcttggattcccgagcagggccaagtgttgaatgaagagagcgcccactctgtgccaccccgtacagggccctcacaggttgatcctcacaacaagccttcgagcaggtgtgccattcctcccattttcacagaagcccagaaagattgagtcacttactgagtgttagcagaaccaggactcaagtgaggcggtttgtctcaagccacatggtttccacctcgttctgccctccgcgtgatgagtggctcagctttgcacgttcacgggggctttgtaagcacattggtttccttctttgttgatgtgactgcccacagcctcgcgactggattttactcagtattccatgccctgctgagcatttcacatactcctttcatcaagtttcacagcatccacccccagtgggtgttgttcatatgatctccatgtcatagttgagtaaactgagtctcaacgtggttgcctgagtttacccagtgaggcctgggacctgagcctagactgaatcactctaattcctgctgaattaaacttttatttatttattcattattatttttttctgagacagagtcttgctttgttgcccctgctggagtgcagtggcacgatcttggcccactgcaacctctgcttcccgggttcaagtgattctcacctcctgagtagctggaattacaggcatgcaccaccacttctggctaattttgtatttttatagagacggggtttcaccatgctggccaggctgttctcaaactcctgacctcaggtgatctgcccacctcagcctcccaaagtgctgggattacaggcgtgagccactgcacctggcctgaattaaacttttaagtaagtgtttacttcagtggaaaaatgggttgggttctaagagatgtccaaagatacaggagtaggcagttgttgatggaaatctgttcctgcccttattctttcatttatgaaagggcatcccaggtacagcggcgcccacagtcactctctagcccagcagttctcggatgggttggttgcaggacccctttatactgttaaaaattattgaggatttta

SEQ ID NO: 15359 - DNA, 2300 bp, Homo sapien
tcggagtcttcctctcgagcgacaggagccaggcctgtgggggtccgatggctcgctctccttccctcccctcttcctgggaagttcgggtggggggagtctgggcttcaggctgggatggggtctgtggagctgaggcggccccctgcccaccaggtcatggtattcccgggcctgcgtctgagccgtgaagccttcctcaccacggccgaatttgggacccaggagctccggcggcccgcccagctgcggctgcaggtgtaccggctcctcagcacagcaggtgggactctggggtggtgggcgccgcaggactcggggtggcctctctgagctctcacgtctgctggtcctgtggccatcagagtggttcccagtcttaggtggacagagcaggggttccagagacaccagctcattccaggtgtcctgggggtggatcgggtggggcctgcctggggaccggcctgggtcagtcagctggccggagacagggacgcagcactgggctgggagtgctgcccgggcggggagacctgtcctcacagcaaggccaggctcgctggtgcaggcagttgggcatctctgacggtggcccatgggcgaatcagggccccaacaccctcccctcctcgcagggaccccggagaacggcagcgagcctgagagcaggtccccggacaacaggacccagctggtccccgcgtgcatgccagggggacgctggtgccctggagccaacatctgcttgccgctggacgcctcctgccacccccaggcctgcgccaatggctgcacgtcagggccagggctactcgggtccccctatgcgctatggagagagttcctcttctccgttcccgcggggccccccgcgcagtactcggtgtgtggccctgacctgggtctgttccctgcatctcctcaggccaccttcctgtctgctgcccagggtctgggtctgcgcagcagacacacccagcctgcaggcccctcccacgtccttgccacctctgacctccgacctccgacctccaacctccgacctctgcagtgcccttgcccctctcccagtgggagaagctctcgcctgggcccttggcacgagctgtgcctcctcttcctctctcccagcacagccgctccttcctgtctgtcaggtcttggcctgtgtcctctccccgtgtgtccccctgtctgcaactgtcctgcctgtccttgtcacgagcactgtggggaggctccctgaggtgtggctgacgaagcggggagccctgcgtgtccaccctcatccgtcgtgcaggggtccacgggccatgaccgtgaggacgtgatgcagccctgcctccctctccacaggtcaccctccacggccaggatgtcctcatgctccctggtgacctcgttggcttgcagcacgacgctggccctggcgccctcccgcactgctcgccggctcccggccaccctggtccccaggccccgtacctctccgccaacgcctcgtcatggctgccccacttgccagcccagctggagggcacttgggcctgccctgcctgtgccctgcggctgcttgcagccacggaacagctcaccgtgctgctgggcctgaggcccaaccctgggctgcggctgcctgggcgctatgaggtccgggcagaggtgggcaatggcgtgtccaggcacaacctgtcctgcagctttgacgtggtctccccagtggctgggctgcgggtcatctaccctgccccccgcgacggccgcctctacgtgcccaccaacggctcagcctcggtgctccaggtggactctggtgccagcgccacggccacggcttgctggcctgggggcagtgtcagcgcccgctttgagaatgcctgccctgccctggtggccaccttcgtgcccggctgcccctgggagaccaatgataccctgttctcagtggtagcactgccgtggctcggtgagggggagcacgtgatggacgttgtggtggaaaacagcgccagccgggccaacctcagcctgcgggtgacggcggaggagcccatctgtggcctccgcgccacgcccagccccgaggcccgtgtactgcagggagtcccagtggtgagtatggccgaggctccaccaccagcccccaggcaggtgcctgcagacagggtgctcacacagggcgtgaggcctggcttcccagtgagggcagcagcccagttactggggacgtcggccccgggcaggtcctgctggctggctcctcaggctacctggtgggctttaaattcctggaaagt

SEQ ID NO: 15360 - DNA, 2300 bp, Homo sapien
agcaggcctttgctggacagatgaagagtgacttgtttctggatgattctaagaggtgggttccctagagaaacctcgagccctggtgcaggtcactgtgtctggagtgccgggggtgtgcgggctgcgtgtccttgctgggtgtctgtggctccatgtggtcacaccacctgggagcaggtttgctcggaagcccagggtgtccgtgcgtgactggacgggggtgggctgtgtgtgtgacacatcccctggtaccttgctgacccgcgccacctgcagtctggtgtgctggccctccagcgagggaacgcccagttagccggacctgctcagtgacccgtccattgtgggtagcaatctgcggcacgacccccacttactgggtctctccttttacaaccaacacaaccgaaatctagggcttcttctttttttttttttttttttgagacagagtctcattccattctgtcacccaggctggagtgcaatggtacgatctcggctcactgcaacctccgcctcccaggttcaagggattgtcctgcctcagcctcctgagtagctgggattacaggcgtgtgccaccatgcctggctaatttttgtatttttggtagagacggggtttcagcatgttggtgaggctggtctcgaactcctaacctcgtgatccgcctgcctcagcctcccaaagtgctgggattacagacgtgagccaccatgcccagccaaatctagggctggaacatggctgcagcatataaatagaattgaattccatagttttgttaaccctgttttttgtttgtttgtagttgttgctgtttttgagacagagtctcgctctgtcgcctaggctggagtgcagtggtgcaatctcggctcactgcagactctgcctcccgggttcaaactgttctcctgcctcagcctcccaagtaggtgggactacaggcgcccaccaccacacccggctaatttttgtattttattagagacagggtttcaccatattggccaggctggtctggaactcctgaccttgtgatccgcccacctcggcctcccaaagtgctgggattacaggcgtgagccaccacccccagcccctgttttgtttttgttttgcttgtttcttagggttgtttttctatttatggtaaaggcattggctttccatttgtagcatcaatagaatatttcctgtttacaataaccttatgtcatagtaaatggtaaagggatttaaagcagtggttttcagctgccagaggcctgagtttgggcacactctgtgtgatcgggcagaaggcctgtgggaagtttagctgaggacagggccaggaaaggtgatggacagtgggggtctgtcctggtcaccaggcccctgggtcctgcccacctgcttggagctccccacccatcacacatgatgctgccaagccctctgggtattgtgggcaaataccttaggagagaagctgatgagctttgtttcttgaaatgcacagattccttggacatccctgagaggccagtcatgaaagtcagcttggttttctccccctcatttgggttcagaatttaaagtccacacacacgggcagtaagataatatagataaggacatcatcactcggtttcggatgttaaaatgtctaggtgggttaggggtgatttgagatcacgcaaccttgtgccacaaagaggaattcccaggccagagggagacattttattgccatgttatgatctcatcattgagttgaaaggcaatcttgtttcattttggattctttcttatgtttatgtcttataagggcactttgaatttccaagcaaataataattttgaattagcttttaatcattgacttctagcacagttttatgatcagaaacatgctgtgtgatttgattgctctcaaatatattgagatttgctggaacaaaataagtcaggttaatttttgtaaatgtaccatgcatgcttaaaatgaatgtatgtacatttgttcctgagatacaggttgatggacggatggctacatggatgtgatggagatggtttactatcgggaccttccgcatcctgctgatgttttgttgcttaggatatgaatggctgagcggaggctgtaaaacctggcactctgcttgggtatgaggttcttcctgccatcctgccatcatttgttttttatgttttgtcgccaaaagtgaccttgaggaaccctgggagctcaggaaggaaggagcgcccagaagcagggacagggagctggttggggaggacca

SEQ ID NO: 15361 - DNA, 2300 bp, Homo sapien
gacctcgtgatccgcccgcctcggcctcccaaagtgctgggattacaggcgtgagccaccgcgcccggcccagcctcttatttgtatttttattgttttttgagatggagtctcgtcttattgcccaggctggagcgcagtggcacaatctcggctcactgcaacctctgcccccggggttcaagtgattcccctgcctcagcctcccaggtagctgggattacaggtgtttgccaccacgcccagctaattttttgtatttttagtagagacggagtttcactctgttggccaggctgctcttgaaccagcctcttattcttttacatactatttccagcacaactgtccaagatggcagtcaataaatgtttggctaaatataataaataatacggttgattatttccactttttcatgttgggttttcaaagtctacttttaaaacagtaaagttaacttttctctctagtatttgttttgtagaatctattatactttgtaatgtaatccacagaaacttggaggtgactttagtaaaatttactagttttgaatgatacccatgctgaggtgctcagaggtgaaatgtactaacatatatcgatggatggatatatggatgcatatgtgattaaagcaaatatagggaaaattaactgtagaatctaggtagtgggtatatggttgttcactgtacaactgtttaaacttttctacgtttgaaaaatttcataacacgttggaaaagtgacttgttttgctcaagcaggggtacattcaatcttcaattcttgaaagacataaatctatctttccttctgtttggaaagctctttagagagtcagaataatccccacagtacagtctaaaccagcacacaagggttttttggtagaaaataattttattaacataaccaggcaatttaccaaatacaacgtagatagctcaaaacatggagttactgcgctgaaaatgtgaccctgtttacacagatttcgggacgaagagtataaaacaggagagaaaaggagtaagattgtggttgtagcgtcatcgcagaggtgaagtgttccattgattgccactgtggtagtctatatcagtttcccacattaaggtgggaggaatctactaagcaaatgtacgccctccccattcgttcgaaacacattgcagtaaaattgcaaaagtggccgggcgtggtagctcatgcctgtaatcccagcacttggggaagctgagacgggaagatcgcctgaggccaggagtttgaagccagcttgggtaacatagtgagacacccctaccttctctattaaaatgagattttaattttttttctcttcagttcatcggttaacaagataaaaaaattaataaaaaattaactttttaaaacatttaaagtaaagtaggagtggaagcagtatgtggactcatggggcttgggtctgaatcctacctagatcggcactgcgaaatggggataatgatctcctagagctgctgaaataggaaaatggaagaacagcagctgatgtattaatattatcattattactactacccattacctgacaagtgataattgtgacatgaaagaggctggaccggttgttacaacaattttttccgtctagaattcggcggtaaggtctgagacaacacctcagcttagatcagtgccttctctgaacagcgttcactaagcagcccccaaccccaaaacccccaagtccccgggcgccgaggacgctgcgagtcctgcgcatgcgcaaggttgcccactcgctcaccgcctccttggcgaatggcctgttccattctcgagggatgccggcgggaggtgaggcgggagacttggaagcctgggcccggaagtgaggtgcgtcactagtatttccagcctttcactccatgaatagtactttgtgattattatacttctaccttgatgattgcaacaggctgctggaaagagtttggtgaacaatccaccgggcatcctccccccttcacctgcgcacgttagggagggccggcgtggcgcccaggtacggaatcccagagggctccgcccagcgctacggggccccgccccgccgcctctcaaccatcaggttcggcagcccgcggcgccgcctggcagctcctcctcttctccgccccgccggccgcgggcgcgggggacgtcagcgctgccagcgtggaaggagctgcggggcgcgggaggaggaagtagagcccgggaccgccaggccaccaccggccgcctcagccatggacgcgtcc

SEQ ID NO: 15362 - DNA, 2300 bp, Homo sapien
gctgagtgaaaagaaagatggtcttatatgcttttgtcatatttgtaaaaattactgaatttagaaataaggaatatgggatagattacccaggggcatccacagtcaacattttctcttttttcccagactttaatcgaagggggtgtgtttgtgtttatatggttgtatctggctcttttcacttattgttaaaacaggaatatatcattttaataataatttttcaaagtatagtttatttttaatgtcttcatggtattccttcaagtgaatatatagtaattaactgttgcccttttggacaactaagagtgtttgcattctcttgctttctgtgaccattttcaggtaatgttctttgtgtagtgctgttaaggacttctctgtgcataaagctcttcctgtattttatttagggttatggtcctcagatggattttcagagtcagtctagaattgctggatcaaagagcatgactttttttttttttttttttttttttttttttgagacagagtcttgctctgtcgcccaggccggagtgcagtggcgtgatctcggctcactgcaagctccgcctcccggattcatgccattctcctgcctcagcctcccaagtagctgggactacaggtgcccgccaccacgcccagataatttttttgtattttttttagtagagatggggtttcaccgtgttagccaggatggtgtcgatctcctggcctcgtgatctgcccacctcagcctcccaaagtgctgggattacaggtgtgagccactgcgcccagccgagcatgactatttttaaagttcatggtgcttctagcccaactgggaggactacatcgagataagacattgttaaccgtctttgccaagaacgtttgaaagcaaaaccatagggttggagggttcctcttttgtaagctgtaggagtcccagggggatgtatgggagacacttagtgacttttaaattgattctgagctgtgatcactggtgttaagaaattatgtcctcttcttgaggggtgtacaaaatggggagtttaataataatcctctgaaacgtgaaatgaattacttagtgtctactgcaagccaggctcttgcagacacaaggctgtttggggacaacagtctaaccttcaaaagatgtgtaagagtgttctgttgggaatggcagctggcagagcagcatatataagatggttatgttcacgttttttaaagtgtgtgtatcctttatacctatgtttttgtacctagaaaaatacgtaaatttatacctagaaaatatctgaaaggttatgtattaaactgttaacggggtggattggtggcttatagggtagggggctaggcattttcacttttaatacctgtattttttttgaggatttgttttacttgggtgtcacattcataatttttaatcctttaaggagaaaaatgtgcttattaaatttttggtctctgaatgctaccaagtcttagtcatacagaacaatatgctgcaactgtttacaattcctaaaactgtaaactcctcaaggacttggaggctaaacatgaagaatataaaattaagttgacaatcactgtctcctgcataacactgacttcacttctcttgagaaatgtgcatctgctaatccatatttattactttttaggggtgggtgaacccataaataagatactgttctttgaatgcctttagctggtgttatttaccagtaatgcttggagaaagaatccaaaattacccccactaaaatgctcacgacccagttgtttctgtgtttgtcaaagtgtttctggtatattctagaatataccaaagataattacttgaatcatttagaaaattttacattatatcctcttataaggcacttggaaattcacccttttttttttttcggcttggctttctaaatgtactttaacatcaatttataatattaagagttcctaaggagagagatttcttagaagaataatcgtgtcttgtcttagagccacagcctttcacaatctgaagtgaatggtgcagagagctttcttgtcaagtcatatgtttcttcctgcagctcggcttgcccttcccctgcttgtgccgtgtaccctgtaacactgtgtttggatcccagcatcagatggtgagttctacttttggtttgtaaaatcatgtgggattgtgttttgaaactgcctttcaaatgaagttctttttgctggcctccagataattagtaacttactcatgtattgcttggatccttacattg

SEQ ID NO: 15363 - DNA, 2300 bp, Homo sapien
acttggtggtttctaagttcagccacctgtttttgtatttcaacaactgtaaatattcaccaatccttcaagttacatgtagtaattcaagaaaagcagtttctaataagacatggaaatctgttgtatttgcaatgtaagtctgtcattcaaaagctactgagtataaacacgtgcaaggcacagtactgaacactaggggagaccaacgacaaatgagaggatgcagcacgctcaagagctggtgataagagcacagtgctgccactcatcacctgcaggaccacggataagtcaattcatctgccagtcaccagctatgtaacctgtctatgcttcagttccctcaattataaaatggggaggatagtatgtatctcacattgctgtgaggattaaatgagttgatatgcaatacaggaagtgcttagaaacagggtctagaatgtagtgtcattagactaatgtctcaatcccaggtccctcatcactaatcatatctaactcatgggattggagtatattaattcaacagatattcactgagtactggacagtagaaagcccctcaagaaattcctttttgttttcttaaagaaaattaattctgaatacactgtcatcagtggaactgacattctagtgaagttgcagggatcaaatgagatgatgcatgaaagtacttcatggtgcctgacactgaggtgaatgctcaataactactgaagacgagaaagaagagagggagaagagaaggaagaggaggatgaggaggcgaatgctgatttacgctctcaggaaatgtatgctccactgtggactataaggcatggctatatacagatcaccatgtctgctaaatgtccaagtaatttaacacatgcatttattagcctgtgagtcagcagcaggacagcattcaaatcctcaggagtatacggttctgcctgcaggaagatgccagagctgtgctgacctcaagggtctggtagttaatggcatcattctcccgcactccatagccacgggatattgaaaaaatctcccgagtgcccaagtcgtctctaaactaagttactaaggcttctctttcctaagaaccacatctcaagaagtgagctaatagcacagtgagacacttttcaaaaaatgcagtgcttttgtaaacataatgagcatcaatctttttttcttttttttttttgagacagggtcctactctgtcgcccaggctggagtggagtagtgcagtagtgctatttgggctcacggcaaccttgacctcctgggctcaagtgatcttcccacctcagcctcctgagtagctgggatcacaggtgtgtgccactacacctggctaatttttgtattttttgtagagacagggtttgaccacattgcccaggctggtgttgaactctgaggtttaagtgatccacctgccttggcctcccaaagtgctgggattataggcatgagccactgcacccagcccagagcatacttaaaactgttgaactatcctaacatatgatgaacgaagggactactgctagagcactacgcaaatacttttcgtgtgtgtgtgtgtgtgtgtgtgtgtgtgtgtgtgtttagatggtgccacccaggctggagtgcagtggcacgatcttggcttactgcaacctctgcctcccaagttcaagcaattctccctgcctcagcctcctgagtagctgggactacaggcgcctgccaccatacctggctaatttttgtatatttaatagagacggagtctcaccatgttggccaggccggtctcaaactcctgacctcaggtgatccacccgcctcggcctcccaaagtgctgggattacaggcatgagccaccacgcccggcctatttttctttctttttttaaaagactgagtttcgctctggctggagtgcagtggcgcaatctcggctcactgcaagctccgccttctgggttcacgccattctcctgcctcagcctcccaagtagctgggactacaggcacccgccaccatgcctggctaatttttgtatttttattagagacagggtttcaccgtgttagccaggatggtcttgatctcctgacctcatgatctgcccacctcggcctcccaaagtgctgggattacaggcgtgagccactgcacccggccacctatgtttcttaaatatagaaatgatacttgaggaagtgctaactccccaagaatatatttaaaacaaagatttcaacccacgtgcataacttactatatgaacagacactactgcaa

SEQ ID NO: 15364 - DNA, 2300 bp, Homo sapien
gctttggggttctctttctgcaaccttctgccatcagttttcatttgcatgaagtgggagaaagagaaaagcaaatggccctgctcttgtcttctgatatcttcctgaagtgaatccaacagattgttccctaggcataactagacaaggaaataaggacttaggagagaatggggatcagttcaggtttgaaagtttttgtgttttgcttcatggtattttagaacttcaggaaatatatgtcaaattctgatttaaataggttcattgagtgtttctttgacaattctgcaaggtatgcttaagtttaacatttgagtgtatttggggttcaagtcagtaggtttatttttcttttagaacatggtttggtttaaatacaaaaagtagccgcgcatggtggcacacgcctgtagtcccagctactggggaggctgaagtgaaagaattgcttgaacccgggaggcggaggttgcagtgagccgagattgcgcctctgcactccagcctgggtgacagagaccctgtctcaaggaagaaaaaaaaatgcatggtttggttgaagggggtgtggctactctgccttctgagtgggagtctggagccagttgacccgagttctagctcagtgggagttctatccttggacgaggaagtggaccactggagaagcagaagggatgaatctaagttcagaggcctgggctctgctctgagcagtgccacagggtggccctgtgacattgagtcattttctttccaagcttgactgtcaaatgaaagtatgccggttggtctcctctgattgcaaacagagaagcaaattatggcctagattgagcaagctgttaagaatccaggcggtgctgggcccatctgctttcctgcccctgccatgttgagcgcacttggcttttcctcagtcatcgctgctcccttattctcaaattgggggacccagtggtgctagttaatcaccagttgttttggagcatctctgtaggccacactggcccaggcagaaagcctgctctgtcccttcttccaatggctgttttttcagtagaggatacaataattggctaataccatgaggcattatggcctgtgagtcctcatcatcaccatcaccatcaccaccattccagctgctgcttgtgaaattcatgtgtggtactaagtaccttacatgaattatttcatttaaccctcccaacagtctcctttgtatgtgctgttctctctgcctggaaacactgtttcccaccccccgtccccaattcttctgtttatttttttttgagacagagtctcactatgtagcccagactggagtgcagtggtgcgatcttggctcactctaacctccgcctcctgggtccctgttcaagcagttctcctgcctcagcctcccgagtagctggggttacaggcgcatgccaccatgtccagctaatttctgtatttttagtagagatggggtttcaccatgttggccaggctggtcttgaactcttgacctcgtgatccacccgcctcagcctcccaaagtgctgggattacaggcatgagccaaagcgcccagcctccccagtcccaattcttctcatgactggtttcttatctttcagatcttaattcaaatctcacctcttcagaaaggcctttcctggccaccctaagatcatctcccaccgtcagacatcactccatccccctgggtcgtcttcatcactcttactactatctgaaatcaaatctgtttgttttttcctatagaaggtttgtaaaggccttatacagactcaccactgtgcctcacctgggcattaacacccaagaccctagccctgaaagcccagtgccaggccccagacatgctcccatcccctgccactcagcttacagtcctctttctgtttcctcttctttgtggattcacctttttttgggtgtgagcccagccatggtttaacctttttttggttcttggttatatttaatccagtatttcagatattcagaattgacaacttcagtgttcactcagtctatcacgttactagaaccagaagtgtctccaaccctgtatactatttcttacacacattgacatttgagaccactgagttcaaagaaagaaaagatgatcataatattcatagcagtcttggcactcacctcattctgccatctcctagctgaggatgggagaatgggcggattattttgttgcctttttgttcctccttgcttattgggcgtgcgcccctatttaaatattaagcaccgcccccctg

SEQ ID NO: 15365 - DNA, 2300 bp, Homo sapien
gctggggttacaggcgcatgccaccatgtccagctaatttctgtatttttagtagagatggggtttcaccatgttggccaggctggtcttgaactcttgacctcgtgatccacccgcctcagcctcccaaagtgctgggattacaggcatgagccaaagcgcccagcctccccagtcccaattcttctcatgactggtttcttatctttcagatcttaattcaaatctcacctcttcagaaaggcctttcctggccaccctaagatcatctcccaccgtcagacatcactccatccccctgggtcgtcttcatcactcttactactatctgaaatcaaatctgtttgttttttcctatagaaggtttgtaaaggccttatacagactcaccactgtgcctcacctgggcattaacacccaagaccctagccctgaaagcccagtgccaggccccagacatgctcccatcccctgccactcagcttacagtcctctttctgtttcctcttctttgtggattcacctttttttgggtgtgagcccagccatggtttaacctttttttggttcttggttatatttaatccagtatttcagatattcagaattgacaacttcagtgttcactcagtctatcacgttactagaaccagaagtgtctccaaccctgtatactatttcttacacacattgacatttgagaccactgagttcaaagaaagaaaagatgatcataatattcatagcagtcttggcactcacctcattctgccatctcctagctgaggatgggagaatgggcggattattttgttgcctttttgttcctccttgcttattgggcgtgcgcccctatttaaatattaagcaccgcccccctgccgcccgccgccgtacctttaaaagtatcacgttttatttgtctctgtgaaagttaaagatgatagatgtgaaggcacttagcacaggactggccccctaaataattggcagatttgaattcacatcctgcttggtatgaatactgtccacacggtcctttgaaaagttagtagaaaagatcttgggccactgcttcttgtctttccaagttagcatttcctgttgcggccctaccagtgagtcatcacactcagagccttggaacataagttttattactagagctatagtactgggattgttggatgcttagagatcttccccctccagggccacccacactcccctacagtaccacagagcctgccaaggacatggatgcttacggtaccctgaccccatggcttgaccaagtcagggtatactgtttgatgcaaaacaggaactcgctgctggattatcataatacataatgcagtggatgttttcaactgttaggaaacccactaatgaagttagtcgtcttcggcctgtctttaataataattaaatatattagaaaatacacagatccagttctcagctgtgcttgtctacatcaccagcaggacttgcatcttgttctgaaagttttgcaaaggggaggaaagtacttgttgccccctctttttttctatgagtatgaaaaattctagttggccaggcacggtgtctcacgtctgtaatcccaacacttggaaagccaaagtaggaggattaattgaggccaagagttcaaggccagcctggacaacatagcaagaccccatctctaaaaaaaccgtttaagtttcaataaatcctgcataatttctgggattcttgaaagcatgggctctctccgcactgagtctagtttcactgcttcttactggttttaatctttaatgttagacctatgtttatcccttattaaaatttccccctgctttaatttcaatgtaccagggtcaaacatcttataattcacagtgtactctcaaggctggctcatagttattttttaaaattttactaaacatttgatttttctctagcaactgaaattaacctctgaactttttagtgtgtttatttacaaatagagcatttctaagcgagtttttgaactcagcatttcattttgaaggcgtctggagtttaatgttacttggtgatatgagacttccattcttccaggtggaagatgagctcagctccccagtggtggtgttcagatttttccaggaattaccaggctcaggtcggtgaattttaaaagagggttattttcatatctgtgttaaaggctttgaatttgataccatttcaagttaaatagttcaaaatatttttattgctgacaatcttcagtcagcatttcagaaaaatgtaataat

SEQ ID NO: 15366 - DNA, 2300 bp, Homo sapien
ctccccactgcacattagagtcatccgggagctttacacacaaccagtggccgcccacccccagagattctagaatggagcctggggatctgtgttttggtttttattttttttttagaaacagggtctcatttgtcaccctggctggaatgcagtgtcttcaccatagctcattgcaacctcgacctcctgggctcaagcaatcccctgcctcagcctcccaaggagctgggactacaggcgagcaccaccacatctatttttttttttttttttttttttccatagagacgtggtctcactctgtcacccaggctgctcttgaactcctggccttaagtgatcctcctggctcagattcccaaagcactggccactataaggattgcctggccacagctctagatacttagtctctaaaactgcaaaagtaagccagtgagccctgaggcccggcgctgtcaccatctccctgtccttcctgtgtggggacagcagcccaccacagtacttccctttctctcagtcataggaatgtacagaatctgtggttgcctttttgtgctgaacctatggtgtgatgtctccagcctgcctgaagtaggcttgctgtgggaagagtgatttctaacactggagtatgtcattgtgggccacatctgtgagagaaacactccacacctgctacagccagctgtgtctgtttctaaccctaattcttccatatctgtgttgagggcctttttttgtttaaatctccatggctcccggtaactggagtacctcgagcttttgaccttcccagtagtggaagagggagccctgccctcttgtcattggccatctcgtgagcatttctctgacattgtgaacatcttcagttttaggaactcggggagaggatgtggatcagctcgtagcctgcatagaaagcaaactgccagtgctgtgctgtacgctccagttgcgtgaagagttcaagcaggaagtggaagcaacagcaggtctcctatatgttgatgaccctaactggtctggaataggggttgtcaggtaaagtcttggcctgccgcttgatgttggagacttttctgtataaagaacatgagtgggtcattttctgaaccaccttagaaatccaagatgaacgtgtagtcacaatatgcttaacgaaaatgcaactcggttttctgggcatttacaaaagcacagtgcaagcaggcaatttggccagcgtggcgctcagggaggggagttgctgaatgttctgtctgtaggtgccgactctcagctacctaggagaagatgccaacaggtatatatcactcactgagaatggttactatccagggcatatagagaattgcaaatcagtaagaaaaagaacccagctctcggggagagaactgggtgcagtcctatggctgctttctcgccttcagaggtgaggcaaacctctttttgtattgcccatgagacttccagaccttgtatggaactaaagacttaggctttcagctgggcacggtggctcatgcctgtaatcccagcactttgggaggccaacaggagcatagatgacttgaggccaggagcttgagtccagcctggacaacatggcgaaaccccatctctagaaaaaatacaaaaattagccagaggtggtggtgcacacctgtagtcccagctactcgggaagcttagatggaaggatcaactgagcccaggaggtggaggttgcagtgagccaagatcatgccactgcaccccagcctgggccaccaagtgagaccctgctttaaaaaaaaaaaaaaaaggctttcctgtgactttctctttactcctggcacacttccagaaagtttgtggtctggagacactcgcagtagctcttttgcccactggttccactgcattgtcttgctaatatttagaggtttctaatcctgtatcagaagagacatttgatcttttaagctgaaatgctgtggtttgatgttgttttaggtatgaacatgctaatgatgataagagcagtttgaaatcagatcccgaaggggaaaacatccatgctggactcctgaagaagttaaatgaactggaatctgacctaacctttaaaataggtaactgcttactttgtaagtcagctgtggggtttggaaggacacttggtaaccggctttgaagacgacggctcatcccttagcgggctagcgcctctcgggctgggttccaggcgaagatgcggttctgagacctccctccccttctgcagccttgccaggcctttctctccg

SEQ ID NO: 15367 - DNA, 2300 bp, Homo sapien
tttttccatcctcactaatttacatcactattttattttttttttaattaaacaggaaagagccagacttctcagaggtcagtctgttcaacaagtgggaccccagggccttctgtatgttcagcaaagagagcttgcagtgacctccccaaaggatggtaggttaggaagcagtgaattgggcgttatcccaaaaggctattggatattttattttatttcttttttaaacaggctccatctccattctgggttctgatgatgccactacttgtcacattgtggtcctgaggcacacaggtatgatgagagaggtgaaggaaaccattacttaaactgacccaacctttgggaccattgaatttctcgtgttgagtttcctggtgtcttgttggaagcggactccgcttaccttttttctggtctgcatggtgtctccctggtgtcctggtcagaatgggttggctggggagcacagacctgtccgtttttcccctacaggatattcaaagatgaggcggtccggagggacaggcggagtctcggcctgcgcactgcactcgcatcagggaataacttgagtcctttcacccttgttcttcaggtaatggggccacctgcttgacacattgtgacggaaccgacaccaaagctgaggtccccttgatcatgaactccataaaatccttttctgaccacgctcaatgtggaaggtgagatctacgctgctctcataggtgaattgagatcttggaaccgtcgcatacaggacgtggctgtggaagctgttaggggaacacaggatgccaccactgccgtgtctgcctcgttcccctggaacagaacctggcacgacgtgggcactgcgtcagcagtggttgagtgaatgagtgggtgctgggcacaggcaaggagtctgtgctggatttgagatggaaggcttgactttgaacttgatgtcgtctcaggaacgtcgaggttgcgattttcacatcgttttgctctcccccgggtgtggtagctctccatgcagtcattcctcccgcagttgcttgttaaatgcttcctctcacctacaccttgtagtttctagggacacagcagtgaagagtagacagaaagcccggcccaaggtgtttgtattccgaagccgagagactgtacacaagatggggtgttgggtggtgaggcggggctgtggagaaaacgaggccaggaagatgtggggaccgctagggggcgaggcatgtagttttttttcttgttctctttttgttgttgagatagggtcttgctgtgtcgccctgtctggagcacagttgtgtgatctcagcttactgcagccttgactttgtggactcaggtgattctccgacctcagcctcccaagtagctgggaccacaggtgtacaccaccatacccagctagctttttttttttttttttttttttttttggtagagacagggttttgccaagttgcccaggccggtcttaaactcttgggctcaagtgatcctcccagctgaggggtatagttttaaattccagcagattggtagtttccccaaggattgctggataagaagcggcctctagcctgggtgcccccacagcacctcatcctctctcactgcagtaaagtagccgctgcctccatttgacagagacgggcaactgaggctcgatgtgctggagcacacaggagctaggtggaggccgacgacacaggcctgctgtcaagaccactgttcacacacctgtcccctctccttgctctttgtggagacctggcaggtgttgctctcattttactggaagtctaaggcagccattgagtgaactactcccatcatatacgaaggcttaatcctaggagtctaaaaaggaaagagagagttctctgggagagatttgctagtcaatactggtcgattctaaattctccctctgtggtctgtgccaaggctgggctggcttcatggacacgtgacccatgcaggcccaaaatggtattttcattttcctatcatcttggcccccgcagggggacgtaatcaatgccattatgttgccacacactctgctccgtggttctcagaacgtgcttgtcagctcttcctgatctgttgtagaactgtgatcgctcagggagtcagaggcaaacctggtggcccagtggcaaagccatggtggtcgcagctctccttactgctactacttggagtttattatgaggccccttgaggctgtgccctatgttgggtacatccaagcttctggttcatcccttaggaag

SEQ ID NO: 15368 - DNA, 2300 bp, Homo sapien
gcctttcaaagtgctggggttacaggcatgagccgcagtgctggccacacacctgctattgcttcctcattgcctgtagaccaaaatttgtggagctgggtgggaagagaggtaggggagtggtttcctgcttgttatctggctcatttagtcctttaacacagtactcagcctaggagattgataacctgagattacttgaaaaaagatcacccaaaagtgaaaaaccagttaggcaaactgcaccagccccaggcagaacccacagaaccttgttcttcacctttgcacttccaaatgcctcactttgattgactactctttgctctgcaattccaataatagctatctttagtgtttagtatgtaccaggtgaaacaaacatgctattctacaaaaccagttcagggaagttaagtaacttgctccaggccagcctgctggtcattgatcaccctggtttcaaaccctgtttttagctccgagcttcctagttgggacttacttaatgtcacctgcattagaatgagttgtttacagtacagtctaggagcatcttatagtgatggagagcactgcctttggaatcatgcaaagctaggttcagtcttcgttctactacttatttctaccactttgagcaagttactgtatctgttataacggaggtgttgatagtagctcctacatttgtgaggacaaatgacaaatgaggtgttgatagtagctcctacatttgtaaggacaaatgagaaatgtaggtgtaataatacagagaaataatttcctggtagctagaaatagagttattttgggtgagaagttgggtaacctggcgatgggaacaccatcttctacagtcatttctttagtaaatttcctggtatttttgttgaacggggtgtgtaagctgagggggagatttatgaaagaagacgatgaatacagatgataaaattctaataaagtttctgctgtatcatgtggctcctctgtatcttttgtaaaattactttttgttaatgtgctgcagagttggatgaatttgagcaatatttccaagttttagaagagagctccacggtgagacgcctctcaccttggggacctgtcctcagattaggggctctgcagtcagtatccgcaaatccttcccccacggttcccagcccacctgtgagtggcctattgcattccaatcacgacgtgttaatcgatgatctctttagtacgtggggctagcacagttcaggatctattttctcagtttaagaccgtttacatttatttttattattttcagaaacagagtgtccctctgcagtgcccaaacatagctcattgcagcctcccactcctggggtcaagagatcctcccgcctcagcctacagagtggctgggatcacaggtgcatgccaccgtgcccagttaatttttaaatttttggcagagacgagggtatgggggagggtgggtctcactatgttgcccaggctggtctcgaactcctggcctcaagcgatcctcctgcctcggccccccaaagtgctgggattacaggcgtgagccaccgtgcccgcctgattaggtttattattactcattgaatgcaatcctacggagctgcacagcagggtcccaaactcaagcttgtggaaggtcacacacctgggaagcgtggagcaatgacctaaagcgcagcagtcggagccagaacccgccccaggaactcgcccggaggctctcttggctggtgcagctgctccctggcagctctcctttccccgctccttcactcccacgcttttgggactacacttcccagcgccccttgcggaggaggcgggccgcgcgctgcttccagggccacttcctggctttggactacatttcccgtgaggccttgcggccatgtcctggatttctccagtctcttcggccggcaccgcctccgcctggactccacttcccggcagcgcccgcggtggggcggggcaggacgaggcgggacgcgcggcccgaggggcgggggcggcgggcggcccggggctgcaaagcggggggccgccgcctccctgggcctgcctgggcggccgcctccgcgatgccgctgctcgtcgaggggcggcgagtgcggctgccgcagtcagccggggacctcgtccgagcccacccgcctttggaggtgagtggggcgcggcgcggggcttcggggcgggcccgaggggaagctgcagggcgggctagcgcccccctcacgcgacacagacttgaaacttggcgctgttggcacatccgg

SEQ ID NO: 15369 - DNA, 2300 bp, Homo sapien
tcattggtgaaagaccaaaagttttttcctaagacaaagaacaaaacaaggatgtccgctcttgctgcttgtctagccaaggcagttaggcaagaaaaagaattaaaagcatccagatggaaaggaaggcgtaaactctcttttgcaaggtgattttatatgtcattctaaggagtttacacacacacaagaaattttagagataataaatgagttcagcatggttacgggacagaagactaacatacactaaccagttgttcaagacaattgaataggggagaatagtcatttcaacaaatgctgctggcagaagtggatatgaacatgcaaaagaatgaagcatatggatatccatatttaaaaatgaactcaataaaagccctacatgaagagtaaaaactgtaaaactctgagaagaaaacgagtacattttcatgatgttggtttaggcagtaatttccagatttgatgcctaagcacaagcaaccaaagaaaaaaatgcatcaattgtacttcaaaattaaacgttgttatgcttcataggacatcttcaagaagatgaaaaggatccccaaataatgggaggaaatatttctaaattttatgtctggtaatggacttgtatatgtaaagaactcttataattgaataataaaagggcaaatagcccaactgaagtgggcaaaggatctgaataggcatttctgcaaaaaaagcacatgaaaagaagctcaacatcattagccatcagggaaatgatttcacttcatgcccacaaggatggctataatcagaacgagaagacagtaacaagtgttcacaaggatatggagaaatgggaagttggaactgtcatatgttgctgtgagaatgtaaaatggtgcagccattttggaaaatagcctggcatttcttcaaggttaaatgtagaattaacacgtgactcagcagttccatttctgggtttatacccaagagaaatgaaaatatatgtccacagaaaaacttgtacatggatggtcatagcagcatcatccataatagcctcaagtagaagcaactcaaatgtctgtcaactgatgaacagacaaaacatggtacaatggaatattactcagcaatgaaaaggaatgctttatatgttacaacatgattggaccctaaaaacatgccaaaagactgtgtattatatgactccattgatatgaaaggaatggtttacatgttacaacatgattgaaccctaaaaacatgccacaaactgtgtatgactccattgatatgagaggaatggtttacatgttacaacatgattgaaccctaaaaacatgtattatatgactccatttatatgaaatgtcaaagaggcagattcatagaaagactagtggttgccaaggtcttcattttttaggggtgcactaatggatgtaggatttctttttagcgtgattaaaatgttacaaaattgctggctgggcgcagtggcttatgcccataatcacagcacttcaggaggctgaagtgggaagatccaggagttgaagaccagcctgggcaacatagtgagaaaatgtctctctaaaaggaaaaattaacctcatgtggtggtgtgcacctgtagttctagctactagggaggctgaggaggaaggattgcttatcctgggaattcagggttgcagtgagctatgattgcaccactgtacgccatcctgagagagagagcaagaccctgtctctaaaagaaaaataaatgttctgaaattgattatgttgatggtctcataactgaatatattaaaaacttaaattgtatactttaagttggtgattgtatgatatatgagttttatcaatacagctacttaaaaacctatagttatgcaaattaaaaatttcatttactgggaataattgaaatgattataccgaacataatacatgtagaaacagtatagtttttgtattgctggatagtctgtttttttctttttaaatatttgaaactaaaggtcatgtaattgatgttttgcttacataactgtgaaacgtttattctctgttgaaatgttttatcttacattttctcctttaggaatgttacgttcataacttactaaggattagtgtatattttccaaccttgaggcatgaaattctggagcttattattgaaaaactactcaagttggatgtaagtattgagtaatctatttttattttcatttactgacttgaatttgttataatcacagtatgtggaaacaatagtcagtgatagaaaagaatccact

SEQ ID NO: 15370 - DNA, 2300 bp, Homo sapien
ctgtgaaatgggccaaggtgggggaaaaaaaggacactattactctaattttgcactgacggcatcatgctattattaaatatttgatttcaactggtatcttaattaatcttgctatttctattggtctttagtataacagcaatagttgtattctgacctaaccaaaagcaaacctcacacattatctccccttacctttttgtacttcagcaagacttctgtcacagttccaccaaaccgaacagtttttcttgggggagaattgaaaaagtcattctctaatgcacgcatatttgaaatcctgtggaaccaagattaacaagctattaagttcatgaaaataataaaaattataatagccaacatttattgaaccaacataattcagtggaactattgttaaggcctctttactggtctccctgcttccactcttaaccaacaatccttcctttgctcagcaaccaataactgtcttcccactgcacttacagtaaaaatccaaatctctcagtgtggtctttaagatcctacattaatctggcccctgcctacctctctcacctcatctccaacaacttgttttactacagccataacgtcttttctgctcttcaaacaagccaagctgtttttcatttcacttactgttcactctattggaaatactcttttcccaaatctctacgtggctggatttttttttttgagatggagtcttgctctgctgcccaggctggagtgcagtggtgtgatcttggcttaactgcaacctccatctcccgggttcaagcaattatcctgcctcagcctcctgagtagctgggattacaggcacctgccaccatgcccggctgatttttgtattttcagtagagacgaggtttcgcacgttggccaggctggtctccaactcctgacttcagatgatccgcccgcctcggcctcccaaagtgctgggattacaggcgtgagcaaccgcgcccggcctagatttttgtcttcattcaagtggaagctcaaatgacagatgtcttcccaatgagaaatctcaaaagctccttctctcccttctccctcccccattaccttgttgtataactgaaatcatcgtgttcgtttatttattggcctatgtactgcctttcccccctatgctgtaagctctgtagaaagcagggacattagtgtctttggataaaccactgtccccagtgtttaacacagtaagcaggagctcgataattattatgaatcatattacgctaattgttttacaaggtttgcttcacttacacgtagtaaattaatgaaaaaacatagcatcctaatgactctgaaagttaaacgccaagagtgctacgggggttagggattttaaaagtggagcaaaataaagactgcgaaacaaatacgtgtgtcgaaacaaattccaaacaaaaaagatgtaatattcaatttgccatgagtgacgacgttcggctgataacccacatagcccagggaaatcccttccaaatttggacgaagaagagggaaggaagaggggtcaaggcgcagaaggcagtacccaggcctgggaaatcacgaagagacacagtcgggaaagggggcctccagaacagagaacatagtcacttttccaggccccacccatgtctattacccagttaggaggaatgagctcatttctgtgaacgtgagatgaccctccaccccgtgctcctatcacacgccatgagctttgtcccacatcctttcaatccgctcctctaagcgccgtcctgagctttcgtcccagatacgcagaaggaagcggcctgaatcttacccagtcctcgacgcgcccagcttcttaactgcagaggacgaagcggccgcatctcccggcaaacgcgtgtgaagcagcggtgccgccattgggccgaactaacgcgaccgctgcgcctcaggccggatgcccagctccttccagccacagcctctgtcccggaagttgcgcgtgccagcgcaaccttcagccaatcagcggccccgcgtggggagggcgtatgctctcggcgggctagagcgccgctgaaacccgctcctcgttctacttggaggacttgttccagccagcgctagtgcgtgagtataaggagagacgggaaggaccggctccatccagccctgaggatcccgaagaaagggtggaaacaccctggatgtgctaagctgtggccgggtacactcaagtgttaattttttggagtcaaagcctccctcagtcaaatcgaagaaactgaagcacttgt

SEQ ID NO: 15371 - DNA, 2300 bp, Homo sapien
cgtggtggctcatgcctgtaatcccagcactttgggatgccaaggcgggcggatcacttgaggtcaagagtttgagaccagcctggccaacatggtgaaaccctgtctctactaaaaatacaaaaattagctgggcatggtggcgcatgcctgtaatcctagctactggggaggctgaggcacaagaatcgcttgaacctgggaagcagaggatgcagtgagccaagatcatgacactgtactccagcctgggtgacagagcgagactctgtctcaaaaaaaaaacaaaaaacaaaaaaaccaaattgctgtattttatgttgtgaaatagggtcttgctgtgttgtccaggctggagtgcaggggtacaatcacagctcactgcagccttgacctccagggctcaagtgatcctccgtcctcagttttcaagtagctgggactacaggtatgcaccaccatatgttgcccaggctggtcttgaactcctggagagagatacatataaacacacacacacacacacacacacacacacaccttttttttttttgagacacagtttcactcgtcacccaggctggagtgcaatggcacgatcttggctcactgcaacctctgcctcctgggttcaaactattctcctgcctcggcctcccaagtagctgggattacaggcactgccaccatgcctggctaattttgtatttttagtagagacagggttttgtcatgttggccaggctggtctcaaacttctggcctcaggtgatccacttgcctcggcctcccaaagtgttgggataacaggcgtgagccactgcgccgggcccatacatatgcatttttaaaaacttatttatttatttcgagacagggtctcactctgttgcccaagcaggagtgcagtggtgctatctcccaggctcaagcaatcctcagcctcccgagtagctgggactacaggtgtgtgccaccacacccagataatttttattatttttattttttaaattttttgtagagatggagtttcaccgtgtcacccaggctggatatttttgtatttttgataggcctgtacagtttccaaagttgcaaccttttcccctccctgagagtaggggcagcccctgctctccctctacatcctccacagtcccgaggttttggcctctgtttcctccgtttcctatgcttggaacgccagtggctcttttgttggtctggctgactcctgttcctcttttaaaaatttaagtttggccgggcgtggtggctcatgcttgtaatcccagcactttgggaggccgaggcgggcggatgacctgaggtcatgagttcgagaccagcctggccaacacagtgcaaccccgtctccactaaaaatacgaaaattagccgggtgtggtggcatgcgcctgtaatcccagctacttgggaggctgaggcacgagaattgctggaactggggaggcggaggttgcagtgagctgagatcacaccactgcactccacctgggcaaaagggcaagactcggcctcaaaagaaaataaataaataaataaataaagtcaagggggtaacacctcttcgtaactctcctgttgtttctcatgccagcatcaccatagccttgaggctctgaggtaggtcacttcgtcgagctcgtttccgtgaggataacgttatcttgggtgtctgtgagactgctgcactgagtatagagcccaggctcctgggtcagccgggttcgaatcccctttcctccgtgaagatctgggtcagtcacaagtgcttcagtttcttcgatttgactgagggaggctttgactccaaaaaattaacacttgagtgtacccggccacagcttagcacatccagggtgtttccaccctttcttcgggatcctcagggctggatggagccggtccttcccgtctctccttatactcacgcactagcgctggctggaacaagtcctccaagtagaacgaggagcgggtttcagcggcgctctagcccgccgagagcatacgccctccccacgcggggccgctgattggctgaaggttgcgctggcacgcgcaacttccgggacagaggctgtggctggaaggagctgggcatccggcctgaggcgcagcggtcgcgttagttcggcccaatggcggcaccgctgcttcacacgcgtttgccgggagatgcggccgcttcgtcctctgcagttaagaagctgggcgcgtcgaggactgggtaagattcaggccgcttccttctgcgtatctgggacgaaagc

SEQ ID NO: 15372 - DNA, 2300 bp, Homo sapien
cacacacgggcagtaagatgatatagataaggacatcatcactcggtttcggatgttaaaatgtctaggtgggttaggggtgatttgagatcacacaaccttgtgccacaaagaggaattcccaggccagagggagacattttattgccatgttatgatctcatcattgagttgaaaggcaatcttgtttcattttggattctttcttatgtttatgtcttataagggcactttgaatttccaagcaaataataattttgaattagcttttaatcattgacttctagcacagttatatgatcagaaacatgctgtgtgatttgattgctctcaaatatattgagatttgctggaacaaaataagtcaggttaatttttgtaaatgtaccatgcatgcttaaaatgaatgtatgtacatttgttcctgagatacaggttgatggacggatggctacatggatgtgatggagatggtttactatcgggaccttccgcatcctgctgatgttttgttgcttaggatatgaatggctgagcggaggctgtaaaacctggcactctgcttgggtatgaggttcttcctgccatcctgccatcatttgttttttatgttttgtcaccaaaagtgaccttgaggaaccctgggagctcaggaaggaaggagcgcccagaagcagggacagggagctggttggggtggaccagaaatcaggtttgtgaaggttccagagaggacctggtcttgggaggagcgtgggggactgagatgggggaggggtcattgggatgatgcgggcgctacttggaatgtccattgtgaggcaccaccggggtcatcagggattggtggagagagagtctaaagccccagggttgctaagggagggcccagaccgaagaaggtttggtggaaagcagaacctttgtctccctctaattgctcctaagcctcacgctcccttgccccgcgtgtcctgttgcttccctgatcttctccgtgacctgtagctaaaccttccaccagcgcttgagaacttaatttgaaccggatcctttcccagacccctttcttcttctcctcctcctcctccacctcctccaggtacccaacagcccccttctcctttcccttcccttactccccccttcccctccccttcccctccccttcccctccccctccccaactcagatcccgcccagtccccgtccccttccctcccccctgccctaagccacctccacctctgtcctggccacctccgggcgccctgaaaggaccaggacatgcgggtgcggtggctgctcttttggcttctcttttggctcctgctgggatttatcagccatcagtccacctgtgtgagtagatgggtgctgtggctgctctttcggctcctgctgggatttatcagccatcagtccacctgtgtgagtagacgctggacccgcggggtttcttcctttttactgggctgtgtcacgcggcatgaaattacacagctcaggcctgtaatcccagcactttagggggccgaggtgggcagatcacttgagtccaggagttgaagactagccagggcatcatagcgaaaccccatctctacaaaaaattccaaaaaagattagtcgggcctggtggtgcgtacctgttatcccagttactggagaggctgaggtgggaggatcgcttgggcccaggagctggacgttgcagtgagccgagatggccccgctgcactcttgtctctaacaaacaaaacggaccaaaacaaagtgaaatgtcatttgatttgtgtcatctggtttgatgacttttttgtttgtttgtttgttttttagacagagtctcactctgtcgcccaggctggagtgcagtggcaagatctcggctcactgcaacctccgcttccggggttcaagcaattgtcctgcctcagcctcctgagtagctcagattacaacgcctggctaatttttgtatttttagtagaccaccacgcctggctaatttttgtatttttagtagagactgggtttcaccatgttcgccaggatagtctccatctcttgacctcgtgatccgcctgcctcggcctcccagtgctgggattacaggcgtgagccaccgcgcctggccaaaatatataaccttaagtgtaagtttactaactttggaaagtacatacaccagcataaaccaaccccctttcaagatctacattattttatttatttatttatttatttgagacagtttctcccttgttgctgaggctggagtgcaatgggccaatatc

SEQ ID NO: 15373 - DNA, 2300 bp, Homo sapien
ctctccggctacggagccgtgctgcccccgggtttcaggccacacttcgaggtgggcctggccgtggtggtgcaggaccagctgggagccgctgtggtcgccctcaacaggtgagccaggccgtgggagggcgcccccgagactgccacctgctcaccacccccctctgctcgtaggtctctggccatcaccctcccagagcccaacggcagcgcaatggggctcacagtctggctgcacgggctcaccgctagtgtgctcccggggctgctgcggcaggccgatccccagcacgtcatcgagtactcgctggccctggtcaccgtcctgaacgaggtgagtgcagcctggcaggggacctcacatctgctgcatgcgtgctggggaccaagacctgtacccctgcctggagctttgcggagggcttatcccgggccccagagataaatcccagtgaccctgaagcagcaccccgacgttccgctcccagcagccacacccaccgggccctctccggcgtctgctttccacaatgcagcccccgcccaggagggcccatgtgcttaccctgttttgcccatgaagaaacagctcagtgttgcgggtcaatgcccacatcacacagcatctagcacgtaactgcaccccgggagtcgtgggcatctgctggcctcctgccggtctcctgccctgctgacagcttgctgtgccgcctgcctgccccagtacgagcgggccctggacgtggcggcagagcccaagcacgagcggcagcgccgagcccagatacgcaagaacatcacggagactctggtgtccctgagggtccacactgtggatgacatccagcagatcgctgctgcgctggcccagtgcatggtaggatggccccacatgctcaccccgccccgcatgcctgccagggtactgggttcagccccccagggcagacgggcagcttggccgaggagctgagcctccagcctgggctccttcatgccatggcgttcctcggtctctgacctgcttcagtagcctcagcctttctgctgtcctgtgtgaacgcagggtgcctctcgggggacccagggtgtaaagaggggcccagatgtggggagggactaagaagatgctgttctgtgccttccactctcccctcccctcccccttccctcccctagcccctcccctgccccttccctcccctaacccctcccctccccctccctccccttgcccctcccccctcccctagcccctgccccctcccctcccctccgctagcccttctcctcctcccctcccctagaccttcccctcacttcctcccgctgagcccctccactcctcccccagcccctccctcccctagcccctcccctcccccttcctcccctcccccttcccatccttatccccctcccccaattcccattctcctccccctcccccttccctattaccatcccttttctccatctctctccccttttctccatttcccccccgatcctccccgtccttttgtccattcccctcatctttcttatcccccttatcctccttcccctcccttatccccttatcccccttcccctcccttatccccctgctcctcctcttctcccctttctcttttctctacccttttccttcctttttcctccctctccccatcatccccctcatcttcgtcctcatccccatccccttccccctcccccctccaccactctctctccagcttccccctttcttctgcctgcacctcgctctctgccccctcaggttccccctttctcccagcccccaccctccggctccccctttttgcctgcccccaccctccctctgcctccctgtctctgcactgacctcacgtctgtctgcaggagacctcatccacctggccagctcagacgtgcgggcaccacagcgctcagagctgggagccgagtcaccatcgcggatggtggcgtcccaggcctacaacctgacctctgccctcatgcgcatcctcacgcgctcccgcgtgctcaacgaggagcccctgacactggcgggcgaggagatcgtggcccagggcaagcgctcggacccgcggagcctgctgtgctatggcggcgccccagggcctggctgccacttctccatcccctaggctttcagcagggccccggctaacctcagtgacgtggtgcagctcatctttctggtggactccaatccctttccctttggctatatcagcaactacaccgtctccaccaaggtggcctcgatggcgttccagacacagg

SEQ ID NO: 15374 - DNA, 2300 bp, Homo sapien
acaacagctcaggcaccgtggcagcagtgtccttttcagctgcccacgaaggcctgcttcagccagaggcctgcagcgccttctgcttctccaccggccagggcctcgcagccctctcggagcagggctggtgcctgtgtggggcggcccagccctctagtgcctccttcgcctgcctgtccctctgctccggccccccgccgcctcctgcccccacctgtaggggccccaccctcctccagcacgtcttccctgcctccccaggggcccccctggtggggccccacggacccctggcctccggccagctagcagccttccacatcgctgccccgctccctgtcactgccacacgctgggacttcggagacggctcccccgaggtggatgccgctgggccggctgcctcgcatcgctatgtgctgcctgggcgctatcacgtgacggccgtgctggccctgggggccggctcagccctgctggggacagacgtgcaggtggaagcggcacctgccgccctggagctcgtgtgcccgtcctcggtgcagagtgacgagagcctcgacctcagcatccagaaccgcggtggttcaggcctggaggctgcctacagcatcgtggccctgggcgaggagccggcccgaggtgagtgtctgctgcccactccccttcctccccagggccatccagatggggcagagcctggtacccccgtcttgggcccacactgaccgttgacaccctcattcccaccggtctccagcggtgcacccgctctgcccctcggacacggagatcttctctggcaacgggcactgctaccgcctggtggtggagaaggcggcctggctgcaggcgcaggagcagtgtcgggcctgggccggggccgccctggcaatggtggacagtcccgccgtgcagcgcttcctggtctcccgggtcaccaggtgcctgcccccaccccccgaggggccataggttgggagatctctgaagcagtggggcagagcctgcggctggggagtctcaggaggagggaggtgggagctgggccggccctggtgagcaggtggcgccggccggtggggccgttcctgtcagctctgcagatgcagaggtggacgcgagctgggggcagcctccggacactcctgggcacgccatacgggaggtggcctgcgcggggatccctgccggtgcccacaggccccgtgggtgggtgctgctgtgagcctggggtggtgggccctgctctccaggctctgagcctcagtttccccatctggaaagggggacagtgatggggctcccagcgggctgctgtgagggtgggaggatggaggagtgccctgagccccctggcatcccacacccgcccccaggagcctagacgtgtggatcggcttctcgactgtgcagcgggtggaggtgggcccagcgccgcagggcgaggccttcagcctggagagctgccagaactggctgcccggggagccacacccagccacagccgagcactgcatctggctcgggcccaccagccggggtgcccggcgcgtgtggccctgcccggcgtggacgtgagccggcctcagctggtgctgccgcggctggcgctgcctgtggggcactactgctttgtgtttgtcgtgtcatttggggacacgccactggcacggagcatccaggccaatgtgacggtggcccctgagcgcctggtgcccatcactgagggtggctcataccgcgtgtggtcagacacacaggacctggtgctggatgggagcgagtcctacgaccccaacctggaggatggcgaccagacgccgctcagtttccagtgggcctgtgtggcttcgacacaggtcagtgcgtggcagggccgtcctccatgcccctcacccgtccacacccatgagcccagagaacacccagcttgccaccagggctggcccgtcctcagtgcctggtgggccccgtcccagcatggggagggggtctcccgcgctgtctcctgggccgggctctgctttaaaactggatggggttctcgggccacgtcgccccttgttctcggcctgcagagggaggctggcgggtgtgcgctgaactttgggccccgcgggagcagcacggtcaccattccacgggaacggctggcggctggcgtggagtacaccttcagcctcaccgtgtggaaggccggccgcaaggaggaggccaccaaccagacggtgggtgccgcccgcccctcggccacttgccttggacagcccaacctccctgctcatctactgttt

SEQ ID NO: 15375 - DNA, 2300 bp, Homo sapien
gcacggagaaaaggagaggcaggtgtcagaggcagaggaaaatgggaaattggatatgaaagaaatacacacctacatgtgagttcagaaactgaaccccaccctcttgggaaacgcccattggagtgttgtttttaacctttgtacaatgtttagacccagtaaatgcagaaatagaaacaaatggtcagaagacatatcgtgagagagagagagagttcacaaaacagaaaacaaagtaccttaatatttaccagtgaccaaaagatgtgaagtagcaaaacggctcctgaccccattgccagctagactgtgtggaaactcggttcataccagccattctaggggtggggtgagttgttgtcatccttaggaaagtgtgttgttgtaggatcaaccacatccttcaaaaggactatgcctgtttataagcccagctgtttctgccctgtgaaacacggtaaagatattaatacaaagagaatacagctttatgataaaagatgctcaatgaaggatgaattagggatatactgagaatggggaaggaagctatcatctcagaagtcagcaggcagtaagcaagaggaggaatcaatacagcaacagtttggatcagactgtacagttttttttgtttttgtttttgtttttgtttttctgagatggagtctcgctgtgtcacccaggctggagtgcaatgacgtgatcttggctcattgcaacctctgcctcccaggttcaaatgattcccctgcctcagcctcccgagtagctgggattacaggtgcctgccaccacccccgcctaattttttgtatttttagtagagacggggtttcaccgtattagccaggatggtctcaatctcctgacctcgtgatccatccgcctcgccctcccagagtgctgggattacaggcgtcagccaccgtgaccggctcagactgtactcttacagccatctgaaatacgttttctaggtagagatagattgtgtaagggtacagttgtgaggataacagaaacatggcagattatttaaaatcatcctgaaagtggtgctttatctgatgaaagtgattgtaatccatagggaaatgtttcaacgtgcgcaagcgttgcggcggcgggcagaggactactacagatgcaaagtaaggagcttcctccccgcagttgcaggatagttcagtgctgatgcagatgatgccacggcccttagactctctcaacattcaatttctcatgtgttggctttttcagatcaccccttctgcaagaaagcctctttgcaaccgggtaagtttgcttgttttccttgcttttggacatagtctgccaggtcaggacatggatacatttttctccctacggctctgtgctcaagccctgcagagggagatggcagagaggaaggctgcctacaagcatcacagtcccatccctgttggtaaccgtgttgcgcaaaaacaccttcatccccacccagtggggcccccatctaatattctaagtgtcagaggttccatatttgtaatagcaaatgggccctgactgtaaattagtgaagagtgaatgtaacttattacccacagggacaattccaaatgaaggccttaaatgatgctcagctaagctggttcttgtgtggcctctgtaccttcaaaagctgccgagtcctatgattacacgcgatgggacttctacacttgaagtgaaacacagttttaaaacttgctttgtttagaattcccacctcatttttccatggacaaaagtattctttaggtcctagtgcacttacaatttggtattacctgggagtgaaaagaaatattacagccatgcctaactgacttcttgaggtaagattgttctgtcagaaaaccctctcccagttcccctgcagctcttcaggaatccacatctctccagagctctttgttctcatgggtggcacctccagagtgaagaagatcctttgtcaagaagggaaacagaggggaaatgagagggtcctgcaggcagagctggaatcaacttccactctgcctcttgcaagctgtgtgaccctgggcacaatttctccttcctctggaaacctctgttttcttagatttggagcagggtggtcacactgaccttgcagagttctgagaatcagagacagaacataaaaggcctggaaaacattctccaaaaagaagctgcaacatgtgtggacaatgggcttttcatgcctctcttactgtctcttactgtctattgacctggtgcaagaaacatgctctggtgat

SEQ ID NO: 15376 - DNA, 2300 bp, Homo sapien
gccgagatcacgccattgcactccagactgtacgacagagcgagactctgtcaaaaaaaaaaaaaaattatcctgcaaaatttgaaaaggaaattcaaatcaacagcttctaaactactttttaacatgactcataataagaaatacattctacagtacatatatatgttctataattttgaataaaagaattaaccacatcacatttattttacaacatgtaatacatattttttattctccttcatttgttttgaatgctctgtgcagtctacaaaaagtccagtagtaataattaaattattcattaagttgaacattatcttgtcttttaaaatgataatctcaaaaatgatcttttatttttgagatttatagagatacacacacacacacacacacacacacagacacacacacacacatatatatatattttttatttttttttgagacagagtttcactctgtcccccaggctggagtgcaatggcacaatctcggctcactgcaacctccgtctcccgggttcaagcaattcctctgcctcagcctctgagtagctgggactacaggtatgcgccaccatgcccagctaatttttgtattcttagtagagatggggtttcaccatattggccaggctcgtgtcaacccctaacctcgtgatccgcctgcctcagcctcccaaagtgctgggattacaggcgtgagccaccatgcccagccaaatctagggctggaacatggctgcagcatataaaaagaattgaattccatacttttgttaaccctgttttttgtttgtttgtagttgttgctgtttttgagacagagtctcgctctgtcgcctaggctggagtgcagtggtgcaatctcggctcactgcagactctgcctcccgggttcaaactattctcctgcctcagcctcccaagtaggtgggactacaggtgcccaccaccacacccggctaatttttgtattttattagagacagggtttcaccatattggccaggctggtctggaactcctgaccttgtgatccgcccacctcggcctcccaaagtggtgggattacaggtgtgagccaccacacccagcccctgttttcttttgttttgcttgcttcttagggttgtttttctatttatggtaaaggcattggctttccatttgtagcatcaatagaatatttcctgtttacaataaccttatgtcatagtaaatggtaaagggatttaaagcagtgcttttcagctgccagaggcctgagagagtttgggcacactctgtgtgatcgggcagaaggcctgtgggaagtttagctgaggacagggccaggaaaggtgatggacagtgggggtctgtcctggtcaccaggcccctgggtcctgcccacctgcttggagctccccacccatcacacatgatgctgccaagccctctgggtattgtgggcaaataccttaggagagaagctgatgagctttgtttcttgaaatgcacagattccttggacatccctgagaggccagtcatgaaagtcagcttggttttctccccctcatttgggttcagaatttaaagtccacacacacgggcagtaagataatatagataaggacatcatcactcggtttcggatgttaaaatgtctaggtgggttaggggtgatttgagatcacgcaaccttgtgccacaaagaggaattcccaggccagagggagacattttattgccatgttatgatctcatcattgagttgaaaggcaatcttgtttcattttggattctttcttatgtttatgtcttataagggcactttgaatttccaagcaaataataattttgaattagcttttaatcattgacttctagcacagttttatgatcagaaacatgctgtgtgatttgattgctctcaaatatattgagatttgctggaacaaaataagtcaggttaatttttgtaaatgtaccatgcatgcttaaaatgaatgtatgtacatttgttcctgagatacaggttgatggacggatggctacatggttgtgatggagatggtttactatcgggaccttccgcatcctgctgatgttttgttgcttaggatatgaatggctgagcggaggctgtaaaacctggcactctgcttgggtatgaggttcttcctgccatcctgccatcatttgttttttatgttttgtcgccaaaagtgaccttgaggaaccctgggagctcaggaaggaaggagcgcccagaagcagggacagggagctggttggggaggacca

SEQ ID NO: 15377 - DNA, 2300 bp, Homo sapien
ctttatttcctagttatacgatcctgggtaaggagctcaacttttctctgccaaaattaaatgaggattaaatgagatcatatatgtgaagttgtgaaagacagtacctggcacatagcaggatcaatcaatgttagtatctctaaaatagagattgagtctgaagatccacaaagtggtagaaccgatcttaagattcccaaataatagaattgtgctttatttgcctaagtagtatggtattacttattgtatgcccaggggatcttttttttttaaataatatttatttatttattttgagacagagtctcactctgtcccccaagctggagtgcagtggcaccattttggctcactgcaacctctacctacccagttcaagcaattctcctgcctcagcctccggagtagctgggattacaggtgcacaccaccatgcccggctgatttttgtatatttagtagagacagggttttgccatgttggccagattggtcttaaactcctgacctcaggtgatccagctccctcagcctgccacagtgctgggattacaggtgtaagccaccgcacccagacctaatgttttattttttggtagagatgaggtcttactatgtggcccaggctggtcttgaattcctggacctaagtgatcctcccaccttgacctcccaaattgttgggattacaggcatgagccaccgcgcccagttcccttcttaaatagttttaagggggagaagaaagaaaaagactgattttcttcccttccactaccaaaacaggcaaaacacaccagaacactttgcttagcatttcttttcttttctttttttgagaaagagtctccctctgtcagccagggtggagtgcagtggggcgatcttggctcacttcaagctccacctcctgggttcaggccattctcctgcctcagcctcccgagtagctgggactacaggtgcccgccaccacgcccggctaattttttgtatttttagtagagacgggatttcaccgtgttagccaggatggtctggatctcctgacctcgtgatccgcccgccttggcctcccaaagtgctggtattacaggcgtgagccaccgtgcctggccgtcccatcattttttaagataaattcacataccataaaacttaccattttattttctctctcttttctctttcttcctttctttctttcttttttttttttttttttgcaggctggagtgcagtggccctatcgtggctcactgcaaccttgaattcctgggctcaagagatcctcccacctcagcctcccgagtagcagtagctgagactatcagtgcgcaccaccaagcctgagtaattacaatacttttttctttttccttttcttgattttccgtagagatggggtcttcctattttgtccaggctgatctggaactcctgccctcaaaggatcctcctgtctaattctcccaaagtgctgggattacaggcatgtgccaccgcgcctggccaaatgcaccccctttttttaagtgtacaattcaatggtttttaatagattcacaaagtcatggaaccatcacacctatctaatttcaaaatgttttcatcactccaaaaaataaccccatatgggaggccgaggcgggcaggtcactcgagaccagcctggccaacatattgaaaccccgtctccactaaagatacaaaaattagtcgggcgtgatggcgcacgcgtgtagtcccagctgctcgggaggctgaggcaggagaatcgcttgaacccgggaggcggaggttgcagtgagcccagatcgccccactgcactccagcctgggcgacagagcgagactccgtctcaaaaatatctaattaattaataaaaataaaataaataaataaataaccccatgccttctgcctctgtggctttgcctgttctcggtattttgtgtcaatggacccatgcatgggggtgggccgggcacctttcaaacgttcagcccccaggacggcccgtggcctccggattggacggcgcgagctgggtgtgtgtgggtcgctcaatcgctccggagcttctggagggggcagatgcaggtgccggctgctgcagtgcagtagctgctggaggctggggaggcccggacccggtgcaggaagacgccgaccacgcgggctcctgatcgcgggcgcccacagcgcggacatggcgggctggtggccggcgttgtcgcgcgcggcccggcgccacccgtggcccaccaacgtgctgctttacggctcgctc

SEQ ID NO: 15378 - DNA, 2300 bp, Homo sapien
cctcagactaaccgcccgcctcagcctcccaaagtgctgggattacaggcgtgagccactgtgcctggcctggtacaactaattttaaaagcaggttgacactctagtccaactggcagatgtgcataccccatgccattgtaatttttccccctagaaaaactcctattcagtcgtacagggaaatgagtataaaaacatttgctgctgccatgtttgtaattgtggacaattgggaataatctttatacctcatcaatgaaaaaatagaccaattatggttcattcatgtagaatactatacagtagactatgaaccagagttacatgaatcagaattcgtatttctcaaaagcataatgtgggccgggcacggtggctcacgcctgtaatcctagcactttggcaggctgaggcaggtggatcacttgagcccaggaattcaagaccagcctgagcaacacagtgaaaacctgtctctatctttttaaaaggaagaaaagcatattgtggaacaacaacagaaaaaagcaacttgcagaattataaagtatgatatcatttgtataaattataagaaaatgttaaatagcgctattatatataatttgtagagttatacatatatacctgagaacaataaacattacattcatgcagccaggcacagtggctcattcctgtagtctcagcactttgggagaccaaggcgggcagatcacttgagctcaggagttcgagaccagcctggccaacatggtgaaaccacatctccattaaaaatacaaaaaattagctgggcatggtggcacgcctgtagtcgcagctactcaggagcttgaacccaggaggtggaggtttcagtgagccgagactatgccactgcactccagcctgggtgacagagagaaaaaaacagttgtaccaatttatactcccactagcattagataaaagttcaaattatgccaggcatggtgtctcacatctgtaaccccagcatttttggactctgtctcaaaaaaaaaatccacatcttttacaacacatgattgttagattttttagtttttgcctatcggatgatatattcttatttacattttcattttccttattactaagggggttgagcagcttctcacattaggccttcctcctctgcccacatgacatgactattcatattctttccctgtttcctactgggatatcattttctttttttcgtttcttttctttttttgagacggagttttcctcttgttgcccaggctggagtgcaatggcatgatctcggatgactgaaacctctgcctcccaggttcaagcgattctcctgcctcagcctcccgagtagctggaattacaggcctgcgccatcacagctggctaatttttgtattttcagtaaagatggggtttcaccatgttggccaggctagtctcaaactcctggcctcaagtgatccacccacctcggcctcccaaagtgctgggattacaggcatgagccatcgtgcccaggcactgccatggtgttttttgtttgtttgtttgtttgtttttaaagataaacctctggggtttctggaaagtaaagccccatgctccaaacagctctgctatacctgtgtgcaaaatattttcatctctctctctctctccccaaagtgcatgcaaacacatatggaactgacataggcatccactgtcgcacttcaaattaaacagacgcacacgacagatattctcacagaaaagcagtcagccaagcccagaacccatagatctaggtccacactcacgcctctgcatgctccccagaaagacggatgcatcgcccgcaggtagagacgggctcaccaatcccactcaaaacccgctgccggcttacagctcgcaagccgcccacagtgccagccccatgccaagcatcactaggggctctagaataggcaggggccttgttctcacttcctttgtgttgcttttattttagttgttttgtttgttgtttttcttagagttatcacctgcccctctgtctccctacccagcccccaagcctcccctccaagcctccactgcgcatgtgccgtgcatccctgccccttctgggtacccgtaggcgctcccgggcgctggcggcggcggaggagagggagcagcgtcacgggcgcccggcccgttaaaacgctgctggctggagccacctccctccctgcagcccgcaacgggaatggagtaaagggagacccgtcgacctggccacggggatcagcgatggaattaaagca

SEQ ID NO: 15379 - DNA, 2300 bp, Homo sapien
ctcccaacagactacactgcctgagagagctgaagtcaggcattcattctgcaggggattctgggtcacagctgagccagtcctattaggatttagggggcagccgacctgtggggcctgcaccgcacacactccttctaagggtttcctcacagtccctgctgaaggggagggtctcgtgtgacctgtggctccacccaggttgaacgtgctgaggccctgaccaaaggcagggccacccataggctgccaggggctggaggtgggacgagagggtccatcagaagtcctttcatgagagcagttaagagggaagcagaagagtcctgaaatggagaaacacctcagggagacagaatctttgaggaaggggaaggtatcagggagaaaagaaagaaggagatgaatggagggtcccaggatggtgaacaatgacttgggacttgggagcacttgaaatgtggccattccaaattgagatctgttcttcctttatttagttttgagacggagtctcactctgtcacccaaactgtagtgcagtggcgcagtctcggctcactgcaacctccatcccccaggttcacgtgatccttgtgcctcagcctcccaagtagctgggatgacaggcacgtgccaccagacgtggctattttctgtatttttagtagagatggggtttcaccatgttgtccaggctggtgtcgatctcctgacctcaagtgatccacctgcctcggcctcccaaagtgctgggattacaggcgtgagccaccgtgcctggcctgaattgagatctatttaaagggtaaaatatacatactggacttaagacttccatactccctccaaaaaggatataaaacatctcattcgtatctttaatatattgattacattttgaactgataatcctttagatctattggattaaataaaatatgttagtgaaattaatctcgcccatttctttttatctttttttttatttttaagagacagggtctcgttgctatgttgcctaggttggacttaaactcctgggctcaagtgatccccctgcctcagcctccagagtagctgagactacaggcatgtgcctccgcacccagctctttttacttttttttttttttttttttttttgagatggagtccgttctgtcacccaggctggagtgcagtgactcgatcttggctcactgcaacctccgcctcccaggttcaagcgattctcctgcctcaaccttctgagtagctacgattatagtcacctgccaccatgcccagttaattttttttgtttgttgttcttgttgttcttgttgagacagagtctccctctgttgcccaggctggagtgcagtggcacgatctcggctcactgcaacctccgcctccccagttcaagcaattctcctgcctcagcgtcctgaatagctgggattacaggcacacaccaccacacctggctaatttttgtatttttaggaagacgggctttcgccatgttggccaggctggtcttgaactcctgacctcaggtgatccaccgcctcggactcccaaaatgctaggattacaggcgtgagtgagccaccgtgctctgccacggctaatttttatatttttagtagagatggggtttcaccatgttggccaggctggtcttgagctcctgaccttaagtgatatgcccaccacccttggcctctcaaagtgctgggattacaggcatgtgcctccacacccagccttttttattttttagaatgtggttcctggaatgttcaaaattacatatgtggctagtgttctatttcaattggaccgcactgatctatacattctctcttttatgacccccgatttacagataaggaaactgagtctcaaagaggttagggcatttgccgaggtcggccgttagaaagatgccggaccatctactcatgtctgcttgacgccaatgcctgcgtcttcacgtgctgttggtgcgtcctcctgaattacttttgtgtcctttgacacgtcagatgtggctggggaaacagaaactcgcagaagttaaaaaaatgtgcttgaggtgccactggagaataacaatcatagccaggatgtgaagcctgtcagtttcctcagccgcaaattcttccatgtggggcgacctcacagagacgggatgtatgggacggcggagtgcaaagaaaggtatgatcgctcttgggggcccagtggcatcctctccacgaggcaggctgggagaaatcgagcagccaggagcttctgggttaaaagca

SEQ ID NO: 15380 - DNA, 2300 bp, Homo sapien
cctggcactggggtgtgtttgtcccgttctaggatgaaagcctggtctcctgatcctggctctggggtgtgtttgtcccattccaggatggatttcgctactgttttatctttctgaatgagatggtttatgtggtggcttgaagagagagatgagtaaggtgagggcagaaaggaaggttggccagccagtcccccaggcagcctttcaagaatggcgctccaagattgagagaatcttaagagaatactgcatgcaattctcgggcgacagatataaaaacctagagtaaataaatgaaatcctggaaaaaataagttaccaaaattcactcaagaagttaaaaattagaccaattaccataaaagagactataaaagatcactgaaatataccagtgaaaaaggcatcaggaccaagtgagataacaattgaatttcaaccaaccctaaaagaacagataaatctaccttttaaaaaaccattctggggcccggcaaggtggtacacgtctataatcccagctactaagaaggctgaggctagagaatcacttgagcccaggagtttgaggccagcctgggcaacatagcaagaacccatccccaagaaaaaaaatactgttctaggctgctgaaaaagaaaaaaggaaagcttaccatttatttttacgaagccaaaataaatttaataccaaaaacataagatagtcccttaaaatgatcctaaataagatattaacaaatgagctccagcaatttaaaagaatgatatgccattatcatctaactgtgggacacatcattaaataatgaaaggatatacatccagcattttctaaactctgttaatatctatcctaagaacaccagttctggacaggtgttaatgcatatttcaggacaaaggactttccctgtccagctaagattgggaatatcctttctcttggcgattccatagcatgttaaacactttgaaaaggtttgtggtaaagaaatctgcttccttaccctgcatacacaagggttttgtgtttgtttcttgttgcttttgatgtgtttttaaagaatgctagtgtcatcctcttatcacagtgtttcttggaaaactggtttggaggtgcagtttaatggccccagtgttcactgtgtgtaccgtgatttgccaacacagtttgcctcccccgatttcttccctactcacacactgtctcttcagaccgctgcagccttcgacttgcaaatagaactgaagtttgctggaggctatagccttctcttggaggaaatccttgaatatatccctcctccttttctttctcctcttccttctttccttcctcctcctcctttcttcttctttgtcttttttgtcatcttcatcttcttcatctttgtctttgtccaattcgtcgtcttcgtcttctttatcgtcgtcttcgtcttcttcatcgtcgtcttcgtcttgtcttcgtcttcttgttctttgtcttcatctttgtcgtctttatcttcgtttttgtctcgtcgtctttgtcttcatcttctttgttgttgtcttctttatctttgtcgtctccttcttcttcgtcatctttgtctccttcttcatcttcatcttctcatcttcgttgccttctttttcttctttgtcttcgtcttcaactctgggccttttccctcagtgggaggccttcactttccacggggcagggccagtcactaatatttctaatgctgcgttttctttttaaccaggttttcactaatgataagatggaagaatgtgtgaagctcacaagtctgtatttgtttgcaaagaatgtgcggtctttacttcatacttaccactaccagcagattttccttcatgagttttccatggcctataccaagtatgtcggagaaactctgcagcccaagacctacggccacagcagcgtggaggagctcttgggagcaattccacaggtgggcatttttctcagcttccgggagagcatcttctgaacagccacaggctaactgtcctgaacagaaaaataaaatgctgccagaataatggaacggcaggcattttgaattgatcctttcaaaacatactgttggtctaaagtaaatgattttagcatttctccttgattctttctgtaaacctttattaaatccctatatgccaggtgagtaagtttcaggctgtaactctagaaaggtgttggttaatgggagagtcaagacccccaagcaggcaactagtcagggcggtcagggcagtgggcgcgctgaggagggccgtgt

SEQ ID NO: 15381 - DNA, 2300 bp, Homo sapien
gttttttgggggacataaaacctgtatctaataggaaagacaagaatcgtaatttactatcagtggtagcagttaaatccatctccaaattaaccactcccaatagtgtgtagtaggtaatgtttactttgtatttacagagtagggagcattttggttggcacaagagatacagtggtgaaaatagacagtggggttcatttatctaattttttttttctctgtaatgcagtggcggggagaaattagccacattttgcataggaggaaacagaaacttgaaaacaaaaatttttttagagatggaatctcactctgttgcccacgctgaagggccagtggcacaatatagttcactgtagcctcaaattcttgggctcaagagatcctcctacctcagtctctctagtagctgggactaggcgcatgctgccacactatgctaattttttgaactttattttattttagagctgtgatcttgctatattgcccaggctgacaaaagagccacgtagtaaatataggctttgtgggccatacagtctctttgcagagactctctttgcaactctgcaattggaatgcaaaagcagtcataggcagtatttaagtgaatgagtgtgtctgtgtcccaattaaactttatttatggacactgacattttaatttcatgtaattttgtttgttggtttttgagacagggtctcactccgtcgcccaggctgcagtgcagtggtgcaatcacagctcactgcagccttgactacgcagtcttaggtgattcttccaccatagcctcctgagtagatggggctacaggcatgcaccaccacgctcagctaattttttgtagccatggggttttgccatgttgcccaggctggttgggaactcctgggctcaagcaatccacccaccttggcctcccaaagtgctgggattgcaggcctgagccacggtgcctcgcttgcatttattgttaagacctgtaagagtgttgttgctctggcgtagatataacacatctgcgacttgagatttttctatcagttagatttttggtggtatatcagattgcactttcatcattagtaaactaagaaattggttcaatttgttctgtagcaaatcaaattcaaagtccacagaggccacttagtttggacttttcatgctcagatcaagaaaccagtgcaagaagttgctcttaagtcaattttaaaatcttacatatagttgtcaatgaggatgtggtggtggctcttttactcagattagatgctctcttctgttaacttttgactttcctgagcagcatctttagggagagagagccgaaaagaattcagaaaaactgtagaaaaaattgattccagccaagtgaggaggtgaagtctcactctggaatatgcaagtttccaagatatggctacctctctcaaacatggttacatgtggaaaggaaacaagactcatggagagttcattttttatttgaagagctatgaaacatgaagaatggcagattatagattttttaagaaatcaggttgttgcagttagattttaagcataaacagtcaaccaagtttaccaaattttattaacccgtaatatgctctgatattttgtgtttttttctttctttattttattattattattttgtttgttaagatttgaattgttggccgggcgcagtggctaatgcctgtaatcccagcactttgggaggccgaggagggtggatcacttgaggtcaggagttcaagaccagcctggccaacttggtgaaaccccatctctactaaaaatataaaaattagccaggcatagtgacaggctcctgtagtcccagctactctggaggctgaggcagaaaaatcgcttgaacccgggagacggaggttgcagtgagctgagatcgtaccactgcatgccagcctgggcgacagagcgagacttcctcttgaaacaaagatttgaattgttgagagccataggactgtaaatatagctgtggtttcacattttagtatgttgtaaaatttgtacttatgcaaggaaataacactgaaatcttactcattcttaacagggtggaagaatgaaagaaaagaaagatgaaaggatgttgaatcactttgcatggctgtatgatggaaggaaacggaactgagaactcctgcagtagaacacgtggatggcttcaacaagataatgatgctaagccatggctttggaaattctctaattgcttttctcgtcctgagcagacgctgccacatagtcccca

SEQ ID NO: 15382 - DNA, 2300 bp, Homo sapien
ttacagagaaaaaaaaaattagataaatgaaccccactgtctattttcaccactgtatctcttgtgccaaccaaaatgctccctactctgtaaatacaaagtaaacattacctactacacactattgggagtggttaatttggagatggatttaactgctaccactgatagtaaattacgattcttgtctttcctattagatacaggttttatgtcccccaaaaaactcctctcaaaatcgtaagaatctgtgatattcacagtgttcataacttaaacattctctcaaacttcttcaaagccaaatcctgaaagtgagctaacattcacagtataatctagtttataaagtattttcacttaacattacttatgtcttcattcagcaaatatttacttagtatctactatgcagcaggcctgtgcttggcacaaggaatataatgatgaaaaaaacccagacggtgggatcctcttatataatttttgcaataatcctgtgaaatagacaggggagaaattagctacatttttgcagagagagaaaaagaaacttaatgaagttttgtagcgagcctgacacaagattaggcttgttcacccctttccactacatcaaggtgccttcaatactgctcaatacaagcgattaaaagtaaaaactttcaggtgcctgcaccctgaaaacttcccaaataccatccacgaagcaacttaggtagccaaaagcaggttctgtttgacttgagcgacagtctcctttctgtcactctcttcaagtcttttgaccaattcaatgaggagagcataggctctgtcgactgtctgcattttggtctccaatttgactgcggtgcagctttggacaactcacaacctctctgaacctcagatcccatctctaaaatgggtgtgataataatagaaaccaccttacaaggccgttgtttggattacatgaggtaatccacggggaacatttagcaaatgttgtttccttagcacccaatctagtctttgaccccacaccaccccatcccattaccgttttctcccccatagctcttctgtccaaaacggcctttttagcttattttattatctttctcccccattaggctataaactccatgacagcagagactatgttttcttatccactattccaactcctgtccttagtacaatgcctggcatattttaataaataactgttgaacgaataaagcttaataaataggaaaacagtttaggtttcaatacaccgatatgcaaaagagaagaatatttaccgctcagagaagtccaaaagacacaaatgcaattggacagctcttggtaataccggaaaggtgcttgagaaactctaaaaggtgtatcacgaggtcgcgttacaactactagtgagagtggctgaagccctagacattgtcaaccctgagactacaccctatgtgttgctaaaaggccgaggagaatgcaaaacggccggggaggggggagtgtgttgcaaaaacacccgcccctttccttctctcttaaccttccagctgtgcacttcactcctggagggccccaccaggggtcagacaggggcgggcggggagccaaatgccctcgaaggggaacagcggcgccaacagtgacagtagtgaatggacccgaaagggagacaagccaactctttcgtggggggcccaactggcgcgtcccagttagctaacctcccctctccaccaccatcccaccagcaataggcggggaaagaggggacactgtcctccgtcccgccccgctggcctcggagcagagcctgccggggtctggtcgcaggactgtctgcaaactcacctctgccgccggctccacctccgctcacattccggccccgccgccttccccccgccccccccaggccctttgttttgattcccgactccgcagctcccgccgccgccgccaagcgcacccttcacttccgcttccgcaccgcaccgcccctgtcgcaaaaccgacgcccttctctcctcttcgccccgccccttcctcgccccgcctccgccgccgcgtcctgtccgcgcggggcatgctgggaaccccggggggggcggggcctcgcggccctgcagcctcgtcaggctcagtcccctcccgataaacccctaaatagggactttcccggggggtgaccctggcttttttggcgaaaacccccagtttaaggaggccttccccctggcttcacgttgtggagtcgaaaggaaccttgaagcggagaatgagctcgtgacgtggacccg

SEQ ID NO: 15383 - DNA, 2300 bp, Homo sapien
tgtctgcttggtaaaaaggaatctaaaagaaaaatatacatataaagaaaatgtggtcaagctcgttggctcagccctgtaatcctaaagaggccgaggcgggaggatcacttgaggctaggagttcgagaccagcctggccaacatggcaatatcccgtctctactaaaaacacaaaaattagccaggcatggtggtgggcgcctgtaatcctagctactcaggaggctgaggcatgagaatcggttgaacccgggaggtggaggctgcagtgagccaagatcctgccactgcactccagcctgggcaatgaagcaagactttgtctcaaaaaaaaaaaaaaaaaaagtaaaaaggaaatgtgtctgcattctttgatgttttctggctaaaaactattttttaaaaaaagcaattagaaacctacaattaccttgtttcttaagatttttagttaatatggcttgtgttgaaacatactcaactgaaataaaatggggaaaaaacacctctgaagagtagcgtatttgtttggtactttgaaaaaagccaaaacgctagaaacgggtttttcatctattctaatctccacttggaaaatactacctatacacagacataatgaagatttttttctttttctttcttttctaaatagtgatagggtttcaccgtttcccagtctagtctcaaatttgtaggctcaagagatcctccctccgtagcctctcaaagtattgggaatacaggcctgagccactgcgcccagcccacagtcaagatttagtcagcagtaataaatacctacgcagggagaggatgtgtgcttgtcatctgccttctggaaaattaaatacaggcacaaaggattcttcagctacatgtctgatcctgccctccacaatacccgtctacagggatgtttacagggatgtgttaatccccacgtaatggggattgcctattgaaataacctcccagtaaggatttttttgggcaaaatattctcgtttggcaatttcgacttactgattcttttgcaaagtcaacttgtttctgggcaaactttaaaaataaactcctaaggtagcatttagctagcagctagcacatcctaaatcgtgtctagatttaacttacacaatatgtgctttgcttttttcctaatttgcaacagaaaatagtaatcagctggtagtttcagaaatcacccttttgctgagtcttaaatttttttttattccagggaaacgtgaagattgtggggcgctatttttttttttaaagcaaaccacacagcatatctggccacctaaaacacaaagtgtttgaaactaaccgtaagatttcctttctgctcgcccaacctgtcactggaaacgcagtattcatttgtaaccagctttggagcagggcttttaaaaataacgttttcttgctaaagtccccaaaaatctcttgattcttggtggcaatgtccagttgagtctttgcacacactgtatttttgccaactgggtcgcaactttgcgagaactccgggggacctcgtaggaagccaggttggcagttatttttttctccacttgccactaggttgcactagatttaggatgctggggaatatgcgccatttaatttttaaaaataaagtaggaccatcacgtgacgagacccgagagaggaaaaaaaaaaagccgaagggacagggtttttcattgaaatcccgttcaaatcgccttccctccaaagcctgaaagagctgaattctattaaatcctggttggcaggttttttcctcgggtccacgtcacgagctcattctccgcttcaaggttcctttcgactccacaacgtgaagccagggggaaggcctccttaaactgggggttttcgccaaaaaagccagggtcaccccccgggaaagtccctatttaggggtttatcgggaggggactgagcctgacgaggctgcagggccgcgaggccccgccccccccggggttcccagcatgccccgcgcggacaggacgcggcggcggaggcggggcgaggaaggggcggggcgaagaggagagaagggcgtcggttttgcgacaggggcggtgcggtgcggaagcggaagtgaagggtgcgcttggcggcggcggcgggagctgcggagtcgggaatcaaaacaaagggcctggggggggcggggggaaggcggcggggccggaatgtgagcggaggtggagccggcggcagaggtgagtttgcagacagtcctgcgaccagaccccggcaggctctgctccgag

SEQ ID NO: 15384 - DNA, 2300 bp, Homo sapien
acaggcatgcaatgcatcataatcacatcagggtaaatgggtgtccatgacctcaagcatttatcctttctttgtgttacaagcactccaattatactcctttagttattttaaaatgtacaatacattgttgtggactgtagtcaccctgctgtgctcccaaatactagatcttattcattctaactctatttttgtacccactaaccagaatgttcggtatttgttaatgaacatgttatgacaggatgttttagaagaaaataaagaaaaaaagaaattccagccaagcatggtggcttgattttatttatttatttattttgagatgaagtctccctctgtctcccaggctggaatgcagtggcgtgatctccactcaccgcaacctctgccttctgagttacatggctcacgcctgtaatcccagcactttgggagactgaggtgtattgcttgaggtcaggagttcgagaccagcctggccaacacagtgaaaccgtgtctctactaaaaatacaaaaaattagctgggcgtaatggtgggcgcctgtaatcccagctactagggagactaagacaagaaaatcgcttgaatctgggaggcagaggttgcagtgagccgagatcgcaccattgcacgccagcctgggcaacaagagggaaactctgtctcgaaaagaaaaaaattattttttaattttaatttgttagtgaacaattagggttgctgtgagaattgtgcctggcacacacagccatttaaaaatcacgatcttcaggcagtgtgtggtggctcacgcctgtaatcccaggactttgggaggccgaggtgggtggatcacctgaggacagggattcgagagcagcctggccaacatggtgaaaccccgtctctactaaaaatataaaaattagccgggtgtggtgatgcgggcctgtgatcccagctactcgggaggctgaagcaggagaattgcttgaactcagaaggcagaggttgcagtgagtggagatcacgccactgcattccagcctgggagacagagggagatttcatctcaaaataaataaataaacaaaatcaagatcatttaacaaatacatatattgtacttactaagttcaaatttctgttctaaacgtttttacaaatgctgttaagtcatttagtcctctgcataatgtcgtttgtttgtttgtctgttctttaagacggagtcttgccctgtcgcctaggctagagtgcagtggtgtgatctcggctcactgcaaccgccacctcccggtttcccgtgattctcctgcctcagcctcctgagtagctgggattacaggtgcgtgccaccacatccggctaattttttgtatctttagtagagacggggtttcaccatgtgccaggctggtcttgaactcctgacctcgtgatccacccgccttggcctcccaaagtgctgggattacaggcgtgaccaccgcgccagacccataatggcgttttatagatggggaaacggagtcatagaggctaaacaactttcccaagaccacacagttagtaaggggcaggactaggactcaaagccaagtttatgaccaaattctggtgcactacgttctcctgcttctggagaagataatgatgctgaagattctacttttggtgtaaaggagtaggaagggcacggggcactgctagcttcagtgggcctgaatctttgtctttccttctgatttggagaaagtgcaagaatgggaaaatgcaatcgaagtgaaggagaggccggcgtattttcctgaaatgcgcggcccgcaagcccaaacccgtttcccgggtgtccaggcagcgttctgcagcatctccaatgcccgccagcccgccgcagcccagcgcccggcagccggcgcctctcaaaccccctccggccaggagccttcgccgcttggccgcgccgcgcccggcctgggaaaaaagtttccaaacgacgctgctctgcgctgattggccgaggcggacgcggtaccgtagagcagcagccaatgggaggcgccgaccgcaggctccggggcgggggcggggtccggagggccggggccgcaccgcccttcgcagccgcctctgccgccgccgccgcgttggcctcgccgcccctgctcgggtaagtgaggcgctgcgcggggctggggtcggggtggctgtccggggacctccaccgcggctgaaaagctcctctgccccgccccaggatcccgggaccccgggccaccgcctggcagggacccctacgcccctcgct

SEQ ID NO: 15385 - DNA, 2300 bp, Homo sapien
ccagggtgtcgaggttgcagggaaattcagaaatgccactgaagggccaggcatggtgtccaacacctacaatcccagcactttgggaggcagaagcaggtgcatcacctgaagtcgggagttcgagaccagcgtggccaacatggtggaatgctgtctctactaaaaatacaaaaattagcaggatgtggtggtgcgtgcctgtaatcccagctacttgggaggctgagacagaagaatcatttgaaccccggaggcagaggttgcactccgcctgggtgacaagagtggaactccatcttaaaaaaaaaaaaaaaaaaggcactgaagctggtccccagttccctagcattccagaagcaaaatagattttgaccaaataaggagtttgttaaaatttccgattcagtcggagtttgtgttagggtacagtatgaggtacgaatctaataattttttcctggtgggtacccagtggtccctaaaactagaactgaacctgccatctttttaccaatgatctgtgatgccacctttattataaattaaactcttgtctatttctggacctttggttcctttgttcttacaaccagtagcatactattcttcattgttgaggctttatagtagtgcgttctgactctctggtagagctagttccctgatctcttttacagagttcctctgatcattcttgtttcattgtcacaggatctttcaaatcagtccagtttattcccccagtagaaacgtattaagacagtgttaaatttatcagtttaacttgtggagaattaatttctgcatgataatgggtcttcctctttatatactcagtatgtctgcatttctgcaagcattctgtactactctacatattattatgtgaatattttatctttgatatgtcaaccttagggctgttttaactgtttctggtattgtactccgaagtattatccctttgttgttggtagtagtgtgttttttgtttttgtttttcgagacagggtctggcattgttacccaggctggagtgcagtggcatagtcatggcttactgtacccttgaattcctgggctcaagcagtcctcctacctcagcctccgagtagctgggactacaggcacgcatcatgcacggctaatttttttactttttgtagagacagggtctctctatattacccaggctggtcttgaaccctgggcctcaagcggtcctcacaccttggcctcccaaagtgctgggattataggcatgaaccactgtgcttgtccctttgttgtttttaatcggtactgtggtaactttatcctatccactacttctaaagaccctgtgagggtaggtacttgtatgactccatctagacatagtaggatatgttgaataaatgaactgatgcagccattaatcagtgcagttattaatttggtgattgaaggaactgaggatgaaggagatcaagttccgcaatgatactcagtgagttctaggtggaggaggagctgggtgttaactcctgggttcctctccaaacacgtgcttctgaccactgtgggatacagttagcaggttgtgtaaggtctggggacagacacagggtcaataataaaaattgctgaaaatttatagatgtgtgcttatgtgtaaaacatctgttgtgtgcttcctgtaggattttttttttttttttgggaaacattcttactctgttgcccaagctggagtgcagtggcatgatcttggctcactgcaacattcaccttctgggttcaagcgattctcctgtctcaccctcccgagcagctgggactacatgtgtgcaccatcatgcccggctaatttttgtatttttagtagagatgaggtttcaccatgtcggccaggctggtctcgaactcctgacctcaagtgatccgcccgcctcggcctcccaaagtgctgggattacaggcgtgagccaccgtgtccgggcctgtatgacttcttgccaccccttccccaccacaatcctgcatgaaggttactattactatccttgttttgcatgagagaaaactgaggtgcagagaaggtggttttcccagaattataacagattgttttcttacagcacttggcagtgcctttaccacagtgtttatgcccttcacaagaaggggttgtgagcagggcagctgggctggtactgggcattttgaacttccactgagaggttaaatatgatctcttccacctgcttaagtgcatcttatgcctggcacaatgcctcatgcctgtaatctcagta

SEQ ID NO: 15386 - DNA, 2300 bp, Homo sapien
tgttttgtgagacagggtctcactctgtcacctaggctagaatacgatggcaggatcatggctcaccctctgcctcccagctcaaacgatcctcccacctcagtcccccgagtagctgggagtacaggtgcgtgtcaccgtgctcggctaattttttgtattttttctagagacaggttttgccatgttgccgagtttggtctcaaactctgagcttcaagtgatcctcacccttcatcctcccaaagtgctgcgacgacaggtgtgggctaccatgcctggccaagaaggtcatttttatcatttgattctacagctgctactcacggttacactgtgagaatgtcctgtataaaagcccttatttgggccaggtgtggtgacgctcgcctgtaatcccagcagtctgggaggccaaggcaggtggatcacttgaggtcaggagttcaaaaccagtctgggcaacattggtaaaaccccatctccaccaaaaaaaatagaaaaatgagccaggcatggtagcatgtgcctatagtcccagctactcaggaggctgaggaaggagaatcacttgaaccctggaggcagagattgcagtgagccaaaattgtgcctctgcacagcagcctgggtgacagagcaagactccatatcaaaaagttaattaattagttaaataaaaataaagcccttatttggggaattgagcatcagtcatggctctgcttcccctgaagtttttttttttgttttgttttgttttttttttgagacgtcttgctctgtcgcctaggctggagtgtagtggcatgatctcagctcactgcaacctctgcctcccaagtccaagcaattctcctgcctcagcctcctgagtagctgggattacaggcgtgtgccaccatgcccagctaattttttgtatttttagtcgagacggggtttcactgtgttaggatggtcttgatctcgtgacattgtgatccacccacctcggcctctcaaagtgctgggattacaggcgtgagccactgcaaccagcccttttttttctttttaaatctgtagaacctttgagaaactggcactaacttctagcccagactatgttcctgaaaccagccacccgatgggacagtgcagatctgatctctaacagtgtcattaattttcttgcctaaagaaaatcagggccaggctcagtggctcacacttgtaatcccagcactttgggaggctgagggcagcggatcaattgagctctggaggttgaggccgcagtgagccgtgttcccagccactgcactccagcctgggtgatgaagcgagaccttgtctcagaaaaaaaaggggcagctttcagattcaggaattctgcaaggtgtgtgactaccatctctctgggccccaagccgtaggaatttgatgggtttgtagcagacacgtgacaggaaattaagaatattttccatggcatgcacataactttgagacctttacacgtggatttttaggccaggtgcagtgaagtggctcacacctgtaatcccagcactttgggaggcagaagtgggtggatcacttgaggccaggagttcacaagaccaaactgggcaacatggtgaaaccctatctatactaaaaatacgaaaattagccgggcatggtcgcggatgcctgtagtcccagctgcttgggtggctgaggcacaagaatcacttgaacccaggaagtggaggttgcagtgagccaagattgcaccactgaactccactctgggcaacagagtgagactctttctcaagaaaaaaaaaaaaattaatttttgtttgttttctttctacgagacagggttttgctgtgtcacccaggctggagtgcagtggtgcgaccatagctcactgcagcctcgtcctcctgggctcaagccatcttcctgcctcagcctcccaagtagctggggctacaggtgcacaccaccacccctggctaattttttttatattttatagaaacagtcttgctatgttgcccagactggtctcaaacctcctggctttgagtttgagaatacacctctgagactgtagtctgcttctcattgagatttctagaggtgagttttcagattaattttccaggcgatcttcccaccttgacctcccaagtgctgggggttacaagcgttagcaatcatgcctggcctttttttttttttggagacagggtctcactctgtcacccaggctagactgcggtggtgtgatctcggctcactgcaacctccgcctcctgggctc

SEQ ID NO: 15387 - DNA, 2300 bp, Homo sapien
tccaagcagagagatatgtgtgcagggccacccatgcttaccatttccctactgaggctcttaggatacttttgtaagatattaatagctacttgtggccatgaaacaaactaataactagcttctggcagctttaaatctcactttgacctcagtgtgctctaagcaacgtgggcaggtctagtggtttcgaagcacaaggatttggccaggtgtggtggctcacacctgtaatctccgtgctttgggaggccgaggcaggaggctcacttgagggtcaggagttcgagaccagcctggtcaacatggcaaaaccacatctctacttaaaatacaaaaattagccaggtgtggtggtgggcacctgtaatcccaactactctggaggctgaggcaggagaatcgcttgaacccacgaggcggaggttgcagtgaaccaagactgcaccattgcactccagcctgggtgacaaagtgagactccatctaaaacaaacaaacacacaaaccaacaaaaaaaaacaagtcagctgatttctggctctgcataaggttgatgtagaagtcagaacgccagatgattatataaattactcccatagctaacctacactgcttacacctgcacctcaatacattcagcaggacacagggcttcccccggtatttacaattcagtgacgctgaccccggatatgcctagaagtcacctctgggtcttgtgttgtagttgttagccgaggagaaaaacatctcttccaaatacgcggatgagagggacagagctgaggcagaagccagggagaaggaaaccaaggccctgtccctggctcgggcccttgaagaggccttggaagccaaagaggaactcgagcggaccaacaaaatgctcaaagccgaaatggaagacctggtcagctccaaggatgacgtgggcaagaacgtaagtggctctgggtggtttttctcgtccatgtttcgcctgcccaccctctgtgctattcaccagtccatgcgaggctagctcctggcctttttcatagcgaactatcatcggaaatggaaggaggtttttggactggtgcaggggctgggaggggctgagaatggcagtcgaggatgggtctgagttggggggtccgaggataaggctggggtctgaactctcaggggtcatcttgagtcccggccatgcatcctgtgggaggccaaagccacctccctgatctcctgaggtgccgctcacggtgggtttctcaatcgtcttcatgaagttgagcctcatagaatggggctgcccgctctgccggcaggtccatgagctggagaagtccaagcgggccctggagacccagatggaggagatgaagacgcagctggaagagctggaggacgagctgcaagccacggaggacgccaaactgcggctggaagtcaacatgcaggcgctcaagggccagttcgaaagggatctccaagcccgggacgagcagaatgaggagaagaggaggcaactgcagagacaggtgcgtgctgccggggaggccagcagagggaggtcgggtggcctttttcattcctatcaccactctcatggttggtgtggaaacttcgttttctttatttttttttgaaacagagtctcgctctgtcgcccaggctggagtgcagtggcgtaatctcagctcactgcaacctccacctcctgcctcagcctcccgagtagcttggattacaggcgcatgccaccatacctagctaatttttttttttttttcagtggagacaaggtttcaccatgttggccaggctggtcttgaactcctggcctcaagtgatccattctcctgttggcctcccaaagtgctgggattacagacatgagccacccacgcccggcgtgattccgttttctcatctgcaactggggatgagatgcccacctcacaagggggctgtgctggggaaggggtgcagtgatgtgctgcctaggtgagccaaaggacctcccaggggcaagtggggcagcacacatctctattcctcgcccagcttcacgagtatgagacggaactggaagacgagcgaaagcaacgtgccctggcagctgcagcaaagaagaagctggaaggggacctgaaagacctggagcttcaggccgactctgccatcaaggggagggaggaagccatcaagcagctacgcaaactgcaggtgggtgacactaggagcttggggcatgggtggagggagggcacagttcccctcaggccaccgaagtcagcagagcgggctccagg

SEQ ID NO: 15388 - DNA, 2300 bp, Homo sapien
ctgtattatatgaactttatcagatacttattttgagacaggatctagctctgtcacccaggctggagtgcagtggtgtgatctcagctccccgcaacctccaccactgggttcaagcgattctcctgcttcagcctttcatgtagccgggattataggagcacaccactatgtctggctaatttttgtatttttagtagagatggggttttgccatgttgtccaggctggtctccaactcctggcctcacatgatctgcctgccttggcctcccaaagtgctgggattataggtatgagccactatgcccggcccacatatttatttataaagactaattctatctatcatgccttatctcttgggtacatttcagagcaaattacagatgtcagtacatttccccttccacacctcaacattgcatattaattagagtttatttttaaacacaattttgcttcttttggggtaaaacttacatgtgatgagattcacaaatcttaattgtacgataaatggagacccctgtatgacccaaacccctaaataccaacttttaagatacattattatttagtaaatatgatttagtttacaagtgactcagggttattctaaaaatcagtttgagaggccaggcacggtggctcacgcctgtaatcctagcactttgggaggctgaggcaggtggatcacttgaggtcaggggtttgagaccagcctggccaacatcgtgcaactttgtctctactaaaaataccaaaattagccgggcgtggtggcgcacgcctgtaatccctgctactctggaagctgaggcaggagaatcgcttgaacccagggtggggtggaggttgcagtgagccaagattgcgccactacaccccagcctgagtgatggagtgaaaaccctgtctcaaaaataaataaaatgaggattgtacagtgaggctaaatgccagatgcctgcaggttccctacccctccctgactgacctcctagtgtcaggattctagataacatcccagtttctcctcttcccatcagctacctctcctctgggctgtcagctcatcttcaatgcttcgttatctggttgaaggcctgaggttgcttttattttcctgtcacatagagtgtagtgcagtggcacacatagtgtgggatttttgtgttgactgtgccatttagaggtccctgtctttgctgaatactggaagtttggcttttggatgttacaatttataatctgctctgttctctctgaagatgagattaacgtgagcatggaatgttctctgagttgcttctccaagcagagagatatgtgtgcagggccacccatgcttaccatttccctactgaggctcttaggatacttttgtaagatattaatagctacttgtggccatgaaacaaactaataactagcttctggcagctttaaatctcactttgacctcagtgtgctctaagcaacgtgggcaggtctagtggtttcgaagcacaaggatttggccaggtgtggtggctcacacctgtaatctccgtgctttgggaggccgaggcaggaggctcacttgagggtcaggagttcgagaccagcctggtcaacatggcaaaaccacatctctacttaaaatacaaaaattagccaggtgtggtggtgggcacctgtaatcccaactactctggaggctgaggcaggagaatcgcttgaacccacgaggcggaggttgcagtgaaccaagactgcaccattgcactccagcctgggtgacaaagtgagactccatctaaaacaaacaaacacacaaaccaacaaaaaaaaacaagtcagctgatttctggctctgcataaggttgatgtagaagtcagaacgccagatgattatataaattactcccatagctaacctacactgcttacacctgcacctcaatacattcagcaggacacagggcttcccccggtatttacaattcagtgacgctgaccccggatatgcctagaagtcacctctgggtcttgtgttgtagttgttagccgaggagaaaaacatctcttccaaatacgcggatgagagggacagagctgaggcagaagccagggagaaggaaaccaaggccctgtccctggctcgggcccttgaagaggccttggaagccaaagaggaactcgagcggaccaacaaaatgctcaaagccgaaatggaagacctggtcagctccaaggatgacgtgggcaagaacgtaagtggctctgggtggtttttctcgtccatgtttcgcctg

SEQ ID NO: 15389 - DNA, 2300 bp, Homo sapien
gtgtctccagtgttcgccattccagatgtcactttgcgtcctcagaggggactctggggcagccaccatggccggcttgtctggaggcccttggagatctaggatgggcgctggtcgtggctttggagaactttccttctccaaacaaatgcaggaaactcaagattcagcatcctagaattgtctctggcaagttggtttccagccatagtgagtgggaacaatggccccagaggctgtgtggcagtttaaacacagtttccactgccttccctttccctaaagagtaaacacaggagataatactttctaacaactcatcgttatcaagggcctactatgtgctgcttgttttggctgcatgcgtaaacacatctcagacattgtctcactggatactgttttaaggagcctaatgtggccccagtaattatgaaaacctttgaaatgtctggatctctaagaaattagaaaaaggagggaatggctgagcatgggggctcatgcctgtaatctgtgttttgggaggccaaggtgggaggatggtctgagcccaggagttcaggaccagcctgggtgacatagtgagaccctgtctgtaccaaaaaaaaaaaaaaaaaaaaatcaagagaattagctgggcctggtgtgcatgcctgtagtcttagctacttgggaggctgaggcaggaggattgcctgagcccagtaggttgagactgcagtgagctgtgatcgtattcctgcagctaaacagagagaaaagaaacagtatcaaggaaaaggagctgaccagtctgtctgggagactccaggctgtttggggggatcaaagtcatatattctccagcccctgatgtccatgtgatggaaataacgctgacatttgttttatactgtgttgttcaaccacagcaaggcccatcttttgcctacgtgagtaactgagagtgttttcctggtgtgtaggggaggcacggagtgaacttagatctgcatgatcctcttgcacccaccgagtcccgtagctggtggtagaaatggggtaggccctagagtttcacaacttaaatcagtaaatgcaccaaaataccatcctgtgggtgtctgatgccagggaagggtgtgggggtgcatttaccacccacgggacgcctattggagtccccagggttgcgctccagcctgaaatggatttctccggttcagaatgaacccctgcacccttcaaagcatccgctcctggtacccttgactggaacaacctagacagagatgtctgtcccatctggctgagtgttttaggactgtcaggccccaaagcttccctggctcgatggacagtcgatggcacagctgtggcatgcctccctcttctctccctgccatcatccctaagtgtcttccctcagccctgtccctggtgcaccagtgtgtccctgtgcatgcgtgtgcagtgcgtgtctgtctcttgcatgctggttgcttgactcaagcctccagaaacagtcttggaggtcgcgatgcactagctttggtggcgcggtaaggccccagctacgcaacgcataacctggtcctgcttggacctgtgcatatgtaaactcatctctaacacagagcttggggggctgatgtgtgggtcccagcctagaagaaacccacaggtgtcttccttggctcccgaaaagatcattcaatccatcttagttagaccctgggtgactgtgttgcagatcagaaggagaattacagttcttatttgggatctgcttttgtgtgaccttggccgagtcagttaactcctcggggctatggtttcatcatctataaaattgagggtttgaaccaggtcccccgatttaaagctctcttgccaagacttttcaaccttacctgccagaatccccattctagaaagggagcctttttcagagagcatggagaccccaagtttatgtgaacaaaagtgattcctttagtcgtcttcccaccaacaaagaaatgcccgtggtgctccttgtaaatttccaccagtctcagctgtggtgattccacttgtagctgagatttgtatgcggatgaggcttttgcttcatctttctctgggagctacaaaaaggaggatgtgtggacaaatcaaaacagaaacaaatagcagcttcctgctttgtcctgtagaccaggtaccctgatgccttcctagcatgcggaggaatgaggaggaagccatgcccatccttgtcccctctagacactttcccggctcctgtccagcccagccctgatgcctggaaaaat

SEQ ID NO: 15390 - DNA, 2300 bp, Homo sapien
aggactgcttacaaaaaggccaggaagtagctgatgttcttcccatcttacaggtagggaaattgaggcatggagaggcaaagttacttgcccatggtcatataggtagaaagcagcactggcagattcaaagccagacatctactctcagatacacgccctgggcctcaaggccagtttgcctgggcatttccctttaatgtctcctctctggaagtgaatggtgtcatcagaaaggttccagtgccagcaccaatcaatgactgtcccagtgagagcttggtcaaatccctttacccctgcagggactcaattttctcacctgcaaaatgggggtattaataaagccaccccccgcacccccggcccccagcccctccacctggttgcaagaggagtggttgtagactaagggcctgcgtcaagtacagaacccaggaggggtctgcccaactttaaccctctctccaaatcctctagcctgaagcagcagaaacccacgtgggactgggggctgcccccttccgggccttccccaagcagaggggtccccatctagccccgcggggcaacggcggccggtggctgcgtgaagggccccctcccccgacgccggggagcaggaaggccactcggcaccatatttagtcagggggagccggcagcccagagctggtatgcggcgctgggaattcctgcaggaaggagtccgcgcctgccctttttgggttgtctcccgcccgccgctcccgccgctcccggggagggggaccggcccggcccggcccggcccgggaacctcggaggagctggtgccgcgcggggagcggagcgcccgggctgcccgcgggtccccggcctggcgcggggccagcccaccgcctcgacttccttttatggcctgtgtgtgcgtgcgtggacaggagcggggagggagggacggggagaagacggagagcctggggaagagagagagagaaagcgcagagataggagtgagacacgcgggagagatggagagcaagagacacagagaccagagacaaagtgagacaggagggagagacagatacatcgacagatctagagaagcgagagggacagagacaaaagatagagcgagagacagcaatgatcagagtgacagacatgcagagacagtggcagagacagagcgagagagcctgtgatggagagagacagggaatgcaattttaggcgaggaatccttggggaagggaagttgttgaagggaactcgcagactctgggggcacacccactttctccttggatcttgacacttgcatcttgtaaataacgtaattatcaccgccaccgccttcccccattttgtagctatggacaccaagtctcagagaagtgaagtgacttgcccaaggtcacgcagctggcgagtggcgcacaggggagggggacagctgaaataatcacagtgggcttatttttaatttttatttgtattttggtcgtggtgatgtgggtggaggtggagatggcaagttgggaaaagtaaaaacttccccttcctgcacggttcccagcaagggtgggggcctcctgtcttgcactttgcaaagttcaagaaatcccctttccctacccttcacgctgcacagccggccctctttccagacagtgcgatgccaataaaatgggaagtggggtgggagatgtcaagtcagatccaccacagccccgacacggggaggaagaggttaaagcctttgcggccggaaccgactcagggaagacgttctcaagcatcccgcacagacactgcctgctcgaccccctttctctagggatccggagcgtctgcgaccgcctggggccggggctgagactcccgtccctgtgcgcacctgttccgtgcgcccttgtgcggtgcgcacctgttccgtgcacccttgtcccgagcgccccagctccttgcgctcccgccgggggtgcgccctgcagggggcgcggcgagggggccgcgagggaccctccccaactccaccccttcggcctcctcccctttcccagccgcgggcagctccgggtctataaagagaggcgtccgaggacgcgcagggagatttggacgctccggcctgggaggtgcgtcagatccgagctcgccatccagtttcctctccactagtccccccagttggagatctgtaagtagtagttgtcattctgggggcagattgcagggcaggggggtgttaaaagtcctatagggtattctataggggctggggtgcacttaggggtccctgttgtcaacct

SEQ ID NO: 15391 - DNA, 2300 bp, Homo sapien
aagaatgtttgaggtgatgtttatcccaattgccttgacttgataattacacattgtatatgtgtatcaaaatatcacgtccctccccataattgtgatatatcaatttttctttctctctttttcttttcttttttttttttttttttttttttttttgagaaagggactcactctgtcgcccagagtggagtgcagtggtacaatcagccgtccaggctcaagtgatcctctctcctcagcctctcgagtagctggcatgcaccatcatatctggctaatttttttttttttttgtagaaatgcgtctcatgttgcccagcttggtctagaactcctgagctcaagcaatcctctatcctcggcctctggagtaactgggactacaggcatgcaccaccatgcccggctaattttttgtatttattttggagagatggggtcttgcattgcccaggctgatctcaaactcccgagcttaagcaatcctccctcctcgtcctcccaaagtgctgggattacagggatgagccaccgcacctggccaatgtatcagttttaaaaacaataggcatggaaccaaaagtatgctggaagttcctcggaaagaggtttccttgctcttaggtggtttttttttttttttttttttgaggcggtgtctcgctctgtcgtccaggttggagtgcagtagcgcgatctcatctcactgcaacctctgcctcccaggttcaagcgattcttgtgcctcagcctcccaagtagctgggattacaggctcctgctaccacgcccggctaatttttgtactttttttttagtacagagggggtttcaccaggctggccaggctgttctcgaactccttacctcagtctcccaaagtgctgggattccaggcgtaaaccaccgtgccctggcagctcttaggtgtacttttttttttttttttttgagacggagtctcactctgtcgcccaggctggagtgcagtggtgccatctcggctcactgcaagctccacctcccgggttcacgccattctcctgcctcagcctcccgagtagctgggagtacaggcgcccgccagcacgcccggctaattttttgtatttttagtagagacagggtttcaccgtgttagccaggatggtctcgatctcctgacctcgggatccgcccgcctcggcctcccaaagtgctgggattacaggcgtgagccaccgcgcccggccactcttaggtgtacgtctaatcgatgtttattatttagccaagtgtttggatctcaccggcattacaactggaatcatgcaacctcacactcagtttagggtacattattcccctgttccttttcctttacttccatgggatgttggagcttattccttcattagttagttccataaaaagctcctggactccttacatgcactgtgtaagtgcgagtggaagaggacaggctggtgaccttggttaagtctcttcagcgatggaggactctgtttccttcattgtaaaaacggcgtgatcataaggaaataatgcgctaaggcgtcacagtaagtgcttaatacagtggttctcgaggtgtgatctccagaccgaccagcagtaccagtaccacctgggaactcgatagaaatgcaaatcctagggcctcaccccagatttacagaatcagaaactctatggggaggactagcaaacaatccgtttaaacaagtcttggaggtgatgaggattcatgctcaagtttgagaaccgcagggttaataggtggtaactactagcagttggtacttgaggctgcagagacaatgaaaaactcagctggctaaagttaagcactaaggtgccagcagcaccccacagggctctccactgcctcagtccccgccctccctgccgtctcactcaactgggccttccgagagcgctcgctgattggtggagtctctggtcgacattcactacccactcaaccgcagagctcataaactgagaggggcggaagtgggcggggcgagagctgtgcgcctattggctacagaccacgccgcagggtgagtggggcggagctgcgcgtgcgcagggccgcggtgcggccctggcggccgttgaaaaatggcgactgtggcagagttgaaggctggtgagtgcgagcagggaggcctccacatgggaagcgtcgggccttcatcttgtggaaaggatgggatgggaggagagcgcgcggaacacatgggttggcttttacaggcgtcattcttcggtgtgagggcctgcggggagcg

SEQ ID NO: 15392 - DNA, 2300 bp, Homo sapien
tttttttgttttttttttcctgagacaggatctcgctgtgttacccaggctgcagtgcagcggtgcaatcatagctcactgtagccttgaactcctgggccaaatgagcctcccacctcggcctcccaaagcactgagattacatgcgtgagtcactacttctggcctgtaaataccctttcaaaaatataatatttgattaacatctgccatcttaccataagaaacacttaaaaaaatcccaatccaaaaaaattccaatcctttaagctatataagagtagcaattttatcttgttcctagcaagacatctggcatatagtaaatgctcaataaatatttgttgacagtataaaggtcaagcaacagcataactggcattattacatgaaagtaattatcccttagaaactcattcacccttgggggacccgggccaataaaaaaatcacagaaaacaatcctatctaccttcctccttcctccttccctcgctaggtcctttgattggggggaggtctcaaatgcacacactgtttctgttttatttggtgcagctgttgtgtgcatgtgttatggaaacccacatcaggcaggagattaaggaggagaggagaaaagaaaggcatcgctggtatcacagtgaaatttacactctgcggcctcgccctagctcctctgtctctacctgtctgcctatgaaacagttcaaaactaatatggcgcaatggatggtattatagacttcccacctccctggccagacttcttgggttcaaagtttggcttaatcacttaccatctaaataatccctgacaatgtactctgtctttctgggccttagtggcctcatctgcaaaatggggataatactacttcttacctcatggggttgtgaggattgcacaagttaatttgtgtaaattgctaagaacacagccttaggaagccttgtcactgtgaatgcatattaattttttttattattattttttgagacagagtcttgctctgttgcccaggctggagtgcagtggtgtgatctaagctcatttcaacctccgcctcccaggttcaagtgattctcctgtttcagcttctcaagtagctgggactacaggtgcccgccaccatgcccggctaatttttgtgtttttagtagagacagggttttgctatgttggctaggctggtcttgaactcctgaccttatgtgatcggcccgcctcggcttcccaaagtgcttgattacaagcacgagccaccatgcctggcctacgattatcatgtctccaggcttcagtttccttacctctgaggtgaggatcaataacctggttatttctaagtgatgcttaaagaggttgagaagaagcaaaggcgctctgcacacaggtgaggtcaacagctgttagtgatggagactggcgccgtctgggtcatcagtgctccggaatcaggctgctcacgggtttgaatctcacttccactttcactccttattaactgtgtgacctcgggcaagtcacttcgcctttctgaacctcagtttccccatctgtaaaaggtaggtgaataacagtattcacctccttctgtgtgactcagctttggagtcagcggaccgggttcaaatcccagccctgcaagtgattagccaggtgaccctgggcagagggaatcactcaacctctctgcacctgggtttcttccttcatgaacgtggagactttacaggatgaaatgagggcacagttaaggcgcccggtacactccaggcaggtagggggctccgttcacgttattttcccctggtgacggatactgtccttaaacagcatttgaaaagtggtcgcagggtgtgtggccccaaagatcccaggcgcttccggaaggcgagccaacgctccccaggcccgtccgcgagcgggtgggcctaagccttggaggatctggggtgggggtggcgcggggtccaggcccggggcgccgagaggtggctggtccggctgcccacgccgagacgcgcgaggtgagcgggcgccggggcggggcggggtggggcggggccgccgcatccccgtgacgcgcgggccaaccaggcggcgttgcggccccggccccggctccctgcgccgccgccgccgccgccgccagcgctagcgccagcagccgggcccgatcacccgccgcccggtgcccgccgccgcccgcgccagcaaccgggcccgatcacccgccgcccggtgcccgccgccgcccgcgccaccggcatggcgctccggggcttctgcagcg

SEQ ID NO: 15393 - DNA, 2300 bp, Homo sapien
tcatggtggtgtgtgcctgtagtcctagcttctcgagaggctgaggctggaggatcgtttcagcccaggagttcaaagttgcattgagctatgattacaccactgcactccagcctgggtgacagagtgagaccctgtctctggaaaaacaaaaaaaggagatgggggtgggagattgacatcttgtggatcacagataatagcatcaatccaaaagaggcagaagtttgctaattatttgctgaatttagagaagtgtccctctcacccatttgcatccttatagacttttctgaaaaagtgacagcaccccagaggtgtcccataaccattagcccgtcttacacactctaatcccatagcgtaagtctgggtgggctaaccctgaatgattacagaccttgacttcccttcagaatttttagggagtttgtcacaatctggctgtgtctgtcggagtagtgaggatcagtcacttggttcataagggctgcaatggagaaaagatcaacaccccatcttcctagaatgctttatattttagaacattaaaataatagttctagtgctatatgatatcatacgaagcctagctttaaacaaataagatggccaggcgcggtggctcacatctgtaatcccagcactttgggatgccaaagtgggtggatcacctgaggtcaggagttcaagaccagcctggtcaacatggcaaaatcccatctatattaaaaatacaaaaaaattagccgggcatgatggtgggtgcctgtacttgggaggctgaggcaggagaatcacttgaacccaagaggcagaggttgcagtgagccaagaccgcaccattgcactccagcctgggcaacgagagcgaaactctatctgaagaaataatagaagagaagagaagaataaaataaaaagtaaaataaaatagttctgatggtacatgataccatactaaacctagctttaaacaaataagatgaccaggcacattggttgacacctgtaatctcagcactttgggtggccaaggcaggcgggtcacttgagcccagcagttcgagaccagcctgggcactctagggagaccctgtctctaaaaacaaaacaaaaaaccaaaaatttgccaggtgtggtggcatgggcctgtagtcgcagctactcaggctgaggcaggaggatcactggaacttggaaggttgaggcggcagtgagctgtgatcatgtcatccacactccagcctggatggcagagtaagaccccatctcaaaaaaacaaaatgacagaaaacatgatttctgtttctattttaaagggtaaaatagtatattttaacactttgaaatgaagagtctgggcttgggaacgttacaatgatgtttactcgtactagttacgcactcccctcccagatctgtctcgtaacaagagactgttattttctacttgtttttagccaaaaggccgagaaacgatggttattttaaatccctagtgtctcttacagttgatgtcttcttagtatttaggaatttccaggacatctttttgttgttgttaatgcactgtgtgtgtgtgtgtgtgtgtgtgtgtgtgtgtgattataggagtgacccactacgcccggctgtgtgtgtgtgtgtgtgtgtgtgtgtgtgtgtatgtgtgtgtgtgtgattataggagtgacccactacgcccggcctatgtgtatgtattttaaaggcttcaatgagaaaaaagttggttcttaaaaaggcaagcttcagattccagggaagattgcctctggagagctctgttttaatccatgggtttgccagattaatgaggatttactggcctcgtgccttcggccctccctaccctgcgcccattgtgcatgttttgaaaaagcagtgccaggaaggactctctctggaattactgcggagttacttgagttagcaaagaatccccttcctcccccaagagctgtaagccaagtctctgtagagctgactccatgcctgtttgtctgcctgtgtgtcttggcgcaggtggctggccgtgcggctggagtgtgtgggcaactgcatcgttctgtttgctgccctgtttgcggtgatctccaggcacagcctcagtgctggcttggtgggcctctcagtgtcttactcattgcaggtaagaggggatgctcttggctggattattaaagtctgttaatgggggagccagttgtccttggctttggattccagctccaacaggaatgggggagaggaacttgagaggtacggagtttgaggag

SEQ ID NO: 15394 - DNA, 2300 bp, Homo sapien
gcacagggtgtacccccactgtgatattaggagtcatatctttctgggaggtcacagcgtgtacacgcatggtgtaaattcactgggatattaggagtaatatcgccctagaatatttcgaatcatatcacagggtgtacacccactgtgatattaaaaggaatatctttctagaacattacaaatagtatcacaaggtgtacacccactatgagattaggagtaacatctccctagaatattatgaataatatcacagtgtgtacaggcactgtgattttaggagtactaccttcttaagatattatgaataatatcatagggtatacacccactgtgaaattaaaagcaatagctccctacgatattacgaataatatcacgcagtgtacactcaaggtgatattaggagtagtatctccctaggaaattacgaatattatcacagagtgtacacccactgtgatattgaaagtattatctttctaggatattatgaataatattacagggtgtactccctctgtgatattaggagttatatctccctaggatattacaaatcatatcacagggtgtacacccactgtggtattaggtgtagtatctccctaggatataacaaataatatcacagggtatacacctacggttatatcaggagttatatcttcatagaatattatgaataatatcacagggtgtacaccctctgtgatattaaaagtaatatctttctaggatagtatgaataatatcacagggtgtactctcactgtgatattagcggtaataactccctaggatatcacgaattctatgacagagtgtacacccaccatgagatttggagtaatatatctctagcatattatgaataatatcacaggttgtacacctactgtgatattaggagtaaaatctccctcggatattacaaataatatcacagtgtgtactcccactgtgatattaggagtaaaatctccttcagatattacgaataatatcacaggatgtacacccactgtgatattaggagtaatatctcccttggatatttctaataataccacagcgtttacacacatggtgttcacccactgggatgttaggataatatctcccttggatattaccaatcgtatcagaggctgtacacacgtggtgttcacccagcgtgatattaggaataatatctccctcggatattaggaacagtctctccctgggacttagcagaacgtagccccccagtgttaaataagcgaccacagcaagaggtagaggcgcagggactgaaatgaagacaaatatctgacaagtttaaaacacgtatttaaaatagaatttataaaatgcttaatctgccgactcaggagcccgcggtgcagggtggggtgggagttggcaggtgaccgctacaccagcagagtaagactgcagggctgcggccctccctcctatgcccttctgttcagacacccgaggggcccatgtgcactcctgggatcatacgaccagaaaacaggaccctagaggtttcttgagtttctgcttaccagggcggctgggtatagccctgccagcccattgcataatcttctaagttctccccaccaccctccattccagcagcgaggtgcctgtgacgcggtctccatcctctcggcctcgacccggtggtccccgcgattggacgcttaggcggtcaccaggcctccttgttactaacgtgtgcacacctttcagttctctcatcaggatgaactcctggaaattgctgggtccaaagtgtttaggaagtctggagtgattcttgttgcagggggaagagggaactatggaggtgtcactgaactttcaggggttccgggaccccccaacccggtgcccgtcccagctccccgagcgcctctcttcccccatcccccacctcgcctgttttcacctcccgtggcctcactcccgccgcgcagctggaccttgcccggggcctcccgatcccggagctcgaatcccagccggaccagcccagcccgaccagcccagccccgcctcttctccggcaggatcgcggccgagcagtctgcccagagacttagcgacagacagacgctgggacccacgacgacagaaggcgccgatggccgcgcctgctgagccctgcgcggggcagggggtgagtgccccccatcgcgccccactctccttttccaggcttggtttggctgcagatctctcgggctgcgatactggggagaggagagacccccaaattcctggacccgggaagcgag

SEQ ID NO: 15395 - DNA, 2300 bp, Homo sapien
aaatcaattggggtgagtccagaacaaaacttggggatcccacttcctgctttttttttttttttgagatggagtctcactctgtcgcccaggctggagtgcagcggcaagacctcagctcactgcaacctgtggctccctggttcaagtgattctcctgcctcagcctcctgagtagctgggattagaggcatgcgccaccacacctagctaatttttgtatttttagtagagacagggttttgccatgttggccaatttggtctcgaactcctgacctcaaatgatctgcccacctcggactcccaacatgttcatattacagtagtaagccacggcttctggccccaattcctgctctctagctccgggaaaacctgtggctgcatgcagagtcttagacaacttccttttcctctctgggcctcagtttcccattctgtaagatgagaggtttccataggcctacactttctaattggtggctttcaatcctctggtgatttgcataaaaggcatctatttcaattgtggttataaataacaaaccccaataaatagacgaattatttaaatggtttctcattatcactgaatagttgagagtctactgtatttgagtgaaaatgcagcacgagaaactgaaatcagatgcgctcatgattatgaccctgaggtcaatgtgtcattcccttcattccctccttgcccccatgaaggtttgactactgtatggtttgaacctgtgcttcttagttgtttattgcttaagttttagccacaacggcaaattgcagcgggaaattcagtcttactttgtcatttggaaacaaaatacaaaacctatcaaaataaagcactagcttttttttttttgagacaaaatggaagaaatcctaatattaggttagaaaagcaattttttggtgtttttaaaattttatttatttatttttttgagacagagtcttgctctgtcgcccaggctggagtgcagtggtgcgatctcggctaaccgcaagctccgcctcccaggttcacgccattctcctgcctcagcctcccgagtagctggtactacaggcgcccgccaccacgcccggctaagtgtttatatttttagtagagacggggtttcactgtgttagccaggatggtctcgatctcgtggcctcatgatctgccagccttggcctcccaaagtgctgggattacaggcgtgagccactgtgcccggcctctttggtgtgtattttgatgtggtgactggtagttaaattcagtgtacatatgaattcactcttgggacaaaatatgctggatttgagcttgttttcaggcaaatcatgtttcatcttgcagagctaattcaaagtatactgactgcatgcacttcttgcttaggggaagaaaactcatcaaaatttgtttctaggcatatgttattagagctaggattaaaataaatcttacatactttctttaatatgctaacattaacacgtttcgcttaaaaaagtatcgatcatttatcatggaaaaatacaccagcttacacaaattcctaaagcgtttttcgtgtgtgtgtgtgtgtgtgtgtgtgcgtgtgtgtgtgtagagatggggtttcgccatattgcccaggctggtctcgaactcctgggttcaagcgatccacccacctcagcctcccaaagtgctgggattacaggcgtgagccacacacccggccctaaagctttttgtgagattatatattttacctgcgaaatatatgggtcagaaagatttgagaaagttgttagataattccaccaacgaaatctcccgtcctttccagctgtgatggtgaattctaaagtagaattcatctttggagcttctccctgtaggcatgcaccttgcgttgcacctgccagatgtcgcgcggagtcctccaggcctctagaaggcagagatggtctcgtttccttgccgagcatgcgccttagttctctcttctggggctgtgaccgtggggtcgaagcgcgcgtgcgcggcggcggctggcggcggcggtggggcggggcctgggctgtcagccggcctaggaggaggaaggagcctgcggcgtgcagtgtgaggggcgggacccggctgccggcggtgggtctagctgggggaggtcgggccatgctggtgggccagggcgcggggccgctggggcccgcggtggtcaccgccgcggtggtgctgctgctgagcggcgtggggccggcgcacggctcggaggacatcgtggtgggctgcggtggcttcgt

SEQ ID NO: 15396 - DNA, 2300 bp, Homo sapien
gcagcctccgcctctcgggttcaagtgattctcctgccccagcctcctgagtagctgggattacaggctaatttttatattttttagtagagatgtggttttgccgtgttggctaggctggtctcgaactcctgacctcaagtgacccacccgcctcggcttcccaaagtgctgggattacaggctgagccatggtgcctagtcttcctttaaagtaaaataaaaaaattactcaatttattgtaaaaacaaactctttggcttctgtccaaatgactgtgaaaatagatttctctcaatatccaccaatattacctgtttctgtccatatatgtatttaaaccctgttgaaagaatttattgatacaaatcaatttttaagggcttcagtataacggaacctttttctaccacccttttggtttatttttccaaactaagccagtatagatttgaggtttagggaaaataggcacttctttttaataagaatgtgggctaaaacagatcttatggttcaaatatttacaacttaaggaggcaaagagatttgataggaaatagacaaggtgatgtgtcctctgacaggtacacaaatcaagagaatatgacaggtccttgggaatgattgtgtcagtgttcgcttcccatccttttattctgaaagttcacagtaggggaatgtgagaaccaaaatgcatatgctaggtcagggactgggacactttctctgtggagagccagagaataactattttaggctgcgtgagccatacggtctctaggacaacagctgagatagacatttgtaaatgaatgggcagagcgcaacacaactacatttttggacaccacagtttgcatttcatgtaatttttacatgtgaaatattatctttcttttgatttttttttttaactttaaccacttaagagtgtaaaattctttttctcggcttgcagttcatacacaaacgggaggggggtccttgggtggtagtttgctgacccatgctggagatagtgagctcatatggctgggcagtcccttcactctgaagaaatggctgtgtttttcataattcctagatttcacatacacaatcttccaccatttccttgtgttttccactgtttttttatttgaggcggagtggtggttccaacatttaatgtacccctaattgtcagaatccaacattcttgattatctttatgtcagaagtaactaatttttatctaaaatgattcttgaagattctttaaaatgaacagttgaaaagacaactgtgacccccagctaggatgtactattacactttaatacaccagctgcttcagaaatgaagaccagcactccaaggatgatggtcgttgtaggggggcctctcgtgtgttattcgagggatgccttgcaacaccttactccttatttagaatctcaaatctgaatcattaccttaatagggcttttcagttataagttacattgtggctcctacctcccaaggagttcaattttagctttgcattttttaacttaattaccttttctgttccaatctcccagtttgctttcatccatgtattatatataatcacaagcaaggaagacgtctttgataatcctgacttatttgatggcctggtaatgccacagtttcttaggcagcttagagctcttgcttttaagggctagcccacattctcagtccaaggccgctctgctgtcaacgatccaattacctgaaacgtttttattatctgcagattttcttaaaattgcctctgcagtgggggattgccagatgtcacccggaacacacaaacagccccactacgggcccctgttctgtagaaagatgcccagtcttgcttctgaaggttgctttttaaaaccagaatgaaggttgctttttaaaaccagaatcatctggattgcattctgtctcttcattaagattagactattctcaggaacaagggctgggagagggctgcatcttttttggtcgataagagcctttcctgttataattgagtcctcgtgctggaatgaatggtcttctctttgcaggttcagtgtctgtggtcagatatcaatcattcgcttccccgacaccgtcaagcagatgaataaatacaaagttgtcctgtcatctcaagacaaggacaagtctttggtcaccgtggagacagatgctcatggatcattttgttttaaagcaaacccagggacttacaaagtgcaggtgcgatgcattgttttaaatttaaaatgttttgagaaaaagcagtgat

SEQ ID NO: 15397 - DNA, 2300 bp, Homo sapien
ggatggagaggaaaaacatcttagaagagtaagagcacatagtatgcttggaattttgaaataagaaaccaaatttgatttattttggggtaggagaaaatgaaactgagttgggatggaaggagtcgcaaaatttcagatgtttcaacactaggggtgttcttaaaggaactctggactcttaaggttaacaggccacagattaggaaatgaggggagagaaatgctcctgtcttaatgatctcgtgcagccaaaccaggcttggaccaggcacgatacgacaagccccctttctagagaactgactcctgagtttttttgcagccgggatgtgtgtaccacgttcagctcaaggcagaaggcaacgaccacattgagcgggcgctcccccaccatagggtgattgaggtaaggcattcagtgctgccgctgcacctgggtgtgggtgcctccctaatcagaagtcctcccgtctcctctggctgtctgcctttcatctgtggcggggggaactttcatcctaattaagggtcctcttagaatagtgtcatcttcacaagcagaatcttatgtgggtttttagtgaacagcgttgctgtcatgcatccagaaaggaaattggaactgttgtatcctccccgcgacttgccctgtaagctctgatcattattctgcaagttaaggaacttaaggcctaagcagcatttcaaatcaagggacaataatagcacatgggcttaatgggtggcagggccacgcagttatcttaggttcagatgacctttttcctgctcccattttgtgggcagagtcttttgatactcaagatcatgacctagctaaattaatccctaaagaggacatccttcgagtcacagaatgtggcctgggaatcatttgaagtaaggcttttctcttactgagtaactctcattgggaagactagagggcttaggtagggcaagaggggctgcctcttagtggctttatttaggtggcttcattatgcatgaagattgtgagggaggatagaacttttgacctaggaagtggattttcttttttttttcttttttttttttttgagatggagtctcaccctgtcacgcaggatggagtgcagtgccgtgatctcggctcactgcaacctcctccttgtgggttcaagtgattttcccacctcagcctgtagctgggactacaggcatacaccatcacacccgactaatttttgtatttttagtagagacggggtttcaccatgttggccagattggtcttgaactcctgacctcaggtgatctgctcgcttcggcctcccaaagtgctgggattacaggcatgagccaccgcaccgggccggaagtggatttccttgacgtctttacggtgttggcattttaaatggctgggatgactgcatctcacaccaaaatgctttgcatgttctcggtgtagtaacttaggccaggatcactagcataatgtggactgtggccgggcaggtatgaaagggaagggggccggccctctgggatctcgcaaactccatgtacagacctcacgcagagggggtgctgtgactctgcccctgctctaacaggcaagagcatccttctcctctttttttttaagagaagctggaaaatctggcttcatatatgaaatttcttaatttttaacatgttggcaagtaattcaaacgtagaaaaaaaatactgtgctttcgaaatgaaatgtgtctatgggccagggatatgcccctgctctaacaggcaagagcatccttctcctttttttttaagagaagctggaaaatctggcttcatatatgaaatttcctaatttttaacatgttggcaagtaattcaaacgtagaaaaaaaatactgtgctttcgaaatgaaatgtgtctatgggccagggatagccatcttctgtcggtttgtgaccttggacgtagggtactcaatgacaaacttagcttccttaatgtaagaagcaaagtttgccatgaagcagctctcaggccatcggacagctggcatagaagttcctccaccagctttctcattactggcattccctctttctctctctaggttgggaataatgacatcgatgatgtaaacatcatagttttccggcagattaatcaatttgatttaagtggaaatgtgatcacttcctctgaataccttcctacgttatgggtaagtccagacttttaagctccaagtattgtgttccctttggctttgagacaagtacgaatgggatgtttttggttttgtgcctgt

SEQ ID NO: 15398 - DNA, 2300 bp, Homo sapien
ctttatttctgtgttaaatgtgttgattttttcttattgcttctggattttagagtcataggaaggttttcttcattcccagcttttacaggaatttatcgtgtttttttcaggcagacttttatagtttctgtttttacatttaaatctctctatccatttggagtttttcctggtatagatgtgaagtatggctccagattgtctttttccacatgctatccagttaccatttcatgcttttcaaacgccatcctgcatggaaggtggacaggaattacctttcatttagagatgagaagatgggaacctagaaggagatgtgagcagcccaaggtcaccagctcacgtggagcagtgctagggcttgagcagagctctgctgctgattctgggcttctgtgaagagtgattcatgctcagtgagcctgtaaatatgatcttacctgaacaagagagtttttctcatgacccacgaggaaacacttccttgttactcacagtagagacctggttagaaagtgctggagagggctaggtgtggtggctcacgcctgtaatcccagcattttaggaggctgaggtgggcagatcatttgaggtcaggagttcgagaccagcctgggcaatgtggtgaaagtgaaaccccatctctgctaacaatacaaacattagccaggcgtggtagcacgcacctgtaatcccagctactcgagaggctgtggcaggagaattgtgaacctgggatgcagagtttgtagtgagctaagatagccccagtgcactccagcctgggcgacagagcaagactgtctcaaaaaaaaaaaaaaaaaagaaagtgccagaaagataagcatatacaagaaccacttacctttgcttggggctgcattgtggcccagttgctgggagaggcttctgtgaaggccgttgatagctgcaggcagtgacattctcaggggcccctagcagacaactcatccgggctcagggacacacctgggagccagtggcaggaatgtggagacactgcttggtggtggccgagcagcccagcctcgtagctgctgcctgtcacttctgagaatgtaagaaactgtgccctggtgtgtgatgttccccttcctgtatacctatgtaactaacctgcacattgtgcacatatatcctaaaacttaaagtataattaaaaaaaaaaaaaaaagctgtgcctgctggggcttggattcccgagcagggccaagtgttgaatgaagagagcgcccactctgtgccaccccgtacagggccctcacaggttgatcctcacaacaagccttcaagcaggtgtgccattcctcccattttcacagaagcccagaaagattgagtcacttactgagtgttagcagaaccaggactcaagtgaggcagtttgtctcaagccacatggtttccacctcgttctgccctccgcgtgatgagtggctcagcattgcatgttcacgggggctttgtaagcacattggtttccttctttgttgatgtgactgcccacagcctcgcgactggattttactcagtattccatgccctgctgagcatttcacatactcctttcatcaagtttcacagcatccacccccagtgggtgttgttcatatgatctccatgtcatagttgagtaaactgagtctcaacgtggttgcctgagtttacccagtgaggcctgggacctgagcctagactgaatcactcttaattcctgctgaattaaacttttatttatttattcattattatttttttctgagacagagtcttgctttgttgcccctgctggagtgcagtggcacgatcttggcccactgcaacctctgcgtcccgggttcaagtgattctcacctcctgagtagctggaattacaggcatgcaccaccacttctggctaattttgtatttttatagagacggggtttcaccatgctggccaggctgttctcaaactcctgacctcaggtgatctgcccacctcagcctcccaaagtgctgggattacaggcgtgagccactgcacctggcctgaattaaacttttaagtaagtgtttacttcagtggaaaaatgggttgggttctaagagatgtccagagatacaggagtaggcagttgttgatggaaatctgttcctgcccttattctttcatttatgaaagggcatcccaggtacagcggcccccacagtcactctctagcccagcagttctcggatgggttggttgcaggacccctttatactgttaaaaattattgaggatttta

SEQ ID NO: 15399 - DNA, 2300 bp, Homo sapien
ggcacggcaggacggcctctcagccccgcacgagcccgtggaggtagtcggccccccacgttctataacctgccctcctgcctgcccctggaggcctcgcctgccctgcccactgtgggtctcgccaaaaaacttgggggccttaatgttgcttgtgcccagtgaagatggttgggaaaatccagagtgcagagaggaaagcgtttactcacattacccccaggccttttctctgagtgtgggtgagttattcctgaaaggcaggtcaggggtcctgccccccatggacagtttccatcggagtcttcctctcgagcgacaggagccaggcctgtgggggtccgatggctcgctctccttccctcccctcttcctgcgaagttcgggtggggggagtctgggcttcaggctgggatggggtctgtggagctgaggcggccccctgcccaccaggtcatggtattcccgggcctgcgtctgagccgtgaagccttcctcaccacggccgaatttgggacccaggagctccggcggcccgcccagctgcggctgcaggtgtaccggctcctcagcacagcaggtgggactctggggtggtgggcgccgcaggactcggggtggcctctctgagctctcacgtctgctggtcctgtggccatcagagtggttcccagtcttaggtggacagagcaggggttccagagacaccagctcattccaggtgtcctgggggtggatcgggtggggcctgcctggggaccggcctgggtcagtcagctggccggagacagggacgcagcactgggctgggagtgctgcccgggcggggagacctgtcctcacagcaaggccaggctcgctggtgcaggcagttgggcatctctgacggtggcccatgggcgaatcagggccccaacaccctcccctcctcgcagggaccccggagaacggcagcgagcctgagagcaggtccccggacaacaggacccagctggtccccgcgtgcatgccagggggacgctggtgccctggagccaacatctgcttgccgctggacgcctcctgccacccccaggcctgcgccaatggctgcacgtcagggccagggctactcgggtccccctatgcgctatggagagagttcctcttctccgttcccgcggggccccccgcgcagtactcggtgtgtggccctgacctgggtctgttccctgcatctcctcaggccaccttcctgtctgctgcccagggtctgggtctgcgcagcagacacacccagcctgcaggcccctcccacgtccttgccacctctgacctccgacctccgacctccaacctccgacctctgcagtgcctttgcccctctcccagtgggagaagctctcgcctgggcccttggcacgagctgtgcctcctcttcctctctcccagcacagccgctccttcctgtctgtcaggtcttggcctgtgtcctctccccgtgtgtccccctgtctgcaactgtcctgcctgtccttgtcacgagcactgtggggaggctccctgaggtgtggctgacgaagcggggagccctgcgtgtccaccctcatccgtcgtgcaggggtccacgggccatgaccgtgaggacgtgatgcagccctgcctccctctccacaggtcaccctccacggccaggatgtcctcatgctccctggtgacctcgttggcttgcagcacgacgctggccctggcgccctcccgcactgctcgccggctcccggccaccctggtccccaggccccgtacctctccgccaacgcctcgtcatggctgccccacttgccagcccagctggagggcacttgggcctgccctgcctgtgccctgcggctgcttgcagccacggaacagctcaccgtgctgctgggcctgaggcccaaccctgggctgcggctgcctgggcgctatgaggtccgggcagaggtgggcaatggcgtgtccaggcacaacctgtcctgcagctttgacgtggtctccccagtggctgggctgcgggtcatctaccctgccccccgcgacggccgcctctacgtgcccaccaacggctcagcctcggtgctccaggtggactctggtgccagcgccacggccacggctcgctggcctgggggcagtgtcagcgcccgctttgagaatgcctgccctgccctggtggccaccttcgtgcccagctgcccctgggagaccaatgataccctgttctcagtggtagcactgccgtggctcggtgagggggagcacgtgatggacgttgtggtgga

SEQ ID NO: 15400 - DNA, 2300 bp, Homo sapien
cttccctcccctcttcctgcgaagttcgggtggggggagtctgggcttcaggctgggatggggtctgtggagctgaggcggccccctgcccaccaggtcatggtattcccgggcctgcgtctgagccgtgaagccttcctcaccacggccgaatttgggacccaggagctccggcggcccgcccagctgcggctgcaggtgtaccggctcctcagcacagcaggtgggactctggggtggtgggcgccgcaggactcggggtggcctctctgagctctcacgtctgctggtcctgtggccatcagagtggttcccagtcttaggtggacagagcaggggttccagagacaccagctcattccaggtgtcctgggggtggatcgggtggggcctgcctggggaccggcctgggtcagtcagctggccggagacagggacgcagcactgggctgggagtgctgcccgggcggggagacctgtcctcacagcaaggccaggctcgctggtgcaggcagttgggcatctctgacggtggcccatgggcgaatcagggccccaacaccctcccctcctcgcagggaccccggagaacggcagcgagcctgagagcaggtccccggacaacaggacccagctggtccccgcgtgcatgccagggggacgctggtgccctggagccaacatctgcttgccgctggacgcctcctgccacccccaggcctgcgccaatggctgcacgtcagggccagggctactcgggtccccctatgcgctatggagagagttcctcttctccgttcccgcggggccccccgcgcagtactcggtgtgtggccctgacctgggtctgttccctgcatctcctcaggccaccttcctgtctgctgcccagggtctgggtctgcgcagcagacacacccagcctgcaggcccctcccacgtccttgccacctctgacctccgacctccgacctccaacctccgacctctgcagtgcctttgcccctctcccagtgggagaagctctcgcctgggcccttggcacgagctgtgcctcctcttcctctctcccagcacagccgctccttcctgtctgtcaggtcttggcctgtgtcctctccccgtgtgtccccctgtctgcaactgtcctgcctgtccttgtcacgagcactgtggggaggctccctgaggtgtggctgacgaagcggggagccctgcgtgtccaccctcatccgtcgtgcaggggtccacgggccatgaccgtgaggacgtgatgcagccctgcctccctctccacaggtcaccctccacggccaggatgtcctcatgctccctggtgacctcgttggcttgcagcacgacgctggccctggcgccctcccgcactgctcgccggctcccggccaccctggtccccaggccccgtacctctccgccaacgcctcgtcatggctgccccacttgccagcccagctggagggcacttgggcctgccctgcctgtgccctgcggctgcttgcagccacggaacagctcaccgtgctgctgggcctgaggcccaaccctgggctgcggctgcctgggcgctatgaggtccgggcagaggtgggcaatggcgtgtccaggcacaacctgtcctgcagctttgacgtggtctccccagtggctgggctgcgggtcatctaccctgccccccgcgacggccgcctctacgtgcccaccaacggctcagcctcggtgctccaggtggactctggtgccagcgccacggccacggctcgctggcctgggggcagtgtcagcgcccgctttgagaatgcctgccctgccctggtggccaccttcgtgcccagctgcccctgggagaccaatgataccctgttctcagtggtagcactgccgtggctcggtgagggggagcacgtgatggacgttgtggtggaaaacagcgccagccgggccaacctcagcctgcgggtgacggcggaggagcccatctgtggcctccgcgccacgcccagccccgaggcccgtgtactgcagggagtcccagtggtgagtatggccgaggctccaccaccagcccccaggcaggtgcctgcagacagggtgctcacacagggcgtgaggcctggcttcccagtgagggcggcagcccagttactggggacgtcggccccgggcaggtcctgctggctggctcctcaggctacctggtgggctttaaattcctggaaagtcacggctctgacagcggctccgctaactcattccaccgtctcatttcacgaaatgaattt

SEQ ID NO: 15401 - DNA, 2300 bp, Homo sapien
cagtgctgctgcacctgtgctccgtcccgcacgtggcttgggagcctgggacccttaaggctgggccgcaggtgcagccgttcaccccgggctcctcaggcggggggcttctgccgagcgggtggggagcaggtgggggtgccgcggctgccccacttgggcctgtccccacaggtgagtacgtcctgaccttgctggcatctaatgccttcgagaaccggacgcagcaggtgcctgtgagcgtgtgcgcctccctgccctctgtgagcgtgtgcgcctccctgactggggcctgctggtaccccagagtgggtgtctgttccccagtccctgctttcctcagctggcctgattgggggtctgcccagaggggtcgtctgaggggagggtgtgggagcaggttccatcccggctcagcctcctgacccaggccctggctaagggctgcaggagtctgtgagtcaggcctacgtggcaactgcggtcctcacacccacacatacgtctgttcccacacgcatccccccaggggccctcagtgagcattgcctgcctcctgccagggtccagctgggtccagtacaccagaacgcacaccccagtgtcctctgccctgtgtatgcccttccgccgcccaggttggaaggtggcaaaccggatgagtatcctgggagggggtgagctcaccggcagtggccaggcccctgggaaacctggagtttgggagcagcatcctccacgggtcccccagaccttccagcaggccaaatagacctgtgttggaggtaaccccactcccacgccaggtgctgatccgcagtggccgggtgcccattgtgtccttggagtgtgtgtcctgcaaggcacaggccgtgtacgaagtgagccgcagctcctacgtgtacctggagggccgctgcctcaattgcagcagcggctccaagcgaggggtgagtgttgagcggggtgtgggcgggttggggatgggtcccatggccgaggggacggggcctgcaggcagaagtggggctgacagggcagagggttgcgccccctcaccatcccttctgcctgcagcggtgggctgcacgtacgttcagcaacaagacgctggtgctggatgagaccaccacatccacgggcagcgcaggcatgtgactggtgctgcggcggggcgtgctgcgggacggcgagggatacaccttcacgctgacggtgctgggccgctctggcgaggaggagggctgcgcctccatccccctgtcccccaaccgcccgccgctggggggctcttgctgcctcttcccactgggcgctgtgcacgctctcaccaccaaggtgcacttcgaatgcatgggtgagtgcaggcctgcgtagggggagcagcgggatcccccgactctgtgaggtcacggagccctcctgtgatgccgtggggaccgtccctcaggctggcatgacgcggaggatgctggcgccccgctggtgtacgccctgctgctgcagcgctgtcgccagggccactgcgaggagttctgtgtctacaagggcagcctctccggctacggagccgtgctgcccccgggtttcaggccacacttcgaggtgggcctggccgtggtggtgcaggaccagctgggagccgctgtggtcgccctcaacaggtgagccaggccgtgggagggcgcccccgagactgccacctgctcaccacccccctctgctcgtaggtctctggccatcaccctcccagagcccaacggcagcgcaatggggctcacagtctggctgcacgggctcaccgctagtgtgctcccggggctgctgcggcaggccgatccccagcacgtcatcgagtactcgctggccctggtcactgtgctgaacgaggtgagtgcagcctgggaggggacctcacatctgctgcatgcgtgctggggaccaagacctgttcccctgcctggagctttgcggagggctcatcccgggccccagagataaatcccagtgaccctgaagcagcaccccgacgttccgctcccagcagccacacccaccaggccctctccggcgtctgctttccacaatgcagcccccgcccaggagggcccatgtgcttaccctgttttgcccatgaagaaacagctcagtgttgcgggtcagtgcccacatcacacagcatctagcacgtaactgcaccccgggagtcgtgggcatctgctggcctcctgccggcctcctgccctgctgacagcttgctgtgccccctgcctgccccagtacgagcgggccctggacgt

SEQ ID NO: 15402 - DNA, 2300 bp, Homo sapien
agggtgggcagcccacgttctacacagtagcgtagccccacaagttacgtgagcatcgctaccactgtgggagaccatgcatccacccgcgatcctgactgcatagctcgtctctcagacggaggcgccagcaccctccccgtggctgtttcttcaatacctccattttcctttctttggaattgcccttctggcattccctttttgttttcgtttttctttttttggagacggagtctcgctctgttgcccaggctggagtgcaatggcgtgatcttggctcacagcaacttccagctcctgggtttaagcgattccccttaagcgattctcctgagtagctgggagtacaggtgcacaccaccacacccagttaatttttcaccatgtcagccaggcgaactcctgacctcaggtgatccgcctgcctcggcctgccagagtgctgggatgacaggtgtgagccaccacacctggccgtgttcccattttttatttccatgctgctttcatcttcatttcccagttctttcttttgattacctacttttaaaaactgtcggccgggtgcggtggctcacacctgtaatccgagcactttgggaggctgaggcaggctaatcacggggtcaggagatcgagaccatcctggctaacggtgaaaccctgtctctactaaaaaatacaaaaaaattaggccggcgtggtggcaggcgcctgtagtcccagctcctcgggagactgaggcaggagaatggcgtgaacccgggaggcggagcttgcagtgagctgagattgcgccactgcactccagcctgggtgacacagcaagactccatctcaaaaaaaaaaaaaaaaaaaaatactgtcacctgggtctgtcactgggagaggaggtgacacagcttcacgcttcgcagtctgtgcatgaactgagggacgggtgtgtggtgcaggtcaccggttgtggcgtgactgaggtgtggacaggtgtgcagtgcgggtcactggttgtggtgtggactgaggcgtgtgcagccatgtttgcatgttacaagttacagttctttccatgtaacttaatcatgtccttgaggtcctgctgtttattggacaaattgcagtaaccgcagctcctcgtgtatagcagagctgtgcaaagccgggactgcctgtgtggctccttgagtgcgcggaggccaaagctgagatgacttgcctgggatgccacacgtgttgggcagcagaccgagcctcccacccctccctcttgccctccaggtaccacggcccacgtgggcatcatgctgtatggggtggacagccggagcggccaccggcacctggacggcgacagagccttccaccgcaacagtctggacatcttccagatcgccaccccgcacagcctgggtagcatgtggaagatccgagtgtggcacgacaacaaaggtctgtatggaccctgccaagctctgcccctctgcccctgcattggggcgccctgcgaacctgacctccctcccgcgcctctgcagggctcagccctgcctggttcctgcagcacatcatcgtcagggacctgcagacggcacgcagcaccttcttcctggtcaatgactggctttcggtggagacggaggccaacgggggcctggtggagaaggaggtgctggccgcgagtaaggcctcgttccgtgttcccactccgtgggaggttgggcagggtggtcctgccccgtggcctcctgcagtgcggccctccctgccttctaggtcacgcagccctgttgcgcttccggcgcctgctggtggctgagctgcagcgtggcttctttgacaagcacatctggctctccatatgggaccggccgcctcggagctgtttcactcgcatccagagggccacctgctgcgttctcctcatctgtctcttcctgggcgccaacgccgtgtggtacggggctgttggagactctgcctacaggtgggtgccgtaggggtcgggacagcctcttcctgcccagcccttcctgcccctcagcctcacctgtgtggcctcctctcctccacacagcacggggcgtgtgtccaggctgaacccgctgagcgtcgacacagtcgctgttggcctggtgtccagcgtggttgtctatcccgtctacctggccatcctctttctcttccggatgtcccggagcaaggtgggctggggctggggacccgggagtactgggaatggagcctgggcctcggcaccatgcccagggccgccactttccagtgctgcagccagaggg

SEQ ID NO: 15403 - DNA, 2300 bp, Homo sapien
cttctaggtcacgcagccctgttgcgcttccggcgcctgctggtggctgagctgcagcgtggcttctttgacaagcacatctggctctccatatgggaccggccgcctcggagctgtttcactcgcatccagagggccacctgctgcgttctcctcatctgtctcttcctgggcgccaacgccgtgtggtacggggctgttggagactctgcctacaggtgggtgccgtaggggtcgggacagcctcttcctgcccagcccttcctgcccctcagcctcacctgtgtggcctcctctcctccacacagcacggggcgtgtgtccaggctgaacccgctgagcgtcgacacagtcgctgttggcctggtgtccagcgtggttgtctatcccgtctacctggccatcctctttctcttccggatgtcccggagcaaggtgggctggggctggggacccgggagtactgggaatggagcctgggcctcggcaccatgcccagggccgccactttccagtgctgcagccagagggaaaggcgtccaccaaaggctgctcgggaagggtcaacacacttgagcagccttagctagactgaccagggagaaagagagaagactcagaagccagaatcgtgaaagaacgagggcacttcgctaagcagacgccacggacaactgcacagcagcacgccagataactcagaagaagcaagcacgcggctgtgcacgcttccgaaatgcactccagaagaaaatctcagtacatctatagcaagtgaagaggccgagttagtcccttagaaacctcccagtggccgggccgggtgtggtggctcacgcctgtaatcccaacacttcaggaggccgaggtgggcggatctgagtccaggagtttgagaccagcctgggcaacatagcaagaccccatctatataaaacattaaaaagggccaggcacggtggctcatgcctgtaatcccaacactttgggaggccgaggcgggcagatcagttgaggtcaggagttcgagaccagcctggccaacacaatgaaaccccatctctactacaaatacaaaaacagctgggcatggtggcgggcgcctgtagtcccagctactcgagaggctgaggcaggagaatggcatgaacccaggaggcggagcttgcagtgagccgagattgcgccactgcactccatcctgggcaacggagcaagactccgtctccaaaaaaaaaaaaaaaaaaaatcccacaaagaaaagcccaggctcagagccttcacgatagaatttttctaagcagttaaggaagaattaacaccaatccttcacagactctttccaagaatacagcaggtgggaactcttcccattcatacggaaacgggaggccgcaccccttaggaatgcacacgtggggtcctcaagaggttacatgcaaactaaccccagcagcacacagagaaggcgcataagccgcgaccagcaggggttgctcccgagtccgtggcaggaaccagaggccacatgtggctgctcgtatttaagttaattaaaatggaacgatggccgggtgtggtggctcacacctgtaatcccagcactttgggaggcggaggcgggcagatcacttgaggtcaggagttccaagaccagcctggccaacacagtgaaaccccgtctctactaaaaatacaaaaaattagctgggcatcgtggcaggcacctgtaatcccagctactaaagaggctgagccaggacggacaatcgcctgaacgcgggaggtggaggttgcagtgagctgagattgcgccagtgcactccagcctgggtgacagagcgagactccatctaaaaaaaaaaaaaatgaaatttaaaactctgttccttagctgcaccagtctgctgtcaaccgttcagtggcacatgtcgcgaggggctgccatcacggacggtgcagatgtcccatatatctagcattctagaacattctgtcagatggcaccgggctctgtcctgtctgctgaggaggtggcttctcatccctgtcctgagcaggtctgagctgctgcccgctgaccactgcccttgtcctgcaggtggctgggagcccgagccccacacctgccgggcagcaggtgctggacgtcgacagctgcctggactcatccgtgctggacagctccttcctcacgttctcaggcctccacgctgaggtgagggctctactgggggtcctgccgccttggcgcagcttggactcaagaccctgtgcacctctcagcaggcctttgctgg

SEQ ID NO: 15404 - DNA, 2300 bp, Homo sapien
ttttaatcctatgtgcagaaatcaggaaaaaacaagttctacaaagaatttgaaagatattatttcaggccaggtgtggtggctcatgcctgtaatcccagcactttgggaggctgaggcaggtggatcacttgaggtcaggagttcaagaccagatgggccaacatagtgaaaccccatctctactaaaaagacaaaaattagccaggcatggtagcaggcacctgtaatcccagctacttgggaggccgaggcacaagaatcgcttgaatctgggaggtggaggttgccgtgagccaaggtagtgccactgcacttcagcatggttgagtgacactccgtctcaagaaaaaagtcatttcaatgactacctcaggagattcataggtatctgacccacatctgagatgggatttgcattgcattttagctatgatgagaacaaatatttaatatcttcgaagattaaaagcatactgtgataatatggaaatcttggtgggaattcagtcattagtgagaatgttttgcgttaagttcaaaccagcctcaacgaagctgatgtgagggaagggaaagtgaactctgagtagagcagggacagaagaaagatgctccagtgcagatcaggaaggagcagggggtgaaatgttacaaattctagaactcagagagctgaaggtaattaattacttccttttcaagttgtgaaacatgttaacctgtggtaaaatacttacaagatgataattaccatctaaccgtgttgaagtgtacagttcagttgtgtgaagtatattcatgtcattttttttttttttttttgagacggagtctcactctgtcaccaggctggagtgcagtggtgggatcttggctcactgcaacctctgcctcttgggttcaagcagttctcctgcctcagcctcccgagtagctgggactacaggcgtgcgccaccatgctcagctaatttttgtatttttagtagagacggggtttcaccatgttgcccaggatggtctccatctcttgaccttgtgattcacccgcctcggcctcccaaagtgctgggattacaggcgtgagctaccgcacctggcctatatatttttttttttttttttgagacagagtttgaattttgttgcccatgttggagtgcaatggcacaatctcagctcaacacaaccttttcctgctgggttcaagtgattctcctgcctcagcctcccgactagctgggattacaggcatgcaccaccatgcctggctaattttgtatttttagcagagacagcgtttctccatgttggtgaggctggtctcaaactcccgacctcaggttatccgcctgcctcggcctcccaaagtgctgggattacaggagtgagccaccatgccagcctcatgtcattcttgtgtgttgtgtgtgtgtgtgtgtgtgtgtgtgtgacagagtctcattctgtcactcaggctggagtgcagtggtgtgatctcggctcactgcaacctccacctcccagcttcaaacggttctctgcctcagcctcccgagtagctcggattacaggcgcccactgccatgcccggctaatttttgtatttttagtagagatggggtttcaccatcttggccaggctggtcttgaactcctgaccccgtgatccaccctgcctcggcctcccaaagtactgggattatacgcatgagccaccgtgcccagccgtcattcttatattattatttcctaggtgtctttcctgaagactatcttcccgtctcaaaatggacatgatggatccacggatgtacagcagagagccaggaggtccaactgccgtagacaggaaggtatggctctgttggagtccccatagtgtggaaatgagtttgccctggaaagggaaagaacagcttcttgccctcaggtttctcaccttctcctctcctcactctcaccaagggctgaggtccgtttgtatgcacacaaagaaaagagtttcttcctttccaggaattaaaattgtcctggaagacatctttactttatggagacaggtggaaaccaaagttcgagctaaaatccgtaagatgaaggtgacaacaaaagtcaaccgtcatgacaaaatcaatggaaagaggaagaccgccaaagaacagtaagatgtgccttgacacaaatactgttgtatgaaccatgtgccaatcaaagtagacaactgtaaagtccttgagaatattttctacaatatttgtggcaaattcagtgggttcaaaattgagcttgtccttt

SEQ ID NO: 15405 - DNA, 2300 bp, Homo sapien
aggcctttgctggacaggtgaagagtgacttgtttctggatgattctaagaggtgggttccctagagaaacctcgagccctggtgcaggtcactgtgtctggagtaccgggggtgtgcgggctgcgtgtccttgctgggtgtctgtggctccatgtggtcacaccacgtgggagcaggtttgctcggaagcccagggtgtccgtgcgtgactggacgggggtgggctgtgtgtgtgacacatcccctggtaccttgctgacccgcgccacctgcagtctggtgtgctggccctccagcgagggaacgcccagttggccggacctgctcagtgacccgtccattgtgggtagcaatctgcggcacaacccccacttactgggtctctccttttacaaccaacacaaccgaaatctagggcttctttttttttttttttttttttgagacagagtctcattccattctgtcacccaggctggagtgcaatggtacgatctcggctcactgcaacctccgcctcccgggttcaagggattgtcctgcctcagcctcctgagtagctgggattacaggcgtgtgccaccatgcctggctaatttttgtatttttggtagagacggggtttcagcatgttggtgaggctggtctcgaactcctaacctcgtgatccgcctgcctcagcctcccaaagtgctgggattacaggcgtgagccaccatgcccagccaaatctagggctggaacatggctgcagcatataaatagaattgaattccatagttttgttaatcctgttttttgtttgtttgtagttgttgctgtttttgagacagagtctcgctctgtcgtctaggctggagtgcagtggtgtaatctcggctcactgcagactctgcctcccgggttcaaactgttctcctgcctcagcctcccaagtaggtgggactacaggtgcccaccaccacacccggctaatttttgtattttattagagacagggtttcaccatattggccaggctggtctggaactcctgaccttgtgatctgcccacctcggcctcccaaagtgctgggattacaggcgtgagccaccacccccagcccctgttttgtttttgttttgcttgtttcttagggttgtttttctatttatggtaaaggcattggctttccatttgtagcatcaatagaatatttcctgtttacaataaccttatgtcatagtaaatggtaaagggatttaaagcagtggttttcagctgccagaggcctgagagagtttgggcacactctgtgtgatcgggcagaaggcctgtgggaagtttagctgaggacagggccaggaaaggtgatggacagtgggggtctgtcctggtcaccaggcccctgggtcctgcccgcctgcttggagctccccacccatcacacatgatgcggccaagccctctgggtattgtgggcaaataccttaggagagaagctgatgaactttgtttcttgaaatgcacagattccttggacgtccctgagagctcagtcatgaaagtcagcttggttttctccccctcatttgggttcagaatttaaagtccacacacacgggcagtaagatgacatagataaggacatcatcactcagtttcggatgttaaaatgtctaggtgggttaggggtgatttgagatcacacaaccttgtgccacaaagaggaattcccaggccagagggagacattttattgccatgttatgatctcatcattgagttgaaaggcaatcttgtttcattttggattctttcttatgtttatgtcttataagggcactttgaatttccaagcaaataataattttgaattagcttttaatcattgacttctagcacagttttatgatcagaaacatgctgtgtgatttgattgctctcaaatatattgagatttgctggaacaaaataagtcaggttaatttttgtaaatgtaccatgcatgcttaaaatgaatgtatgtacatttgttcctgagatacaggttgatggacggatggctacatggatgtgatggagatggtttactatcgggaccttccgcatcctgctgatgttttgttgcttaggatatgaatggctgagcggaggctgtacaacctggcactctgcttgggtatgaggttcttcctgccatcctgccatcatttgttttttatgttttgtcgccaaaagtgaccttgaggaaccctgggagctcaggaaggaaggagcgcccagaagcagggacagggagctggttggggaggacca

SEQ ID NO: 15406 - DNA, 2300 bp, Homo sapien
ttttttttaatcctatgtgcagaaatcaggaaaaaacaagttctacaaagaatttgaaagatattatttcaggccaggtgtggtggctcatgcctgtaatcccagcactttgggaggctgaggcaggtggatcacttgaggtcaggagttcaagaccagatgggccaacatagtgaaaccccatctctactaaaaagacaaaaattagccaggcatggtagcaggcacctgtaatcccagctacttgggaggccgaggcacaagaatcgcttgaatctgggaggtggaggttgccgtgagccaaggtagtgccactgcacttcagcatggttgagtgacactccgtctcaagaaaaaagtcatttcaatgactacctcaggagattcataggtatctgacccacatctgagatgggatttgcattgcattttagctatgatgagaacaaatatttaatatcttcgaagattaaaagcatactgtgataatatggaaatcttggtgggaattcagtcattagtgagaatgttttgcgttaagttcaaaccagcctcaacgaagctgatgtgagggaagggaaagtgaactctgagtagagcagggacagaagaaagatgctccagtgcagatcaggaaggagcagggggtgaaatgttacaaattctagaactcagagagctgaaggtaattacttccttttcaagttgtgaaacatgttaacctgtggtaaaatacttacaagatgataattaccatctaaccgtgttgaagtgtacagttcagttgtgtgaagtatattcatgtcatttttttttttttttttttttgagacagagtctcactctgtcaccaggctggagtgcagtggtgggatcttggctcactgcaccctctgcctcctgggttcaagcagttctcctgcctcagcctcccgagtagctgggactacaggcgtgggccaccatgctcagctaatttttgtatttttagtagagacggggtttcaccatgttgcccaggatgatctccatctcttgaccttgtgattcacccgcctcggcctcccaaagtgctgggattacaggcgtgagctacagcacctggcctatttttttttttttttttgagacagagtttgaattttgttgcccaggttggagtgcaatggcacaatctcagctcaccacaaccttttcctgctggattcaagtgattctcctgcctcagcctcgcgactagctgggattacaggcatgcaccaccatgcctggctaattttgaatttttagcagagacagcgtttctccatgttggtgaggctggtctcaaactcccgacctcaggtgatccgcctgcctcggcctcccaaagtactgggattacaggagtgagccaccctgccagcctcatgtcattctttgtgtgtgtgtgtgtgtgtgtgtgtgtgtgtgtgtgacagagtctcattctgtcgctcaggctggagtgcagtggtgtgatctcggctcactgcaaactccgcctcccagcttcaaacggttctctgcctcagcctcccgagtagctcggattacaggcgcccactgccatgcccggctaatttttgtatttttagtagagacggggtttcaccatcttggccaggctggtcttgaactcctgaccccgtgatccacctgcctcggcctcccaaagtactgggattatacgcatgagccaccgtgcccagccgtcattcttatattattatttcctaggtgtctttcctgaagactatcttcccatctcaaaatggacatgatggatccacggatgtacagcagagagccaggaggtccaaccgccgtagacaggaaggtatggctctgttggagtccccatagtgtggaaatgagtttgccctggaaagggaaagaacagcttcttgccctcaggtttctcaccttctcctctcctcactctcaccaagggctgaagtccatttgtatgcacacaaagaaaagagtttcttcctttccaggaattaaaattgtcctggaagacatctttactttatggagacaggtggaaaccaaagttcgagctaaaatccgtaagatgaaggtgacaacaaaagtcaaccgtcatgacaaaatcaatggaaagaggaagaccgccaaagaacagtaagatgtgccttgacacaaatactgttgtatgaaccatgtgccaatcaaagtagacaactgtaaagtccttgagaatattttcgacaatatttgtggcaaattcagtgggttcaaaattgagtttgtccttt

SEQ ID NO: 15407 - DNA, 2300 bp, Homo sapien
agcaatggcaacaaaagccaaaattgacaaatgggatctaattaaactaaagagcttctgcacagcaaaagaaactaccatcagagtgaacaggcaacatacaaaaatgggagaaaatttttgcaatctatccatctgacaaaggtctaatatccagaatctacagagaactcaaacaaatttgcaagaaaaaaatcaaccccatcaaaaagtgggcaaaggatatgaacagacacttttcaaaagaagacatttatgcagccaacagacacatgaaaaaatgctcatcatcactggccatcagagaaatgcaaattaaaaccacaatgagataccatctcacaccagttagaatggccatcattaaaaagtcaggaaacaacagatgctggagaggatgtggagaaataggaatacttttacactgttgggagtgtaaactagttcaaccattgtggaagacagtgtggtgattcctcaaggatctagaactagaaataccacttgacccagccatcccattactgggtatatacctaaaggattataaatcatgctactataaacacacatgcacacgtatgtttattgcggcactattcacaatagcaaagacttggaaccaacccaaatgtccatcaataatagactgtattaagaaaatgtggcatataaacaccatggaatactatgcagccataaaaaaggatgagttcatgtcctttgtagggacatggatgaagctggaaaccatcattctgagcaaactatcacaaggacagaaaaccaaacactgcatgttctcactcataggtgggaattgaacaatgagaacacttgaacacagggcggggaacaccacacactggggcctgtcatggggtggggggatgggggagggatagcattaggagaaatacctaatgtaaatgacgaattaatgggtgcagcaaaccaacatggcacatgtattacctatgtaacaaacctgcacattgtgcacatataccctagaacttaaagtataataattaaaaataaataaataaaaatgttttaagttatgccctttcacagtctataaggatacttttctgagagaaagaaatacgaaagactcttctatataagaaaagatgctagcttactcacaaaggagaaatgccacttaaaaccataatgaggccatttctgccttatcagagtgccaagaattgtaaagtttgatcataccctgtgtaggaggacaaagctcttttatacattattgattgaggaacaaattggtatgatctctgtgatgagaaatttgtcgatagctatcagaattataaaagcacataacttttgacccagcaaattcccttctagaaatttattctacagtataactgcataggagcaaaatgactgtattgctcaaggttctccagaggaagagaatcaatacagtatatataggcaaagatttattatgggaattagcttacatgattgtggtggcccagaggtcccatgatctgccatctgcaagctgaagaacccaggaagccagtgatgtcattcagtccaagtccaaagaccaagaactggggaggccactggtgtaagtcccagagcctgtagccctgagaaccaggagctccagtctccaagggtgggagatgaatgtagcagctcaacaagacagagaactcaccctttttccgcctttttcttctatctgggccttcagcggattacgccatgcccacccacattgctgagggccatcttctttactcagtctgctgatgcaaacactaatctcttttggaaatgttttagcagatatactgcaaaacaatgtttgaccagctatctaggcatcccttagcccagttaacaaataaaattaaccatcacaatgacgtatgcacagtgctattcattgcagcattgctaatattgaagcattgctaatataaaagcaaaagaaataaagtaacttaaatttacatcaaaatggtctacacttaaataatccctatagcggattttaagttatccgtgcagtggactattatgtagcagtggaaaagaattaagcttgaagatggccgaataggaacagctccggtctacagctcccagcgtgagcgacgcagaagacgggtgatttctgcatttccatctgaggtaccgggttcatctcactagggagtgccagacagtgggcgcaggccagtgtgtgtgcgcaccgtgcgcgagccgaagcagggcgaggcattgcctcacctgggaagcgcaaggggtcaggg

SEQ ID NO: 15408 - DNA, 2300 bp, Homo sapien
gggcctgaaccccggcctcccaccctgggggaggccctctgtgaatgggtctctcctggccatagaatgatggaaagggaaggtcagcaggtcaaagcaggatcagccaacaacctgcctttggcaagctgcgggtgggatggctcagtccctgcactgtgactgtctcacctcttctggttgatcctcaagtcctacaggttccttgtcttccccttccagtgacccacccctgaccccagacgtgtgattttcagacttttctttcgagcagcagaacttcgtttacggagcacagtcataagtggaggttcagggtgctgacgaaatccaagctgctctggttgaagctgacaagtgcgaggttccctcccaaagctcagccctctgggcggtccccttgcccagggtatctcctacggtacctcttcagaacccaagggctctgcaaatgccagtttgacaagcactgcccagaccaaccatgggttcaaactccagccctgccctttggttcatttttctgcttctcttggctgggggactctggtgccagccttgaaagtcatggtcgtgggccctttcccatggaggctgcagccttaggagagctctgagcctctcagcagccctccttgggttgaactattctccttagtaactaggtaagtgggaaagccttttgatgtggcatggccaaggtccagccacaagtgcaactgccacctgtccaggggtctgggcctccttccctcaaggctgccacacaaagtagcagaaataggatgatgtttgtgagcaccagactcaagaccatgaccttctttgatccttgaaaatgggaactttgacagccatgaccatgaaactcacaaggcaacgcgatgaaactcacaaagcaatgcttggagcaaaactcctgagctagacagcacagcagcacccatcccctgccagagcccttccgttctgaggtcagacacacaaaaccttcgtcaattgcacaccggtgctgttgggagtgaccaaaccacatgaaccagacttttcccgtccaggaaatagcatttcagatttggtttttaatttcatgcccttcggccacaggctcaacgggacatgcaacataaaaatgggaaggttatttaaacaacaaaaaacagtatgatttaagtgttgagttaccagaaacccaaaaggtttccttgccacgagccccctggagtgtcatccctgttcaccaggagagctcttcgcaggaggcctcccttgctcctgtaatcccacctcccctgaatgatgggattcccttggaaaaaggtctcacccctggtagccatctgcccttcccatggagagccagtcctgacacttctctccagcgtgggtttgaaggggctgcccttcgctttgtgtgacttgtcctaatcctagccagatgtgttgccccatcccaagcctcgcaaggcagggtgtcctgttggcaatggaggacgtagagaagggacactttagatatttattatttacatgttttagtcgatgactaattagtaggtgctgtttttgcagcttgtcaattatgttaccttactaactgaagctgcctttattcacaaaaggccccttttcccatcttttcccaccccctggtgtctctctctctctcggtttctctttctctgcgtctaccccccatcctcctcatcctcagagtaaagcaggggcatcgaacaccacgcaaagaaagctccaacccgcatcttccactggctttgagtggggtgccttggggaccgttggagccttgtttttttccttatgcagagtgtcagcctcactctccctcggattccaagagtattggaattcctgagcctcccatcctccccctactcaccccccgtcacaggcacaaggaggtgacaggcagaaaacgtggagggtgagtggggaatgtgctagctgcagagagtttgtggggaatgtgctagctgcagagagtttgggccattcctgcttgctccgtggttgccttcccatggcccatctaattatgggcattcatgcgaccttaacagagggaaacaggctcctttgagagagatccatcttaggaggagggtcgtcagatccaggcagcagagtccgggagatagccattctcaacagcgattccagggatctcagggtacttttctcagaaagcccctatgatctcttttacagactctatggtggccacgcgctgggtgccacatcctctttctgcccccggcctctgcctctggccagggttt

SEQ ID NO: 15409 - DNA, 2300 bp, Homo sapien
agagagtgaatgaattcatgaatggaaggcaatatgtagcacagtggatgagaatgcagcctctggggctggactttatgggttcccatgctggctctgccccctctgaccatagcgagttatctcacttctctgagactcagtttccacatctgtaaagtaaagataatgacaagggtctcccctttatggatttgggagtatcaactgaatggacacgtctgcctggcacactgtaatccctcagcaaatattagcagtgaagctctgtaagctgggtaaagaatggactgacatagtacctcttgcaagaacaatgagaagctagatcagctcctatttcccctgcacataggaaatctcagaatgtgggtatgtgtatccacacccgaccttcgtgcacacacacattagagatgctaattatgggaagacagcagaggcagtgcaagcttcatactgtacccgttatttgccccaacatgcccacatgctgtgtcctcaaaaccactaagttaatccacctgggggagatctttttttcaaattagatgacccctaatttaatttgatttgaaatagcaacaaaggtccttgtcaggaatctccctagttcattcagtttttggtcaagccattcacccattcattcaacaaacattactcgagcacctgctgtgtactaagcatggtagtaggcaccaagaaagagcagggaaccagccaggtaaaacccctgttcacacagagcttatattacagctggaggagataaagaataaatacatcaacatacaactctgagatagtgcttatcaccactgataggaagaaaataaagcagtagggaatgacacagattgactgaaggtccatttgaaatttggggtggggggtggtcagataaagactctgtgaggcagctttagacataaggggctggctgtgcaagaaaggagtattccacacagggcagatggtgcaggaaagctgagctgggaatgagcctgccttgattgaggtggctaaaacaaggcatcctggagaaagatggggagggggtcatggagatggaggatggggtgagctcagactctgagtgcactaagaagcctgggggcagcagtaagaggacattttacaaggcctttctgactacaggatatagaagaaattgcaggtggcacaagtggaaggagggaagcccaccagagaggattgctgtgggtcacagctgcacacacccccagctggctggcaggaaggaaggatcgcaggatgactctcatgcttacagtccagatctaggtgccttgggaaagccaaagctgtctcttcctaggaaacctatttgaacccctgtagatgacaggcaatgctgagggtctctagcttatgatagagcagctgtaaaaacatgatctctattcttgttcagaaccattgcaccaagtggaggtgtgtgatttagaaaaccaaggatggaattggaaacccgctgtacctgttgagtggcagggtgtatgtttctgtggaatggcctgcaagcaagacatgcattcattcattcattcattcgttcattcattcactcattcagctcatgtgtggttttcttttcaaagcacatgccatacaccaggcacaggaggcccggtggtttaataaaaggaccacaggccttttgatccttcagactgagtccagatgccagatcttctgcttacaagctgtgcaaccttgagcaggtgacttagttggagcctcagtttcttcatctgtaaaatgggtatatgaaagctaacaaaggggatcctagacctttctgagacctagccccctagttcaggcccagtgacttcagaattcactcccctgtttcaggtcggcactgactgggatgccaaggagaggctattccgcaactttgggggtcttctggggcccatggatgagccggtgggtatgcagaagtgggggaagggacctaatgtgaccgtgaccgtcatttgggtggatcccgtcaatgtcatcgcagccacctacgacatcctcattgagtccactgccgaattcacacactacaagccccctttgaacttgcccctgaggcctggggtctggacagtgaaaattctccaccactgggtgccagttgcagagaccaaattcctcgttgcgcctctgaccttctcgaacaggcagcccatcaaacctggtaagtactcccagtgtctatgtgggagaaatactccttccctggggaccttgagggtctttggtgttggtaggcagcactg

SEQ ID NO: 15410 - DNA, 2300 bp, Homo sapien
cttgctgccttgatttgaattttagatatgagtggatctaagcatttttttacatggggtatttgtgaattccatagctccatttttcaggattctgggtcctaatgttctgattgtctgcctccttggaggaaatgatggataatgatggctaaaaattgttgagcatttactatgtgccagcccctgtgctaagtgcagtgcatggattaactcagtcttcccataaggaagattctctttaatctccccataaacctgtgtaagtgaggtatggttgttatgccctctttcaaatagcaaaactgaggcacagagaggaaagggttaactgagtcacccaaggtcatatagagagtgagtggggagctggtctttggacctacgcagaactcttaactaccattctgtgcagtttgtgtaattggtaatggtggcgattgttctttaagatttaaccattctgtgatacctcgaaagcagaaaaccaaaatgttcctgggtaaggaaatgatctgaacacaggcatggcgctctgcctgagcttggggccccagcccatgtggtggcagctggagacagagctctgtgttcagcctgtgaaagacagctgagctgcaggcacattctgtgacatgcccacggccatacaaggaaatagtatcacctctttccacagtgagtcacttttccttcttagggagtctccagttgagctgcagaactggatctgggaaaccaactgcagaggtgtcaactgttagaactgtagattgaatcagatggatggatatatgttggatggagggatgggcggatggatagagggatgagtggatacaggatgggtgggtggatgggtgggcagatggatagagaggtgagtgggtagataaatgagtggataatagatgggtggacgaatgggtggatggatagagggatgggtggatggatagagggatgggtggacaaggggtgatggatgcatcatggatggatgtatgatggagggatagatgatggatggaggatggatgaatggatggatggataggtgatggatggatgatgatggatacacagatggaagggagaaaagacggaaggagggaaggaaggaagaaggaaggagggaaaaaaggatagatagataaaatatctcagttcattttttaaaaattcctattgtatactaaccactgctttaggtgctggggattggaagatgaaggacctggtgccctgccaccagtgagctcactgtctacagcaggatagtgtcaccttctctgtgttgtaaatcccttcggaatctggtcaaaattatgctccccttctctgaatattttcaaatgcaaaaaaatgcagaggattaaaaaggaaagtggttatattgaagtacagccgtcaaagtatatataaaaatcagaaaactgtggagtaataatacatttgcttctttattaacacattaaagtagatttggcatcaggtctaataactaccctaattttgaagtaatgacaagtataaacaatatttggagacatctgccaccaaagcaatgtgacatgaaaatatctgcaatttctgttggtgtcaaagtctcgggtgttgctaatactactgcagtctgttgcctatattcataattgaaggtcatgctaaatttcagttagagttagtgaaaataattatgaatatgtacaagttcatcagcgggtatgtacaagttcgaagacccccagaattctctctccatagatccccaaactcacagattccagaaaaatgactctgggctagatggagagagaaatcatagcaagatgttcatcacagggtatatactcacagagtcaagtggtgcacaggattccacattatttaaatgatttgtgtcaccatctatctctctcttttttccctcctgactgtttatagttgaatttttgtaagatagatttctgatgtttctcccttgcggagtgttatcagttctgtgatcatgtaggagtgggcagtataacctagaacactcctggaaggcttcctggaggagctgttgcccacagcatgaccttaacgggtgaatgataatcccagcactttgggaggccgaagtgggtggatcacctgaagtcaggagtttaagaccagcctgaccaatatggtgaaagcccgtctctactaaaaatgcaaaaattagttagttgtggtggtgggcacctgtagtcccagctactttggaagctgagacgggagcattgcttgaactaactgcactccagcctggg

SEQ ID NO: 15411 - DNA, 2300 bp, Homo sapien
attggtttggagtttacaacccccactagcatacattttatacttttcttgttcaggcaagtggactggctaattacatgggttcagaaagcattttttcttggcgcttactcccgtcctgccctcatgaacccttagcatttttgcacatctctacagcaatgcttatctcaccatatatatatatataatattatatatatttacatataaatatatatattatatatatgttatatattatatattatatatattatatgtacatatatataaatatattatatataatatatttattatatacattatatataatatatatatatacaatatatatatatttatatatacgttttttagatggagtcttgctctgtaacccaggctggagtgcagtggtgtgatctcggctcactgcagcctctgcctcctgggttcaagagattctcctgcctcagcctcctgagtagctgggatcaggggtgtgtgccaccatgcccggctaatttttgtatttttagtagagacggggtttcaccatgttggcaaggctgatctcgaacttctgacctcaggtgatcctcctgtcttggcctcccaaagtgctgcgattacaggcatgagccaccgcgcccaggcctatctcactatattttaatgattaacatccacatcaggcttctctagacctcaggcttgctgaagatgagattaaacctcattcacctttggatgcgtgcacctggcccagtgtctgacacaagctttgtattcacggatgcttgtggagtggatgaaacaatctcttcccactccctgcctcattgtctgatgagccttcattacactccactttcttctctttgtaaattaggatgaggtgaaaaagcacagcagacaagatgcgaagcattcacgccaagtcctcaattcacaaactgatttgatctgctgttgtattcccagagtgctaggtcccgtatgggacaccaacgccatcccatatgctcactgttctgcgctgctgtgtataaagccctgggcaagaggacaagggagggaaaaaccagaaagactgagtcagagaaggctcgggatgaaatttgagtccattgggatcattctgcctaaacgacagaggagaaagcttgggctcagggaggagtcctcctcctcctggctcaaggtcaccgggacagaccagtcaggatgggaaagaactccactttcaagagcaagacctgtttccccaggacctgggccctgtgcagacaggaagggggacttcaggatggatggggaaaaggacacgctgggaggctgcggggccagcctttggggcttgcatcctgcgaaggttgagtaactccacgggtctcccttttgccgctataccacttgccaactgggtttggagtctcttggcttgtgagtcctcagggaccagagaagtgactcagtgaacacttagtacatcgttggcaccggggattgtgtgtgattcaggagtcactcacagagcttgtgctgattaactccagaaactcacccaaagcctcctccccaccccttcaagcccaggatgaagggatcagactgtggctctgacactcctgaaatgtttctcacgtgtccacctgccaaccggtctggtaccgacagaagatccctggaccgcgaactccggggctaggagcttcctccacgcactgcctccttccagcggcccacagggaaaacaggacctcgggaccccctctcttcctgacctcccctggattctgagcgggcccaccctcaaccaaaggtcccctgtttcgcggcccctgcctctctttttccgccttgggaattgtccccctcgccccccatcctactcccactacgtcctgaggggtgtctgtcttctctgatcgcccccacccccttcctttccctcctccttttcctccctcggctcctcccccaggccccgccctctccgcctcggcccgcgtccccccggcgccttccccatcaccctcccctccagcggggacaggggtgtggggaggggggcggcggcggcggcccgagcgggagcccgagcggcagccggcggccgcgggagctgcggggagcgcgggggcggcccggagcgtgccggggtccccgcgcctcgctcgccggccgcgctccgaagatggtggcggcgccgtgcgcccggaggctggcccggcgctcgcactcggcgctgctcgcggcgctcacggtgctgctgctgcagacgctggtcgtgtggaatttcagcagcctcg

SEQ ID NO: 15412 - DNA, 2300 bp, Homo sapien
atcctatgtgcagaaatcaggaaaaaacaagttctacaaagaatttgaaagatattatttcaggccaggtgtggtggctcatgcctgtaatcccagcactttgggaggctgaggcaggtggatcacttgaggtcaggagttcaagaccagatgggccaacatagtgaaaccccatctctactaaaaagacaaaaattagccaggcatggtagcaggcacctgtaatcccagctacttgggaggccgaggcacaagaatcgcttgaatctgggaggtggaggttgccgtgagccaaggtagtgccactgcacttcagcatggttgagtgacactccgtctcaagaaaaaagtcatttcaatgactacctcaggagattcataggtatctgacccacatctgagatgggatttgcattgcattttagctatgatgagaacaaatatttaatatcttcgaagattaaaagcatactgtgataatatggaaatcttggtgggaattcagtcattagtgagaatgttttgcgttaagttcaaaccagcctcaacgaagctgatgtgagggaagggaaagtgaactctgagtagagcagggacagaagaaagatgctccagtgcagatcaggaaggagcagggggtgaaatgttacaaattctagaactcagagagctgaaggtaattaattacttccttttcaagttgtgaaacatgttaacctgtggtaaaatacttacaagatgataattaccatctaaccgtgttgaagtgtacagttcagttgtgtgaagtatattcatgtcatttttttttttttttttttttgagacagagtctcactctgtcaccaggctggagtgcagtggtgggatcttggctcactgcaccctctgcctcctgggttcaagcagttctcctgcctcagcctcccgagtagctgggactacaggcgtgggccaccatgctcagctaatttttgtatttttagtagagacggggtttcaccatgttgcccaggatgatctccatctcttgaccttgtgattcacccgcctcggcctcccaaagtgctgggattacaggcgtgagctacagcacctggcctattttttttttttttttttgagacagagtttgaattttgttgcccaggttggagtgcaatggcacaatctcagctcaccacaaccttttcctgctggattcaagtgattctcctgcctcagcctcgcgactagctgggattacaggcatgcaccaccatgcctggctaattttgaatttttagcagagacagcgtttctccatgttggtgaggctggtctcaaactcccgacctcaggttatccgcctgcctcggcctcccaaagtactgggattacaggagtgagccaccctgccagcctcatgtcattctttgtgtgtgtgtgtgtgtgtgtgtgtgtgtgtgtgtgtgtgacagagtctcattctgtcgctcaggctggagtgcagtggtgtgatctcggctcactgcaaactccgcctcccagcttcaaacggttctctgcctcagcctcccgagtagctcggattacaggcgcccactgccatgcccggctaatttttgtatttttagtagagacggggtttcaccatcttggccaggctggtcttcaactcctgaccccgtgatccacctgcctcggcctcccaaagtactgggattatacgcatgagccaccgtgcccagccgtcattcttatattattatttcctaggtgtctttcctgaagactatcttcccatctcaaaatggacatgatggatccacggatgtacagcagagagccaggaggtccaaccgccgtagacaggaaggtatggctctgttggagtccccatagtgtggaaatgagtttgccctggaaagggaaagaacagcttcttgccctcaggtttctcaccttctcctctcctcactctcaccaagggctgaagtccatttgtatgcacacaaagaaaagagtttcttcctttccaggaattaaaattgtcctggaagacatctttactttatggagacaggtggaaaccaaagttcgagctaaaatccgtaagatgaaggtgacaacaaaagtcaaccgtcatgacaaaatcaatggaaagaggaagaccgccaaagaacagtaagatgtgccttgacacaaatactgttgtatgaaccatgtgccaatcaaagtagacaactgtaaagtccttgagaatattttctacaatatttgtggcaaattcagtgggttcaaaattgagtttgtccttt

SEQ ID NO: 15413 - DNA, 2300 bp, Homo sapien; identical to SEQ ID NO: 15405

SEQ ID NO: 15414 - DNA, 2300 bp, Homo sapien
ggcacggcaggacggcctctcagccccgcacgagcccgtggaggtagtcggccccccacgttctataacctgccctcctgcctgcccctggaggcctcgcctgccctgcccactgtgggtctcgccaaaaaacttgggggccttaatgttgcttgtgcccagtgaagatggttgggaaaatccagagtgcagagaggaaagcgtttactcacattacccccaggccttttctctgagtgtgggtgagttattcctgaaaggcaggtcaggggtcctgccccccatggacagtttccatcggagtcttcctctcgagcgacaggagccaggcctgtgggggtccgatggctcgctctccttccctcccctcttcctgcgaagttcgggtggggggagtctgggcttcaggctgggatggggtctgtggagctgaggcggccccctgcccaccaggtcatggtattcccgggcctgcgtctgagccgtgaagccttcctcaccacggccgaatttgggacccaggagctccggcggcccgcccagctgcggctgcaggtgtaccggctcctcagcacagcaggtgggactctggggtggtgggcgccgcaggactcggggtggcctctctgagctctcacgtctgctggtcctgtggccatcagagtggttcccagtcttaggtggacagagcaggggttccagagacaccagctcattccaggtgtcctgggggtggatcgggtggggcctgcctggggaccggcctgggtcagtcagctggccggagacagggacgcagcactgggctgggagtgctgcccgggcggggagacctgtcctcacagcaaggccaggctcgctggtgcaggcagttgggcatctctgacggtggcccgtgggcgaatgagggccccaacaccctcccctcctcgcagggaccccggagaacggcagcgagcctgagagcaggtccccggacaacaggacccagctggtccccgcgtgcatgccagggggacgctggtgccctggagccaacatctgcttgccgctggacgcctcctgccacccccaggcctgcgccaatggctgcacgtcagggccagggctactcggggccccctatgcgctatggagagagttcctcttctccgttcccgcggggccccccgcgcagtactcggtgtgtggccctgacctgggtctgttccctgcatctcctcaggccaccttcctgtctgctgcccagggtctgggtctgcgcagcaggcacacccagcctgcaggcccctcccacgtccttgccacctctgacctccgacctccgacctccaacctccgacctctgcagtgcccttgcccctctcccagtgggagaagctctcgcctgggcccttggcacgagctgtgcctcctcttcctctctcccagcacagccgctccttcctgtctgccaggtcttggcctgtgtcctctccccgtgtgtccccctgtctgcaactgtcctgcctgtccttgtcacgagcactgtggggaggctccctgaggtgtggctgacgaagcggggagccctgcgtgtccaccctcatccgtcgtgcaggggtccacgggccatgaccgtgaggacgtgatgcagccctgcctccctctccacaggtcaccctccacagccaggatgtcctcatgctccctggtgacctcgttggcttgcagcacgacgctggccctggcgccctcctgcactgctcgccggctcccggccaccctggtccccaggccccgtacctctccgccaacgcctcgtcatggctgccccacttgccagcccagctggagggcacttgggcctgccctgcctgtgccctgcggctgcttgcagccacggaacagctcaccgtgctgctgggcctgaggcccaaccctgggctgcggctgcctgggcgctatgaggtccgggcagaggtgggcaatggcgtgtccaggcacaacctgtcctgcagctttgacgtggtctccccagtggctgggctgcgggtcatctaccctgccccccgcgacggccgcctctacgtgcccaccaacggctcagcctcggtgctccaggtggactctggtgccagcgccacggccacggctcgctggcctgggggcagtgtcagcgcccgctttgagaatgcctgccctgccctggtggccaccttcgtgcccggctgcccctgggagaccaatgataccctgttctcagtggtagcactgccgtggctcggtgagggggagcacgtgatggacgttgtggtgga

SEQ ID NO: 15415 - DNA, 2300 bp, Homo sapien
tgcagaaatcaggaaaaaacaagttctacaaagaatttgaaagatattatttcaggccaggtgtggtggctcatgcctgtaatcccagcactttgggaggctgaggcaggtggatcacttgaggtcaggagttcaagaccagatgggccaacatagtgaaaccccatctctactaaaaagacaaaaattagccaggcatggtagcaggcacctgtaatcccagctacttgggaggccgaggcacaagaatcgcttgaatctgggaggtggaggttgccgtgagccaaggtagtgccactgcacttcagcatggttgagtgacactccgtctcaagaaaaaagtcatttcaatgactacctcaggagattcataggtatctgacccacatctgagatgggatttgcattgcattttagctatgatgagaacaaatatttaatatcttcgaagattaaaagcatactgtgataatatggaaatcttggtgggaattcagtcattagtgagaatgttttgcgttaagttcaaaccagcctcaacgaagctgatgtgagggaagggaaagtgaactctgagtagagcagggacagaagaaagatgctccagtgcagatcaggaaggagcagggggtgaaatgttacaaattctagaactcagagagctgaaggtaattaattacttccttttcaagttgtgaaacatgttaacctgtggtaaaatacttacaagatgataattaccatctaaccgtgttgaagtgtacagttcagttgtgtgaagtatattcatgtcatttttttttttttttttttttgagacagagtctcactctgtcaccaggctggagtgcagtggtgggatcttggctcactgcaccctctgcctcctgggttcaagcagttctcctgcctcagcctcccgagtagctgggactacaggcgtgggccaccatgctcagctaatttttgtatttttagtagagacggggtttcaccatgttgcccaggatgatctccatctcttgaccttgtgattcacccgcctcggcctcccaaagtgctgggattacaggcgtgagctaccgcacctggcctatattttttttttttttttttttgagacagagtttgaattttgttgcccatgttggagtgcaatggcacaatctcagctcaacacaaccttttcctgctgggttcaagtgattctcctgcctcagcctcccgactagctgggattacaggcatgcaccaccatgcctggctaattttgtatttttagcagagacagcgtttctccatgttggtgaggctggtctcaaactcccgacctcaggttatccgcctgcctcggcctcccaaagtgctgggattacaggagtgagccaccatgccagcctcatgtcattcttgtgtgttgtgttgtgtgtgtgtgtgtgtgtgtgtgtgtgtgtgacagagtctcattctgtcactcaggctggagtgcagtggtgtgatctcggctcactgcaacctccacctcccagcttcaaacggttctctgcctcagcctcccgagtagctcggattacaggcgcccactgccatgcccggctaatttttgtatttttagtagagatggggtttcaccatcttggccaggctggtcttgaactcctgaccccgtgatccaccctgcctcggcctcccaaagtactgggattatacgcatgagccaccgtgcccagccgtcattcttatattattatttcctaggtgtctttcctgaagactatcttcccgtctcaaaatggacatgatggatccacggatgtacagcagagagccaggaggtccaactgccgtagacaggaaggtatggctctgttggagtccccatagtgtggaaatgagtttgccctggaaagggaaagaacagcttcttgccctcaggtttctcaccttctcctctcctcactctcaccaagggctgaggtccgtttgtatgcacacaaagaaaagagtttcttcctttccaggaattaaaattgtcctggaagacatctttactttatggagacaggtggaaaccaaagttcgagctaaaatccgtaagatgaaggtgacaacaaaagtcaaccgtcatgacaaaatcaatggaaagaggaagaccgccaaagaacagtaagatgtgccttgacacaaatactgttgtatgaaccatgtgccaatcaaagtagacaactgtaaagtccttgagaatattttctacaatatttgtggcaaattcagtgggttcaaaattgagcttgtccttt

SEQ ID NO: 15416 - DNA, 2300 bp, Homo sapien
cttctaggtcacgcagccctgttgcgcttccggcgcctgctggtggctgagctgcagcgtggcttctttgacaagcacatctggctctccatatgggaccggccgcctcgtagctgtttcactcgcatccagagggccacctgctgcgatctcctcatctgtctcttcctgggcgccaacgccgtgtggtacggggctgttggagactctgcctacaggtgggtgccgtaggggtcgggacagcctcttcctgcccagcccttcctgcccctcagcctcacctgtgtggcctcctctcctccacacagcacggggcgtgtgtccaggctgaacccgctgagcgtcgacacagtcgctgttggcctggtgtccagcgtggttgtctatcccgtctacctggccatcctctttctcttccggatgtcccggagcaaggtgggctggggctggggacccgggagtactgggaatggagcctgggcctcggcaccatgcccagggccgccactttccagtgctgcagccagagggaaaggcgtccaccaaaggctgctcgggaagggtcaacacacttgagcagccttagctagactgaccagggagaaagagagaagactcagaagccagaatcgtgaaagaacgagggcacttcgctaagcagacgccacggacaactgcacagcagcacgccagataactcagaagaagcaagcacgcggctgtgcacgcttccgaaatgcactccagaagaaaatctcagtacatctatagcaagtgaagaggccgagttagtcccttagaaacctcccagtggccgggccgggtgtggtggctcacgcctgtaatcccaacacttcaggaggccgaggtgggcggatctgagtccaggagtttgagaccagcctgggcaacatagcaagaccccatctatataaaacattaaaaagggccaggcacggtggctcatgcctgtaatcccaacactttgggaggccgaggcgggcagatcagttgaggtcaggagttcgagaccagcctggccaacacaatgaaaccccatctctactacaaatacaaaaacagctgggcatggtggcgggcgcctgtagtcccagctactcgagaggctgaggcaggagaatggcatgaacccaggaggcggagcttgcagtgagccgagattgcgccactgcactccatcctgggcaacggagcaagactccgtctccaaaaaaaaaaaaaaaaaaaatcccacaaagaaaagcccaggctcagagccttcacgatagaatttttctaagcagttaaggaagaattaacaccaatccttcacagactctttccaagaatacagcaggtgggaactcttcccattcatacggaaacgggaggccgcaccccttaggaatgcacacgtggggtcctcaagaggttacatgcaaactaaccccagcagcacacagagaaggcgcataagccgcgaccaggaggggttgctcccgagtccgtggcaggaaccagaggccacatgtggctgctcgtatttaagttaattaaaatggaacgatggccgggtgtggtggctcacacctgtaatcccagcactttgggaggcggaggcgggcagatcacttgaggtcaggagttccaagaccagcctggccaacacagtgaaaccccgtctctactaaaaatacaaaaaattagctgggcatcgtggcaggcacctgtaatcccagctactaaagaggctgagccaggacggacaatcgcctgaacgcgggaggtggaggttgcagtgagctgagattgcgccagtgcactccagcctgggtgacagagcgagactccatctaaaaaaaaaaaaaatgaaatttaaaactctgttccttagctgcaccagtctgctgtcaagtgttcagtggcacatgtcgcgaggggctgccatcacggacggtgcagatgtcccatatatctagcattctaggacattctgtcagatggcaccgggctctgtcctgtctgctgaggaggtggcttctcatccctgtcctgagcaggtctgagctgccgcccgctgaccactgcccttgtcctgcaggtggctgggagcccgagccccacacctgccgggcagcaggtgctggacgtcgacagctgcctggactcatccgtgctggacagctccttcctcacgttctcaggcctccacgctgaggtgagggctctactgggggtcctgccgccttggcgcagcttggactcaagaccctgtgcacctctcagcaggcctttgctgg

SEQ ID NO: 15417 - DNA, 2300 bp, Homo sapien
cagggtgggcagcccacgttctacacagtagcgtagccccacaagttacgtgagcatcgctaccactgtgggagaccatgcatccacccgcgatcctgactgcatagctcgtctctcagacggaggcgccagcaccctccccgtggctgtttcttcaatacctccattttcctttctttggaattgcccttctggcattccctttttgttttcgtttttctttttttggagacggagtctcgctctgttgcccaggctggagtgcaatggcgtgatcttggctcacagcaacttccagctcctgggtttaagcgattccccttaagcgattctcctgagtagctgggagtacaggtgcacaccaccacacccagttaatttttcaccatgtcagccaggcgaactcctgacctcaggtgatccgcctgcctcggcctgccagagtgctgggatgacaggtgtgagccaccacacctggccgtgttcccattttttatttccatgctgctttcatcttcatttcccagttctttcttttgattacctacttttaaaaactgtcggccgggtgcggtggctcacacctgtaatccgagcactttgggaggctgaggcaggctaatcacggggtcaggagatcgagaccatcctggctaacggtgaaaccctgtctctactaaaaaatacaaaaaaattaggccggcgtggtggcaggcgcctgtagtcccagctcctcgggagactgaggcaggagaatggcgtgaacccgggaggcggagcttgcagtgagctgagattgcgccactgcactccagcctgggtgacacagcaagactccatctcaaaaaaaaaaaaaaaaaaaatactgtcacctgggtctgtcactgggagaggaggtgacacagcttcacgcttcgcagtctgtgcatgaactgagggacgggtgtgtggtgcaggtcaccggttgtggcgtgactgaggtgtggacaggtgtgcagtgcgggtcactggttgtggtgtggactgaggcgtgtgcagccatgtttgcatgttacaagttacagttctttccatgtaacttaatcatgtccttgaggtcctgctgtttattggacaaattgcagtaaccgcagctcctcgtgtatagcagagctgtgcaaagccgggactgcctgtgtggctccttgagtgcgcggaggccaaagctgagatgacttgcctgggatgccacacgtgttgggcagcagaccgagcctcccacccctccctcttgccctccaggtaccacggcccacgtgggcatcatgctgtatggggtggacagccggagcggccaccggcacctggacggcgacagagccttccaccgcaacagtctggacatcttccagatcgccaccccgcacagcctgggtagcatgtggaagatccgagtgtggcacgacaacaaaggtctgtatggaccctgccaagctctgcccctctgcccctgcattggggcgccctgcgaacctgacctccctcccgcgcctctgcagggctcagccctgcctggttcctgcagcacatcatcgtcagggacctgcagacggcacgcagcaccttcttcctggtcaatgactggctttcggtggagacggaggccaacgggggcctggtggagaaggaggtgctggccgcgagtaaggcctcgttccgtgttcccactccgtgggaggttgggcagggtggtcctgccccgtggcctcctgcagtgcggccctccctgccttctaggtcacgcagccctgttgcgcttccggcgcctgctggtggctgagctgcagcgtggcttctttgacaagcacatctggctctccatatgggaccggccgcctcgtagctgtttcactcgcatccagagggccacctgctgcgatctcctcatctgtctcttcctgggcgccaacgccgtgtggtacggggctgttggagactctgcctacaggtgggtgccgtaggggtcgggacagcctcttcctgcccagcccttcctgcccctcagcctcacctgtgtggcctcctctcctccacacagcacggggcgtgtgtccaggctgaacccgctgagcgtcgacacagtcgctgttggcctggtgtccagcgtggttgtctatcccgtctacctggccatcctctttctcttccggatgtcccggagcaaggtgggctggggctggggacccgggagtactgggaatggagcctgggcctcggcaccatgcccagggccgccactttccagtgctgcagccagaggg

SEQ ID NO: 15418 - DNA, 2300 bp, Homo sapien
tcgctcaccgcgctcgaggccggctcctaccatgtgcagctgcgggccaccaacatgctgggcagcgcctgggctgactgcaccgtggacttcgtggagcctgtggggtggctgatggtggccgcctccccgaacccagctgccgtcaacacaagcgtcaccctcagtgccgagctggctggtggcagtggtgtcgtatacacttggtccttggaggaggggctgagctgggagacccccgagccatttaccacccacagcttccccacacccggcctgcacttggtcaccatgacggcagggaacccgctgggctcagccaacgccaccgtggaagtggatgtgcaggtgcctgtgagtggcctcagcatcagggccagcgagccgggaggcagcttcgtggcggccgggtcctctgtgcccttttgggggcagctggccacgggcaccaatgtgagctggtgctgggctgtgcccggcggcagcagcaagcgtggccctcatgtcaccatggtcttcccggatgctggcaccttcaacatctggctcaatgcctccaacgcagtcagctgggtctcagccacgtacaacctcacggtggaggagcccatcgtgggcctggtgctgtgggccagcagcaaggtggtggcgcccgggcagcttgtccattttcagatcctgctggctgccggctcagctgtcaccttccgcctgcaggtcggcggggccagccccgaagtgctccctgggccccgtttctcccacagcttcccccgcatcggagaccacgtggtgagcgtgcagggcaaaaaccacgtgagctgggcccaggcgcaggtgcgcatcgtggtgctggaggccgtgagcgggctgcaggtgcccaactgctgtgagcctggcatcgccatgggcactgagaggaacttcacagcccgcgtgcagcgcggctctcgggtcgcctacgcctggtacttctcgctgcagaaggtccggggcgactctctgttcatcctgtcgggccgcgacgtcacctacacgccgtggccgcggggctgttggagatccaggtgcgtgccttcaacgccctgggcagtgagaaccgcacgctggtgctggaggttcaggacgccgtccagtatgtggccctgcgcagcggcccctgcttcaccaaccgctcggcgcagtttgaggccgccaccagccccagcccccggcgcgtggcctaccactgggactttggggatgggtccccagggcaggacacagatgagcccagggccgagcactcctacctgaggcctggggactaccgcgtgcaggtgaacgcctccaacctggtgagctttttcgtggcgcaggccacggtgaccgtccaggtgctggcctgccgggagccggaggtggacgtggtcctgcccctgcaggtgctgatgcgacgatcacagcgcaactgcctggatgcctacgttgacctgcgcgactgtgtcacctaccagactgagtaccgctgggaggtgtaccgcaccgccagctgccagcggccggggcgcccggcgcgtgtggccctgcccggcgtggacgtgagccggcctcagctggtgctgccgtggctggcgctgcctgtggggcactactgctttgtgtttgtcgtgtcatttggggacacgccactggcacggagcatccaggccaatgtgacggtggcccccgagcgcctggtgcccatcactgagggtggctcctaccgcgtgtggtcagacacacaggacctggtgctggatgggagcgagtcctacgaccccaacctggaggacggcgaccagacgccgctcagtttccagtgggcctgtgtggcttcgacacaggtcagtgcgtggcagggccgtcctccctgcccctcacccgtccacacccatgagcccagagaacacccagcttgccaccagggctggcccgtcctcagtgcctggtgggccccgtcccagcatggggagggggtctcccgcactgtctcctgggccgggctctgctttaaaactggatggggttctcgggccacgtcgccccttgttctcggcctgcagagggaggctggcgggtgtgcgctgaactttgggccccgcgggagcagcacggtcaccattccacgggaacggctggcagctggcgtggagtacaccttcagcctcaccgtgtggaaggccggccgcaaggaggaggccaccaaccagacggtgggtgccgcccgcccctcggccacttgccttggacagcccagcctccctgctcatctactgttt

SEQ ID NO: 15419 - DNA, 2300 bp, Homo sapien
ctttatttctgtgttaaatgtgttgattttttcttattgcttctggattttagagtcataggaaggttttcttcattcccagcttttacaggaatttatcgtgtttttttcaggcagacttttatagtttctgtttttacatttaaatctctctatccatttggagtttttcctggtatagatgtgaagtatggctccagattgtctttttccacatgctatccagttaccatttcatgcttttcaaacgccatcctgcatggaaggtggacaggaattacctttcatttagagatgagaagatgggaacctagaaggagatgtgagcagcccaaggtcaccagctcacgtggagcagtgctagggcttgagcagagctctgctgctgattctgggcttctgtgaagagtgattcatgctcagtgagcctgtaaatatgatcttacctgaacaagagagtttttctcatgacccacgaggaaacacttccttgttactcacagtagagacctggttagaaagtgctggagagggctaggtgtggtggctcacgcctgtaatcccagcattttaggaggctgaggtgggcagatcatttgaggtcaggagttcgagaccagcctgggcaatgtggtgaaagtgaaaccccatctctgctaacaatacaaacattagccaggcgtggtagcacgcacctgtaatcccagctactcgagaggctgtggcaggagaattgtgaacctgggatgcagagtttgtagtgagctaagatagccccagtgcactccagcctgggcgacagagcaagactgtctcaaaaaaaaaaaaaaaaaagaaagtgccagaaagataagcatatacaagaaccacttacctttgcttggggctgcattgtggcccagttgctgggagaggcttctgtgaaggccgttgatagctgcaggcagtgacattctcaggggcccctagcagacaactcatccgggctcagggacacacctgggagccagtggcaggaatgtggagacactgcttggtggtggccgagcagcccagcctcgtagctgctgcctgtcacttctgagaatgtaagaaactgtgccctggtgtgtgatgttccccttcctgtatacctatgtaactaacctgcacattgtgcacatatatcctaaaacttaaagtataattaaaaaaaaaaaaaaaagctgtgcctgctggggcttggattcccgagcagggccaagtgttgaatgaagagagcgcccactctgtgccaccccgtacagggccctcacaggttgatcctcacaacaagccttcaagcaggtgtgccattcctcccattttcacagaagcccagaaagattgagtcacttactgagtgttagcagaaccaggactcaagtgaggcagtttgtctcaagccacatggtttccacctcgttctgccctccgcgtgatgagtggctcagcattgcatgttcacgggggctttgtaagcacattggtttccttctttgttgatgtgactgcccacagcctcgcgactggattttactcagtattccatgccctgctgagcatttcacatactcctttcatcaagtttcacagcatccacccccagtgggtgttgttcatatgatctccatgtcatagttgagtaaactgagtctcaacgtggttgcctgagtttacccagtgaggcctgggacctgagcctagactgaatcactcttaattcctgctgaattaaacttttatttatttattcattattatttttttctgagacagagtcttgctttgttgcccctgctggagtgcagtggcacgatcttggcccactgcaacctctgcctcccgggttcaagtgattctcacctcctgagtagctggaattacaggcatgcaccaccacttctggctaattttgtatttttatagagacggggtttcaccatgctggccaggctgttctcaaactcctgacctcaggtgatctgcccacctcagcctcccaaagtgctgggattacaggcgtgagccactgcacctggcctgaattaaacttttaagtaagtgtttacttcagtggaaaaatgggttgggttctaagagatgtccagagatacaggagtaggcagttgttgatggaaatctgttcctgcccttattctttcatttatgaaagggcatcccaggtacagcggcccccacagtcactctctagcccagcagttctcggatgggttggttgcaggacccctttatactgttaaaaattattgaggatttta

SEQ ID NO: 15420 - DNA, 2300 bp, Homo sapien
gatggagaggaaaaacatcttagaagagtaagagcacatagtatgcttggaattttgaaataagaaaccaaatttgatttattttggggtaggagaaaatgaaactgagttgggatggaaggagtcgcaaaatttcagatgtttcaacactaggggtgttcttaaaggaactctggactcttaaggttaacaggccacagattaggaaatgaggggagagaaatgctcctgtcttaatgatctcgtgcagccaaaccaggcttggaccaggcacgatacgacaagccccctttctagagaactgactcctgagtttttttgcagccgggatgtgtgtaccacgttcagctcaaggcagaaggcaacgaccacattgagcgggcgctcccccaccatagggtgattgaggtaaggcattcagtgctgccgctgcacctgggtgtgggtgcctccctaatcagaagtcctcccgtctcctctggctgtctgcctttcatctgtggcggggggaactttcatcctaattaagggtcctcttagaatagtgtcatcttcacaagcagaatcttatgtgggtttttagtgaacagcgttgctgtcatgcatccagaaaggaaattggaactgttgtatcctccccgcgacttgccctgtaagctctgatcattattctgcaagttaaggaacttaaggcctaagcagcatttcaaatcaagggacaataatagcacatgggcttaatgggtggcagggccacgcagttatcttaggttcagatgacctttttcctgctcccattttgtgggcagagtcttttgatactcaagatcatgacctagctaaattaatccctaaagaggacatccttcgagtcacagaatgtggcctgggaatcatttgaagtaaggcttttctcttactgagtaactctcattgggaagactagagggcttaggtagggcaagaggggctgcctcttagtggctttatttaggtggcttcattatgcatgaagattgtgagggaggatagaacttttgacctaggaagtggattttcttttttttttctttttttttttttttgagatggagtctcaccctgtcacgcaggatggagtgcagtgccgtgatctcggctcactgcaacctcctccttgtgggttcaagtgattttcccacctcagcctgtagctgggactacaggcatacaccatcacacccgactaatttttgtatttttagtagagacggggtttcaccatgttggccagattggtcttgaactcctgacctcaggtgatctgctcgcttcggcctcccaaagtgctgggattacaggcatgagccaccgcaccgggccggaagtggatttccttgacgtctttacggtgttggcattttaaatggctgggatgactgcatctcacaccaaaatgctttgcatgttctcggtgtagtaacttaggccaggatcactagcataatgtggactgtggccgggcaggtatgaaagggaagggggccggccctctgggatctcgcaaactccatgtacagacctcacgcagagggggtgctgtgactctgcccctgctctaacaggcaagagcatccttctcctctttttttttaagagaagctggaaaatctggcttcatatatgaaatttcttaatttttaacatgttggcaagtaattcaaacgtagaaaaaaaatactgtgctttcgaaatgaaatgtgtctatgggccagggatatgcccctgctctaacaggcaagagcatccttctcctttttttttaagagaagctggaaaatctggcttcatatatgaaatttcctaatttttaacatgttggcaagtaattcaaacgtagaaaaaaaatactgtgctttcgaaatgaaatgtgtctatgggccagggatagccatcttctgtcggtttgtgaccttggacgtagggtactcaatgacaaacttagcttccttaatgtaagaagcaaagtttgccatgaagcagctctcaggccatcggacagctggcatagaagttcctccaccagctttctcattactggcattccctctttctctctctaggttgggaataatgacatcgatgatgtaaacatcatagttttccggcagattaatcaatttgatttaagtggaaatgtgatcacttcctctgaataccttcctacgttatgggtaagtccagacttttaagctccaagtattgtgttccctttggctttgagacaagtacgaatgggatgtttttggttttgtgcctgt

SEQ ID NO: 15421 - DNA, 2300 bp, Homo sapien
agcctccgcctctcgggttcaagtgattctcctgccccagcctcctgagtagctgggattacaggctaatttttatattttttagtagagatgtggttttgccgtgttggctaggctggtctcgaactcctgacctcaagtgacccacccgcctcggcttcccaaagtgctgggattacaggctgagccatggtgcctagtcttcctttaaagtaaaataaaaaaattactcaatttattgtaaaaacaaactctttggcttctgtccaaatgactgtgaaaatagatttctctcaatatccaccaatattacctgtttctgtccatatatgtatttaaaccctgttgaaagaatttattgatacaaatcaatttttaagggcttcagtataacggaacctttttctaccacccttttggtttatttttccaaactaagccagtatagatttgaggtttagggaaaataggcacttctttttaataagaatgtgggctaaaacagatcttatggttcaaatatttacaacttaaggaggcaaagagatttgataggaaatagacaaggtgatgtgtcctctgacaggtacacaaatcaagagaatatgacaggtccttgggaatgattgtgtcagtgttcgcttcccatccttttattctgaaagttcacagtaggggaatgtgagaaccaaaatgcatatgctaggtcagggactgggacactttctctgtggagagccagagaataactattttaggctgcgtgagccatacggtctctaggacaacagctgagatagacatttgtaaatgaatgggcagagcgcaacacaactacatttttggacaccacagtttgcatttcatgtaatttttacatgtgaaatattatctttcttttgattttttttttttaactttaaccacttaagagtgtaaaattctttttctcggcttgcagttcatacacaaatgggaggggggtccttgggtggtagtttgctgacccatgctggagatagtgagctcatatggctgggcagtcccttcactctgaagaaatggctgtgtttttcatgattcctagatttcacatacacaatcttccaccatttccttgtgttttccactgtttttttatttgaggcggagtggtggttccaacatttaatgtacccctaattgtcagaatccaacattcttgattatctttatgtcaaaagtaactaatttttatctaaaatgattcttgaagattctttaaaatgaacagttgaaaagacaactgtgacccccagctaggatgtactattacactttaatacaccagctgcttcagaaatgaagaccagcactccaaggatgatggtcgttgtaggggggcctctcgtgtgttattcgagggatgccttgcaacaccttactccttatttagaatctcaaatctgaatcattaccttaatagggcttttcagttataagttacatttgtggctcctacctcccaaggagttcaattttagctttgcattttttaacttaattaccttttctgttccaatctcccagtttgctttcatccatgtattatatataatcacaagcaaggaagacgtctttgataatcctgacttatttgatggcctgataatgccacagtttcttaggcagcttagagctcttgcttttaagggctagcccacattctcagtccaaggccgctccgctgtcaacgatccaattacctgaaacgtttttattatctgcagattttcttaaaattgcctctgcagtgggggattgccacatgtcacccggaacacacaaacagccccactacgggcccctgttctgtagaaagatgcccagtcttgcttctgaaggttgctttttaaaaccagaatgaaggttgctttttaaaaccagaatcatctggactgcattctgtctcttcattaagattagactattctcaggaacaagggctgggagagggctgcatcttttttggtcgataagagcctttcctgttataattgagtcctcgtgctggaatgaatggtcttctctttgcaggttcagtgtctgtggtcggatatcaatcattcgcttcccggacaccgtcaagcagatgaataaatacaaagttgtcctgtcatctcaagacaaggacaagtctttggtcaccgtggagacagatgctcatggatcattttgttttaaagcaaaaccagggacttacaaagtgcaggtgcgatgcattgttttaaatttaaaatgttttgagaaaaagcagtgat

SEQ ID NO: 15422 - DNA, 2300 bp, Homo sapien
agaacaaaacttggggatcccacttcctgctttttttttttttttttttttttgagatggagtctcactctgtcgcccaggctggagtgcagtggcaagacctcagctcactgcaacctgtggctccctggttcaagtgattctcctgcctcagcctcctgaagtagctgggattagaggcatgcgccaccacacctagctaatttttgtatttttagtagagacagggttttgccatgttggccaagttggtctcgaactcctgacctcaaatgatctgcccacctcggactcccaacatgttcatattacagtagtaagccacggcttctggccccaattcctgctctctagctccgggaaaacctatggctgcatgcagagtcttagacaacttccttttcctctctgggcctcagtttcccattctgtaagatgaaaggtttccataggcctacactttctaattggtggctttcaatcctctggtgatttgcataaaaggcatctatttcaattgtggttataaataacaaaccccaataaatagacgaattatttaaatggtttctcattatcactgaatagttgagagtctactgtatttgagtgaaaatgcagcaagagaagctgaaatcagatgcactcatgattatgaccctgaggtcaatgtgtcattcccttcattccctccttgcccccatgaaggtttgactactgtatggtttgaacctgtgcttcttagttgtttattgcttaagttttagccacaacggcaaattgcagcgggaaattcagtcttactttgtcatttggaaacaaaatacaaaacctatcaaaataaagcactagcttttttttttttgagacaaaatggaagaaatcctaatattaggttagaaaagcaattttttggtgttttttaaattttatttatttatttttttgagacagagtcttgctctgtcgcccaggctggagtgcagtggtgcgatctcggctaaccgcaagctccgcctcccaggttcacgccattctcctgcctcagcctcccgagtagctggtactacaggcgcccgccaccacgcccggctaagtgtttatatttttagtagagacggggtttcactgtgttagccaggatggtcttgatctcgtggcctcatgatctgccagccttggcctcccaaagtgctgggattacaggcgtgagccactgtgcccggcctctttggtgtgtattttgatgtggtgactggtagttaaattcagtgtacatatgaattcactcttgggacaaaatatgctggatttgagcttgttttcaggcaaatcatgtttcatcttgcagagctaattcaaagtatactgactgcatgcacttcttgcttaggggaagaaaactcatcaaaatttgtttctaggcatatgttattagagctaggattaaaataaatcttacatactttctttaatatgctaacattaacacgtttcgcttaaaaaagtatcgatcatttatcatggaaaaatacaccagcttacacaaattcctaaagcgtttttcgtgtgtgtgtgtgtgtgtgtgtgtgtgcgtgcgtgtgcgtgtgtgtgtgtagagatggggtttcgccatattgcccaggctggtctcgaactcgtgggctcaagcgatccacccacctcagcctcccaaagtgctgggattacaggcgtgagccacacacccggccctaaagctttttgtgagattatatattttacctgcgaaatatatgggtcagaaagatttgagaaagttgttagataattccaccaacaaaatctcccgtcctttccagctgtgatggtgaattctaaagtagaattcatctttggagcttctccctgtaggcatgcaccttgcgttgcacctgccagatgtcgcgcggagtcctccaggcctctagaaggcagagatggtctcgtttccttgccgagcatgcgccttagttctctcttctggggctgtgaacgtggcgtcgaagcgcgcgtgcgcggcggctctggcggcggcggtggggcggggcctgggctgtcagccggcctaggaggaggaaggagcctgcggcgtgcagtgtgaggggcgggacccggctgccggcggtgggtctagctgggggaggtcgggccatgctggtgggccagggcgcggggctgctggggcccgcggtggtcaccgccgcggtggtgctgctgctgagcggcgtggggccggcgcacggctcggaggacatcgtggtgggctgcggtggcttcgt

SEQ ID NO: 15423 - DNA, 2300 bp, Homo sapien
caaataatatcacagggtgtacccccactgtgatattaggagtcatatctttctgggaggtcacagcgtgtacacacatggtgtaaattcactgggatattaggagtaatatcgccctagaatatttcgaatcatatcacagggtgtacacccactgtgatattaaaaggaatatctttctagaacattacaaatagtatcacaaggtgtacacccactatgagattaggagtaacatctccctagaatattatgaataatatcacagtgtgtacaggcactgtgattttaggagtactaccttcttaagatattatgaataatatcatagggtatacacccactgtgaaattaaaagcaatagctccctacgatattatgaataatatcacgcagtgtacactcaaggtgatattaggagtagtatctccctaggaaattacgaatattatcacagagtgtacacccactgtgatattaaaagtattatctttctaggatattatgaataatattacagggtgtactccctctgtgatattaggagttatatctccctaggatattacaaatcatatcacagggtgtacacccactgtggtattaggtgtagtatctccctaggatataacaaataatatcacagggtatacacctacggttatatcaggagttatatcttcatagaatattacgaataatatcacagggtgtccaccctctgtgatattaaaagtaatatctttctaggatagtatgaataatatcacagggtgtactctcactgtgatattagcggtaataactccctaggatatcacgaattctgtgacagagtgtacacccactggagtaatatatctctagcatattatgaataatatcacaggttgcacacctactgcgatattaggagtaaaatctccctcggatattataaataatatcacagtgtgtactcccactgtgatattaggagtaaaatctccttcggatattatgaataatatcacaggatgtacacccactgtgatattaggagtaatatctcccttggatatttctaataataccacagcgtttacacacatggtgttcacccactgggatgttaggataatatctcccttggatattaccaatcgtatcagaggctgtacacacgtggtgttcacccagcgtgatattaggaataatatctccctcggatattaggaacagtctctccctgggacttagcagaacgtagccccccagtgttaaataagcgaccacagcaagaggtagaggcgcagggactgaaatgaagacaaatatctgacaagtttaaaacacgtatttaaaatagaatttataaaatgcttaatctgccgactcaggagcccgcggtgcagggtggggtgggagttggcaggtgaccgctacaccagcagagtaagactgcagggctgcggccctccctcctatgcccttctgttcagacacccgaggggctcatgtgcactcctgggatcatacgaccagaaaacaggaccctagaggtttcttgagtttctgcttaccagggcggctgggtatagccctgccagcccattgcataatcttctaagttctccccaccaccctccattccagcagcgaggtgcctgtgatgcggtctccatcctctcggcctcgacccggtggtccccgcgattggacgcttaggcggtcaccaggcctccttgttactaacgtgtgcacacctttcagttctctcatcaggatgaactcctggaaattgctgggtccaaagtgtttgggaagtttggagtgattcttgttgcagggggaagagggaactatggaggtgtcactgaactttcaggggttccgggaccccccaacccggtgcccgtcccagctccccgagcgcctctcttcccccctcccccacctcgcctgttttcacctcccgtggcctcactcccgccgcgcagctggaccttgcccggggcctcccgatcccggagctcgaatcccagccggaccagcctagcccgaccagcccagccccgcctcttctccggcaggatcgcggccgagcagtctgcccagagacttagcgacagacagacgctgggacccacgacgacagaaggcgccgatggccgcgcctgctgagccctgcgcggggcagggggtgagtgccccccatcgcgccccactctccttttccaggcttggtttggctgcagatctctcgggctgcgatactggggagaggagagacccccaaattcctggacccgggaagcgag

SEQ ID NO: 15424 - DNA, 2300 bp, Homo sapien
agtccaatggcatgattgtggctccctgcaacctccgcctcccagattcaagcgattctcctgtgtcagtctcctgagtagctgggattacaggtgcccgccaccatgcccagctaatttttgtatttttagtagagacggggtttccccatgttggccaggctggttttgaactcctgacctcaggtgatctgcccgcctcggcctcccgatgtgctgggattacaggtgtgagccaccgcgcccggcccattctcagcttcttgatggcttcccccttctgggacattgatcacttattcatgacattgactggtcatgagccactcctccgccagcccttggaggatccaagtgattcacaaatggacacaaggaatatgattagtcctctgtgagtgattctgaggggccgtggtatagagagagagaggggaaggaggatgggaaaatgcgggcagttccctccccaacccattctgacagtttgctggttagagaaaaatccccatgtcagagaatttttttctttgtttatttcctgtgaaatagaatgtgggtctggcattggggaggactctaataattcatattttctgcttatttggctcctggctgaacaggaatttacattacttaatgtctgggtttttcctggggaatcaaaataagttttctattcaattattaagcaaatttcacagccaaataatcctcttatttttacaagtggtattttccctggcagagggttttctggcttctctgggtagttgatccgtctcctctcttctgtttcctctgtccttgtctggctatgaaggaagctaaagcccctcattcatggattaggggcttctcaatggcagttggcagactttggctttgcaagctagagatgaatctttttcttctttctttttttttttttttcgagatggagtctcgctctgttgcgcaggctggtgtgcagtggtgcgatctccactcactacaacctctgccttccaggttcaagctattctcctgcctcagccttccaagaagctgggactacagacatgcaccaccacacctaatttaaaaaatattttagtaaatggctaatttaaaaaatatttttagtaaatgggaggttttaccatgtcggccaggctggtctcgaactcgtgacctcaggtgatctgcctgccttggcctcccaaagtgctgggattacaggtgtgagccactgtgcctggcctagagataaatcttaatgtccgccagccatggggtaagagtccactccctctttctgctcttcagtctattgactttgggcacaggcacagctgcagctctagtaggggttgggcctggagtcagtggagacaaaatgtgaaggtaacaggacagtgcacagggcccagtgtgctctgcctgggctgctcagggaagaaaaatcacacacacacaaataacaaccctttttttgtcagaagtacagtgaaagatctctacgtcttggccagcatttgttatctttttgcttctttgaaaatagccatcctgggccagatgcagtggctcacgcctgtaatcccagcactttgggaggctgaggcgggtggatcacctgaggttaggagtttgagagcagcctggtgaacatgatgaaacctcttctctactaaaaatacaaaaattagctgggcgtggtggcacgcgcccataatcccagctactcgggaggctgaggaacaagaatagcttgaaccctggaggtagaggttgcagtgagctgagattgtgccattgcactccagtctgggtgacagagtgagactctgtctcaaaaaataaataaataaataaattaaaaataaataaataaataaaggaaacggagtcattgtgttgaagagatatctgcactcccatgttcactgcaatattattcacaatagacaaggtatagaatcaacctaagtgtccatcagtggatgagtagataaagaaaatgtgatacacatacaccaatgtggtatatatactcttcagccttaacccatctccataaaaattaaggaaacaaagaaggaagtcttgttattggtgacaacgtggatgaacctggaagacattatgttaagtgaaataaatcaggcacagaaagacaaataccacatgatctcacttatatgtggaatctaaaaaagttgaactcactgaagtagagagtagaatggtggttaccagaagcaaggtgagggtgtctgtgagagggttggggagacattggtcaaaagataaaaaat

SEQ ID NO: 15425 - DNA, 2300 bp, Homo sapien
tgctgggtcccttttactatgagccaaaaccacctaggtaggaatggatgatccagatgctatcaccctctccccactccggggtctctgcctagcaacagcagcagtatgctgggaggatgctgggatcaccccacagaaatacttgtctctgagccaagacatcctgccagcacgaacctaaattgtcttcagaccctcaaaccctggggtctagtcccacaccaagcagccctgggtcatgttataaagccatttacaggatctgaggaacaaggggtaaggtcatccgcttccttgccaacataaaagaacacatgttaaatccatcagccacaccactccttcttcccctgtcacgtttctcccactcctgaccacttcaaaggacataggatccccacaaaatggtgacaacaaatggagccattttcatatcctattttatttttgaagtcagtgtccagaaagaaaccgacgattcactcaatcaacatgtaagcgactgaggcatccctacacaccaggtttgcaggctagggaccagagacacgatggttaaacaagccagagccctgtgatcctagggcttacaatgctggcataagaaaatccttctggactcactgtccccatgcttgtgactgtcatgtgccaagtgcgctttacacaatctcatttttccctcaacttggggataggttttgtatcattcccattacagatacggatgctgaggttactgagtggaagaggaaacctgaattctgctgctggaccccaaaactcatgttaattacccacagcctcccaaacatcagaggccccaaacatgcctcccaactcacttctcacaaatgggggccgttatctgccccatctctagggccgttctgtaacattctcagcgacttcccatatcttacagaggcaggccctcctttcaggaagctgatccatgccccttaataaggtagcttctctccccacttggcacaccacctagctagccaagggcaaagcagagactaggggacaggccccagcaccgggtcagcacccactacctcctcagtgatcaacagtgcccattgcacttcaatgggcacctgcaagtggcaccagattctcttggaacaattcttaaggcagggcgtggtggtcacacctgtaatcccagcactttgggagaccaaggcaggcagatcacttgagatcaggagttcgagaccagcctggccaacatggtgaaaccccacctctactaaaaatacaaaaatcagccagacatggtggcacacacctgtaatcccagctactcaggaggctgaggcacgagaactacttgaatctgggaagcggaggtgcagtgagccaagatcatgccactgcactccagcctgtgtgacagagcgactttgtcttaaaaaaaaaaaaaaaaaaaaaaaaattcctagcaagtatttattacagcagtcagtgacaaaagccagatctaaaatcctatctacagaataatcctagccaggcaaaacaaattcatcaaaaactaatagaaaatactgaaatataggccaggtgtaatggctcgtggctgtaatcccagcacttcgggaggccgaggtaggctgatcacttgaggcccagaactcaagaccagcctgggcaacatggcgaaaccctgtctctactaaaatataaaaattagccggatgtggcgacacacacttgtaatcccagttactcaggcggctgagacaggacaatcacttgaacccgggaggtggaggttgcagtgggccaagatcgcgccactgcactccagcctgagcaatagagtcagactctgtctccaaaaaagaaaaaaaaaaaaaaaaactgaaatacaactaaaatatttagtgtcaaatacctggttttggcagacagcaggggtgactgtttcttaggcatactggtttcataagaactttttcccttggctgtattagtcacttcagggaatcgcattcaccgataaacgaagcaactgcatgctgccgcagaagctgtggctacactgctgtaaaggctcaaaacgaccaagtggaagcaccagagtccatgaggcattttatttgtaaatatatgtattacatccctagaaaaagaatcccaggattttccctcctgtgtgttttcgtcttgcttcttcatggtccatgatgccagctgaggttgtcagtacaatgaaactatggagtggaaaaagaaagtgctggtaagtttaatagttcaacatagtgccttctagtgcagaa

SEQ ID NO: 15426 - DNA, 2300 bp, Homo sapien
gtgctcagtaaacaactgttgggtgacttttgtctgaacttaactttttaattaaaaaaaaatttttagccgggtgtggtggctcacgcctgtaatcccaacactttgggaggccgaggtgggcagatcacttgatgtcaggggtttgagacgagcctggccaacatggtgaaaccccgtctctactaaaaatacaaaaattagccgggtgtgatggcgggcgcctgtaatcccaggtactctggaggctggggcaggagaaccgcttgaacccgggaggcggaggctgcagtgcgccaagatcgcgccactggactccagcctgggcgacagagcgagactccttatcaaaagtaaactaaaataaaaattaaggcccgcgcggtggctcccgcctgtaatcccagcactttcggaggccgaggcgggcggatcgcaaggtcaggagatcaagaacatcttcgccaacttggggaaacctcgtctctactaaaaatacaaaaattagccgggcgtggtggcgcatctctgtagttccagctactcaggaggctgaggcaggagaatcacttgaacccgggaggcgcaggttgcagtgagccgagatcacgccactgcactccagtctgggctacaagagcgaaactgtctcaaaaaaaaaaaaaaaatgtagacgaacctccaacgaacggctcaccttgcctctcccaggccccaccgggggaggtcgattccatcgactctcaactgccaacccctgaggaggctccgcctttccctcaccctcgtccttctcctaggcggtccttgtttttgccgggcctttgaaagtctcgcgatagctctcccgcttcccataactccgtgcgctctcccctcccgtcctctttccgccatctttccgcgccggtgagtagcactctctgagagctccaatttcatccgtctgccatcggcgccatcctgcaatctaaggttcggtctcggtgtcctgcgaggaggctggtccccaccttggccgaggatcctggccttgccggttcctggacaggcatagaggagagccatggctgggcgccccagactgtgcactcaggggatcccggtccgtggggtgcaggccgcagcgcgggcgggagccggagccttcgactgcccagctaggcggtagctccggttcgggccgcagcgtctggatctccctttagtgctgaggcagcgccttggccccgggcggcgggcaacatcggggctggtgggccgtgcagcttctcactgctgcggccgcgctgggagcttgggaggctgaggccacccagcaggtaaaagctgcatcgtgccggggttggcagtttgctgggtgccaacttggatcttctgggccgcagagtttttctttagacacttttgaacttaaggaatttaagttctactctttactattggcactttggtctttcaaaacttcagtgtagtgtgcggttcttgcccattagaagagagtccagtctgacaagcatgtaaaatgtttctgtttgccactgtggctcttgctgttggacgcaattttaaatggcacgaagatggatgtttaatagttagatgtgttcattgtaggtgagagtgaactgatttaaagtacaatgttaatagtatggaatctgctgattttcagcaatttggaaaatgttgccgatgatactctgcttctgttctgaatcactgatcgactatacccgatgttttccttccggtagctggcagtttctgccagttctcacgttgtcttgtgtcaagtggattttgtcccacattttattatctccagacgttggtgtgtggcacgattcgaagaagagtggttagtgaatgaatgagtttcaaaatgtgcaggctgacgtcccgataacctgttttcaacaaccgtagtaaataggaattttcctgggtggtgggaaatggagaagcagcctgcttagacttgagaaaacttcgccaaggtggggccagaaaggaaaggatacttccgcagtgtaatggttggtgtctgttgatgttggcaatgccagtaaaacctcctgttttgtcttccttgaacagccacaatggtgcgcatgaatgtcctggcagatgctctcaagagtatcaacaatgccgaaaagagaggcaaacgccaggtgcttattaggccgtgctccaaagtcatcgtccggtttctcactgtgatgatgaagcatggtaagtctgctgccgctgtgttttatgttttcatgtgagactctctaagaaatcagtcctgt

SEQ ID NO: 15427 - DNA, 2300 bp, Homo sapien
tgactttcactctaagactggcaaaaggacagcagtcttctatgtttagtcaatattcatttcagtagaagataatcttatctaatttttgagaccagaataagccttttaaggtaaacctcaaaattatcattttatggtaatactgaccattttagtcccctaggtttgacatgggagatagtgactacactggtgtctgacttttttcctagagatttctccctgaaaaatacaagggctgttggtgagagcagacttgaggtgatgatagttggcctctggtctacaaagatttcataactccttggaaagcttcttataatcattcttaacttcttggtagctagaaatttagagtagttgaaatctttaggaatgaacttctgagggccaaaaaatgtgactgacgggaacaattcttaaactgattaactagctgtaatatagttttgtgaatttattgcactgatgttgtaccttgtggtatatctgtccctattaaataagtgttgttttctcctctttaatattgctgtgaacagtggtgcccattgtagcatatgtttgatttttttttattatttcataagaaaactacgttaattttaccttactttcattgtaaataagcctgtcttcctatctggattttttgtgtgcatacatattctactgattaactacttttgcagttttaatcctgtattatttcttctactttgttttgtgtaaaaggggaaaaaataaaaaaagctggaatcttcatgtctcactttctttataacttagccaatataatatttatgattggatttatgaatctgattaatgaagtaccctgtgtggtccttagatgtctataaggtaccctacctgtaatcccaccactttgggagacctgggcaggaggttcactggagtccatgagtttgaggttgcattgagctgagtgtacccctgcactctagcctgggcaacagagcaggaccctgtctaggaaaaattttaaaaaagaacaaaaataaaaggtttaagttttatttagcaaatatccaggtaccatgctagagggaagaggaaatgcaacgaatgagcaggggcattgacgtgtgagagaggacgaagctggaagaaccggcagggacagaactggctaaatggtgcctgtgtgggcacctcgtaccccagggccttgctagcgtctggtacatgggtgctcagtaaacaactgttgggtgacttttgtctgaacttaactttttaattaaaaaaaaatttttagccgggtgtggtggctcacgcctgtaatcccaacactttgggaggccgaggtgggcagatcacttgatgtcaggggtttgagacgagcctggccaacatggtgaaaccccgtctctactaaaaatacaaaaattagccgggtgtgatggcgggcgcctgtaatcccaggtactctggaggctggggcaggagaaccgcttgaacccgggaggcggaggctgcagtgcgccaagatcgcgccactggactccagcctgggcgacagagcgagactccttatcaaaagtaaactaaaataaaaattaaggcccgcgcggtggctcccgcctgtaatcccagcactttcggaggccgaggcgggcggatcgcaaggtcaggagatcaagaacatcttcgccaacttggggaaacctcgtctctactaaaaatacaaaaattagccgggcgtggtggcgcatctctgtagttccagctactcaggaggctgaggcaggagaatcacttgaacccgggaggcgcaggttgcagtgagccgagatcacgccactgcactccagtctgggctacaagagcgaaactgtctcaaaaaaaaaaaaaaaatgtagacgaacctccaacgaacggctcaccttgcctctcccaggccccaccgggggaggtcgattccatcgactctcaactgccaacccctgaggaggctccgcctttccctcaccctcgtccttctcctaggcggtccttgtttttgccgggcctttgaaagtctcgcgatagctctcccgcttcccataactccgtgcgctctcccctcccgtcctctttccgccatctttccgcgccggtgagtagcactctctgagagctccaatttcatccgtctgccatcggcgccatcctgcaatctaaggttcggtctcggtgtcctgcgaggaggctggtccccaccttggccgaggatcctggccttgccggttcctggacaggcatagaggagagccatggctgggcgccccaga

SEQ ID NO: 15428 - DNA, 2300 bp, Homo sapien
ctccatagctttaaaatctctccaaatagcgtctctgtcaactggctgtatcctgcctttacaacttctttaccccaacattctccaaagtggcactttattgaacagtcagcttcccttgcaaagactttttttcaagtgcttctccctgattcagatacttcactcccctttccccgaaagacccacagcaaattgacacccttccatgaaattcacaatgctcctgcccttgcccagctctcttaggggcagtatgtggtctgcagctatgttctctcacatttatgacttccttgaacatttaagaacctggtggttacttaaggaacattttaaaaataaatttaaattcaatggccgaatacaaatgaccatgagattggaagttaaaacctgtaaaaaagataaaaggttggaagttaaaactatagttaattcacctgaaacaaacatctgatccggacatttggcatgattctgtttgtatcaaacgatgaaaaatcggccgggcgcggtggctactgcactacagcctgggcaacagagccaggctgtgtctcaagaaaaaaagaaaaaaaaaaaaaaaaaaaaaaaaaaaagatcaaagcacttgttactgcatttgaaatcctggatagaaaagatgtacaagtgcctcaacacagttcctaaactgcctaggaattctactgcttgtgagagggtttacatattttcttagcttgacctctaatggaagaaaggtcgtgtcaagaactatccttttggccgggcgcggtagctcacgcctgtaatcccagcactttggcaggctaaggcgggcggatatcttgaggtcaggaggtccagaccaccctggccaaaatagcgaaaccccgtctctattaaaatacaaaaattagccgggcgtagtgacgggcgtctgtaattccagctactcgggaggctgacgcgccaggatcacttgaacccgggagatggaggttacagtgagcagagatcgcgccactgcacttcagccggggccacggagcgcgagactccttcgtctcaaacaaacaaacaaacaattctggccgggcgcggtggctcacgcctgtaatcctagcactttgggaggccgaggcgggcggatcacgaggtcaggagatcgagaccatcctaacacggtgaaactacgtctctactaaaaatacaaaaaattagccaggcgtgttggcggacgcctgtagtcccagctacttggaaggctgaggcaggacaatggcgtgaacccgggaggcagagcttgcagtgagcaagatcgcgccactgcactccaggctgggcaacatagcgagactccgtctcaaaaaaaaagaaaaaaaaaaaaagaatccttttggagagggagcttgtagtttaagtaacttaaacatccacgtataataaagccacttagaaggcggtgcattttcacacgttctcaaaccaggcctgggtttttccgcgcaagctaaggcctcattcctactgggtaggagagaaacattgcagcaaaatccacacaaagagctcttttcacttgtcctcaaaacctcacgggtcgcaaatccgggctaaacggctcaggggcctggctggggaactgggccgaaggtggaacggatcccagccacctcggggccaggaaaagatgaagtgtcgcaggcccggcgtccccgccctccgcctgaggcaacggagcatctctcttcgagtagcccattttccagagagtctcctcggctgcgaaagccagacgaagagggacccaaagccaccgcagcggcaagagccggagaaccactgagggacagcgccccctgcagaggcggttgaaccgcttcccacagcgctgggcggggcgtcgcgcagtccctgggcgctgattgggcactccgtgtcccctccccctcggcccggcgctgcctctgtctcctttgacctcgatttcaagccatgcgctgagcttcggttggcccggcttccttgaggcgtaagctcggtctgtccaatgaggagcgagcgtcgcgggggccgtcgggaagggcggccgacccatataagcagcctgcggggcgttccctcgggttgtggttggtgtgcgggtttcggttggaggactcgttggggaggtggcctgcgcttgtagagactgcatccccgagacgatggcggagggagataatcgcagcaccaacctgctggtgagtcctggctgcctgtcccccgggagccgagcgaggcctccagacgtccgtgggctcaaacaccgc

SEQ ID NO: 15429 - DNA, 2300 bp, Homo sapien
gcatattggagttggagaacctgacttcattttgggacagttgtatcacctgtcttcagtacaggcacctgaagtagccaaatcttgggcagcgttggccagctgggcttataggtggggcagaaaggtggttgacaatgccaggtatgtttaaatgtgtagtttatttatgcattgcataaatagatatttaaatgtctgctgatatggtaaagtttgggtagctgaaatactgatgacttgtttatttttatagtcagggagaaggtgttcgtctgctgcctagagaaaaatctgaagttcagaatctacttccagacactataactgaggaagagaaagagagaatatatggtattcttggacaggctgtgtgtcggccggcggggattcaggcaaggaaaacatggtgcttggggcaagattgctactccaaatcattgattttgagaaaattgatcatatatatttgataaaatactgaatggggcttaccaattgttgttgtaaataaaaacttctgcattttaagatgaaagtgagttatatttttctaagaagaatatacttttgagaaaataaggcatttccttagagtcctgttaaaaataggtgagttggcctggcacggtggctcacacctgtaatcccagcactttgggaggctgaggtgggtggatcgcttgaggtcaggagttcgagaccagcctggccaacatggcaaaaccccatctctactaaaaatacaaaaattagcagggtgtggtggtgcatgcctgtaatgccagctactcgggaggctgaggcaggtgaaccacttgaatgttgcagtgagatcacactactgcactccagtctgggtgacagagtgagactgtctcaaaagaaaaaaaagttattaagtgaagttcattttaggtaaattacatttattttttaattacttttatcagaaattgtaagttcttaatccttggttgtgagcttttaaaatatgccagtgcacgaaacttactcccagatactctgaatgagacgtgtgtgcgcgtgcgcgtgtgtgtgtgtgtgtatttaaacttactaggtgatgctaatgtgcagccagtgttgaaaatggactagatgatctgtataattcacactctctcccttcagagttccgtcaattctagaatgccaaagcaatatattatttagttgcagtcctcaaaggcatggattttatttgccaagctaagctatatcgatcagttcttgctgtaaacagcagcgtatctaagtctctccctaagctggtgtctgatacatgcacagtactgtgaagagaatgaggtttagtatatgtattctgtgtacattcagcttcaaacttttgagcagattgtgcttattttttttgcaggcataggctgggtgcggtggctcacacctgtaattccagcactttgagaagccgaggcaggcggatcacctgaggtcaggagtttgagacaagcctggccaacatggtgaaaccttgtctctactaaaaacacaaaaaaacagcagggcgtggtagtgggcacctgtaatctcagctacttaggaggctgaggcatgagaattgcttgaacctgggaggcagagaggttgcagtgagccatgattgtgccattgcactccagcctgggtgacagagtgagactttgtcacaaggaaaaaaaaatttctgcaggtagaatactgtattgtaacttggaagcatttaaagtacaacgaaaccccagaaaagtctagtctttgctaaatgcttatattcttcttcactggcttcatattagtaaatatatcataaagagaagcatactgacattgacttactgtgtataacactaaatgtgggataattttatcttttatatatgagaagaattttttatgatagtcaaattacatacctttttcccttttcagtttgtatttaaaatagcattttgtgcacaatttttcttcaggatgaagatataacacttcagataactgagagtgaagacaacgaagaagatgacatggttgatgttatctggcgtcagttgatatcaagctgcccatggctttcagaacttgatgaaagtgcaactgaaggagttattaaagtgtggaggaaagttgtagatagaatattcagcctgtacaaactctcttgcagtgcatactttactttccttaaactcaacgctggtcaagtatgtagcacagtgttctaagaaaatttattttggaaactttttcttattaaacaaaagtagtgttctgagtta

SEQ ID NO: 15430 - DNA, 2300 bp, Homo sapien
catgcctcagcttccccgaatagctgggactacaggcgtgcgccaccatgcctggctaatttttgtatttttttgtagagatggggtttcaccatgtttgtcaggctggtctcctgacctcaaatgatccacccacctcggcctcccaaagtgctgggattacaggagtcagccatccatggtgcccctccttttctttttcttctcctccctccctccctccctaccctccgcagcccaggctggagtgcagtggcgggatcataggtcactgcagcctccacccgctggactcaagtcatcctcctgcctcaccctcctgagttcctgggaccacaggcacgcgctaccacgccagctaatttttgtaatttttgtagtccccatcatttagaactggcaggatcctcccttagtgagggattggtggccataagcaaggagcccaaggtggaggggatatgcatgtgtgtgaaggggtcaactcctcgtaatcttcaagtacttttggtaacaatatttatttgcacaagcgatatataaagacgttttctttgcaacataaaatgataggttatgactccttatgcagatacggtttagacactcgtttaaggagcatcctggcccaacttttaaaaaacgtgtgtgcattcacgttatgcatcagatgctttagggaacttttttccctggggcatgggacacgtcatggggtagacggtcgggtacgtctcctctacccagctgctgctttgttttttttttctttttgagacagagtcttgctctgtcgcccacgctggagtgcagtggagccatctctgctcactgtgagctccgcttcccgggttcacgccattctcctgcctcagcctcaggagtagctgggactacaggcacccgccaccacgcccggctaattttttgtatttttagtagagacggggtttcaccgtgttagccaggatggtctcgatctcctgacctcgtgatccgcccgcctcggcctcccaaagtgctgggattacagacgtgatccaccacgcccggccttctctctttcttttcttttttcctttcctttcctttcctttccttccttcctcccttccttccttcctttttcttccctccctcctttctctctctcttttatttttttgagacagagtttcactcttgttgtccaggctggactgcaatggtctgatctcggctcactgcaacctcggcctgctgggttcaagcgattcccctgcctcagcctcccaagtagctgggattacaggcgccctccaccatgcccggctaatttttgtatttttagtagaggcggggtttctccatgttggctaggctggtcgggaactcctcacctcagacgatccgcccacctcggcctccgaaagtgctgggattacaggcgtgatccaccgcgcctagcccccagcttctttcaccagcagaaggcgggcaagcctcagggtgaaaggacttcaaagcacatttcacattgcagaggacagggtttggtgatcgtgggtactcccttcccttccatcgtttagtttttttcattgtgaagaaatggtaaaaggtgccaggactcgatgggcacatttcaggtggaggttgggaaggtggatatccacctctcgatcttactattttcactttccaccccaccccgtagaaagtgggaaaactggcgcacgtgaatccaagggcacgcctgtgtgcgcgcgcaccgcagggcaccagcccccacccacaccgcaggtccttgattggacgcctgtttacacctgactgcccggccctccggtgctttccgggaagcgtttgggagaaaagtgtgtggccgcagtagtggagatcccctgtcttaggattcgtcaccgctacgcccagacctcttcgccgcccaagggcctggggacgtggggggcggggcggcctgctatcgaccccgcctctctcggctccgccccgccgacaggacccgcctctctccccaggcccggcgggcgccaaccccgcccctcgctcccagcatgccgtgcgacagcggcggcgcggcgggcggagccgggaggcggggaagcagtggccgtgtgagcgtgaggagctgccgccaccgcctgctcctcgtcgtcctcgtcctccggggccccggcgacgtgggccgcgcacggccctggaaaagacgtcgcctccccttcatccgcctctctctcaccgcgccgctcccgcctcctcgtcctgcgctgcgggctcaggcggaacccggaacggcc

SEQ ID NO: 15431 - DNA, 2300 bp, Homo sapien
ctcctgggctcaagccatcctcctacctcagccttctaaagtgctgggattataggcatgagccactgcgtccagccttttttttttttgagacggagtctcactctgttgctcaggctggagtgcagtggcacaatctcggctcactgcaagctccgcttcctgggttcaagcaattctctgcctcagcctcctgagtagctggggttacaggtgcccaccaccatacacagctaattttttgtattttttttagtagagacagggtttcaccatcttggccaggctggtctcgaactcctgaccttgcgatccacctgccttggcctcccaaagtgctgggattacaggcatgagccaccacacccagtctccagcctcctttttttttttttttaaatgaccttgacagttttgaggaatactaatcaggtattctgtagaatgcccctcagttgaatttgtctgatatttttcttatgaccacagaggtaaagtgcccttctcatcccatcgtaggaagggtgcacaccatcctcatggcttaatgttgatgttaacttatttacttatttactttttttttttgagatggagtcttactctgttgcccaggctggagtgcagtagtgcaatctcgactcactgcaacctccgcctcctgggttcaagagattctcctgcctcagcctccctagtagctgggattacaggcgcccgccaccatgcccagctaatttttttgtatttttggtagagacagggtttcgccatgttggccaggctggtctcgaactcctgacctcaagtgatccacctgcctcggcctcccaaagtgctgggattacaggtgtgagccactgatcccggatgatgttaactttgatcatctgtctgagacagtgtttgtcaggtattatctaatataaaacccaccctcaccctcttccaccaccacttccatactgcactcttttggaaggatgtcgctatgggcaactcacacttaaggagtagggagctaagctccccatccttaaagtatctacgtaaatgatttcaaaatctgcacaggagatttctctccattttccccatttatttatatttagcaattacttttctttttctttttttttctgagatggagtctccttctgtcgcccaggctggagtgcagtggcgtgatctcggctcactgcaacctctgcctcctgggttccagcgattctcctgcctcagcctccctggtagctgggactacaggcatgcactaccatgccaggctaattttgtatttttagtagagacagggtttcaccgtgttggccaggatagtctcgaactcctgacctcaggtgatcctcccgcctcggcctctcaaagtggtgagattacaggtgtgagccactgcgcctggcaattttatgtttttaacctgcacacgaacagaggtagagatgaaacgaggatatagtgcaaaacgtaaaagacaaacactgcacgtggttttctcttcactcggccctctagctccccacccagagctaccacaggtagccagttttttgcaccctctagggagatagcttaggcatttacaagcatgtacaaatatattttttggtttcctttttgttcccaaatggtaacttactagatgcactgatttggagtcttggggttttttgcgtgtggactttttattttttaattttaaagatgggggtctcactgtgttggccaggttggtctcaaacttgtgagttcgtgcggtcctccagcctcggactcccaaaatgcgaggattacagacgtgagccaccactcccaaccagttatttttgttatttatttctttattagatcaggtttgattttagatgcagggggtccatgtgcatgtttgttacatgggtgtaccgggtcctggtggagactgggctcccagtgcgcccaatctattgttattttttaagctcagtgagacatcagggaggtcgctgcttgtcgccaccgctggatggagccttgccggatctcccgggctctgcagcccctctgcggtccctgatgctcggctcctcgcgggggcgccccactccggcttctgtgatgtcagcgccggaacctggaatcccggctccgcgagggaaggccggggaggcggcggcggcggcggcggctggagagggtcctcggcagcctctgaggagcgcggggcgcggccatgagcgagtccagcggcagtgcgctccagcccggcaggcccagccggcagccggcggtccatccaggta

SEQ ID NO: 15432 - DNA, 2300 bp, Homo sapien
tgagccaccacacccagtctccagcctcctttttttttttttttaaatgaccttgacagttttgaggaatactaatcaggtattctgtagaatgcccctcagttgaatttgtctgatatttttcttatgaccacagaggtaaagtgcccttctcatcccatcgtaggaagggtgcacaccatcctcatggcttaatgttgatgttaacttatttacttatttactttttttttttgagatggagtcttactctgttgcccaggctggagtgcagtagtgcaatctcgactcactgcaacctccgcctcctgggttcaagagattctcctgcctcagcctccctagtagctgggattacaggcgcccgccaccatgcccagctaatttttttgtatttttggtagagacagggtttcgccatgttggccaggctggtctcgaactcctgacctcaagtgatccacctgcctcggcctcccaaagtgctgggattacaggtgtgagccactgatcccggatgatgttaactttgatcatctgtctgagacagtgtttgtcaggtattatctaatataaaacccaccctcaccctcttccaccaccacttccatactgcactcttttggaaggatgtcgctatgggcaactcacacttaaggagtagggagctaagctccccatccttaaagtatctacgtaaatgatttcaaaatctgcacaggagatttctctccattttccccatttatttatatttagcaattacttttctttttctttttttttctgagatggagtctccttctgtcgcccaggctggagtgcagtggcgtgatctcggctcactgcaacctctgcctcctgggttccagcgattctcctgcctcagcctccctggtagctgggactacaggcatgcactaccatgccaggctaattttgtatttttagtagagacagggtttcaccgtgttggccaggatagtctcgaactcctgacctcaggtgatcctcccgcctcggcctctcaaagtggtgagattacaggtgtgagccactgcgcctggcaattttatgtttttaacctgcacacgaacagaggtagagatgaaacgaggatatagtgcaaaacgtaaaagacaaacactgcacgtggttttctcttcactcggccctctagctccccacccagagctaccacaggtagccagttttttgcaccctctagggagatagcttaggcatttacaagcatgtacaaatatattttttggtttcctttttgttcccaaatggtaacttactagatgcactgatttggagtcttggggttttttgcgtgtggactttttattttttaattttaaagatgggggtctcactgtgttggccaggttggtctcaaacttgtgagttcgtgcggtcctccagcctcggactcccaaaatgcgaggattacagacgtgagccaccactcccaaccagttatttttgttatttatttctttattagatcaggtttgattttagatgcagggggtccatgtgcatgtttgttacatgggtgtaccgggtcctggtggagactgggctcccagtgcgcccaatctattgttattttttaagctcagtgagacatcagggaggtcgctgcttgtcgccaccgctggatggagccttgccggatctcccgggctctgcagcccctctgcggtccctgatgctcggctcctcgcgggggcgccccactccggcttctgtgatgtcagcgccggaacctggaatcccggctccgcgagggaaggccggggaggcggcggcggcggcggcggctggagagggtcctcggcagcctctgaggagcgcggggcgcggccatgagcgagtccagcggcagtgcgctccagcccggcaggcccagccggcagccggcggtccatccaggtagggcggcagggagcgcgcgcggggacggtgcccctggggtccgagggcgcacggagggagccgggtgctggaggctcggcctggccgctgttccctcccacccccgacgccgggtgctcccggctctggggaacagcaggtgggaaggagatcttccttattcctgctccctccacaaacgcgtcctcatccaatccagtggaacccagccgggccaaaaggacacgagaactgcagtctggaccgtggtgggtttgtcttccagctgttgaccgagacagtctttcaatagcctcatctgctgttaaatgaaaggatttgagcaccccctccacgcctaacattctggtatg

SEQ ID NO: 15433 - DNA, 2300 bp, Homo sapien
aattgacctgtatattttatgtaatcccaatcagaatcttagcagattgcacgtgaaaattaaaacactaattctaacatttgtacataaatgcaaaagaccaaagatatctaagacaatcttgaggagtaacaaagcttaaagataccatgtgacaagtcttacaaatctgcagtaattaagacagtctagcattggtgtaaggatagacatgtagacccatggaacaggatagagtttagaaacagattcatacatatatgttcaggtgattatttccaaaaaaggcagccaataaatggtgctgagtcaactagagattcatataaggaaaagataaatattgagccctccctcatacgattctcaagtgattaattcaagattgattgtagatctacaggtgaaaagtgaaaacactagaagatcgagtcttaaagctaacaattgagaaaaaaataaaacgtttcttcctccttccagctactgattcctccagcttcagcttttgtggctgattgaatctatgatgtgtagtgtatcaatatccctggtcagtgatgtccgggtttgttttttccagggaaatttggcactgggattcagtcctatttctccttcttgagattcctggtgttgctgaatttggtgatatttctgatcatctttatgctggttttgctcccagtcttactcacgaaatacaagatcaccaacagcagcttcgtgctcattcctttcaaagacatgggtgagtgtaaggcctggtttactacgaagtgtgtttgtttttcaccatgtaccttgctacaatgcttcctttgctaagaatctttattctaattcttgggcgactgtattagtcaggatggtctaggttatgctgcagaaacaagtgaccccataatgctcatgctgctgtggaataacagcatgcaggcacgacagcataacagtatgagactgtgagtgagaaataaccacaaaggttcatttctcactcacagtccatgtccactgtgtgctctggagcccaagctgatggagcagcctctatctggagcattgatagtcacacatacaagcaaaacacaagctctacatgtggacttacatacaaaatatgtaaaaaagacatatccccagatgtgtggggagaatagtgaaggaaacattagaagtagaaggagaaagagatgttactgtattggacacattggggtttggactgaaaatggcaaatcacaaatacacaaacatatctatgtgcaaatatgcaaatatatatgacatttctaaatgtaatatacatatacagtcatgtaccccatgtcaatgtttcaattaacaatggaccacatatgcaatggtggtcccctaagattataatactggatttttgctgtactttttctttgtttagatatgtttagatacacaaatacttaacattgtgttgcagttacctacagtattcagtgcagtaatgtgctgtccacgtttgtaacctaggagcataggccataccatacagcctaggtgtgtagtaggccatcccatctaggtttgcgtaagtccactccgtgatgttcgcatgacgaaattgcctaaggacatatttatcagactgtatcctcctcgttaagccatgcatgactgtacatgcttatacacacaaatagtgaaaaacaggcaggctgtggccgggtccgggggctcacgcctgtaatcccagcactttgggaggctgaggtgggtggatcacctgaggtcaggagttcaagaccagcctggcgaaaccccatctctactaaaaatacaaaaatgagccaggtgtggtggtgaatgcctatgatcccagctacttgggaggttgaggcaggagaatcgcttgaacccaggaggcagaggcttcagtgagccaagatcacgccattgcactccagtctggatgacagagcgagactccatctcagaacaaacaaacaaacaaacaaacaaaaaaaccaggcaggttatagagactaaaactgtttccactgacattctggtttttgtttcttacagataaacaatgtacagtctatccagtaagcagttctggactcatttacttttacagttatatcatagacttgctttctggcactgtaagtatttaacataatcctttgtttagctcctcaatctactaaaaattgattgatttaaagatcagtttcccaaatttctgcagtgagagctaaacacaagtgttggttgacacatgtaccagtaaatgaaacaggatttgcagttac

SEQ ID NO: 15434 - DNA, 2300 bp, Homo sapien
ttggtattctaatttctttttcacttaatatgtgttttcctgaagaatctagtgttttctcctgttattaaaagctctttacaaacatttcaatgggctacataacatcatacagttggatttttttttttttttttgagccagagtctaggtctatcacccactctggagtgcagtggtgtgatcatggctcagtgcagcctcaacctcctgggctcaagtgatccttttagcctcacaagtaggtgggatcagaggcacacaccaccatgcctgactaatttttaaaattttttgtagagatggaatctcactgtgttgcccaggctggtcttgaactcctgggctcaagtgatcctctcgcctcagtctcccaaagtgttgggattacaggcgtgagccactgcactcggacatgatgttttgatattcaattgttgcttaacattttgtttccaaattttcccagtaataaataatgggcacatctataaatctttgtcaacattttttctccttagaaacagagacctaggccaggcgtggcggctcacgcctataatcccagcactttgggaggacaaggtgggaggatcacttgaggtcaggaatttgagaccagcctggccaacacagcgaaacccagtctcagctgggcgtggtggtgtgtgtacctgtaatcccatctacttgggaggctgaggcaggagaatcgcttgaacccgggaggcagaggttccagtgagccaaggtctccccactgcaatccagcctgtgcgacagagtgaaactccatttaaaaagaacaaaaacaaaaaacaaaacaaaaaggaaacagagacctagaagtggtattacagcaaaggttttgaacattttaaggcttttgagcgccagattcagacactcagtagttttacatgagagtgctacaacatcctcactaagtagtatttgggttcatcataattttaaattattttggtgtgtcaatttgaacactagagtgatataaaaactaaaaacttgaattcaataattttacaattgtattccatcttaaaatattttatggtaaacttggataaagtatataaataatccaagggtgtaaagtagaaagtgaaagctcccttctcccagttccagccccctgatgttgccaatattaaacgttgtatatccttgcagacacgcatctttgatttttgccctcatgtacattactcatttaaaaattatttcgttgagtagattcctaaaagtaagactgctgtattatatgatctttttaaagtatgttgctaaatttcccctcccttctcaaaaaattccaatttgcacaaatatacatgcatacatgcacacagtacattaaggtggataccaaggataaaacatgttctctgtttctgaaaatagagaaaagaccgggaagaagtttaaagttggctttcagcccaccaatagagataacactatataacaccattaaccatgtggtgcatgtaatttagatatacatataattttatttatttatttatttttcagacagggcccaggctagagtgcagtggcagaatcacggctgactgcagcctcgagctaccgggctcaagctatccccccacctcagcctcccgagtagctgggactacaggtgtgctccaccagacccggctaatttttaaaattatttgtagaggcggggtctcgctatgttgcccaggcttactattttaaagtagatgtaggatacaaataaaaaaaaaaatctccttccacgtaggtaaagcaggaaataccgtgccttgttaataagtaattccctcatgatccttttccccaggaacttgggtgagaaatcataaccttgtcctgatctttctaaacagcaatttagcattttcatctccctggcaacccaaggcgccttggccttggtcttccgagtgattgacagtgaccccacccaataaaatctttttatttgtcgtatctaaccaatctaacccctagcgcagagctagggggcgttcccaccggtgcgcgggcgagctgagccttccttacgtctgctgtgcgtcatcagtccgagccaagggcactattggccagttccgttcaacgaagtggttgctttttttagttccggcaatgagttgcgccggggcggcggcggctccccgcctttggcggctgcgcccgggggcccggcggtccctctcaggtaaaaggaggcgcgcagtcacagtcctgcgccggtctagcgagctagggaattttcgcttgaggtt

SEQ ID NO: 15435 - DNA, 2300 bp, Homo sapien
actgtgttgcccaggctggtcttgaactcctgggctcaagtgatcctctcgcctcagtctcccaaagtgttgggattacaggcgtgagccactgcactcggacatgatgttttgatattcaattgttgcttaacattttgtttccaaattttcccagtaataaataatgggcacatctataaatctttgtcaacattttttctccttagaaacagagacctaggccaggcgtggcggctcacgcctataatcccagcactttgggaggacaaggtgggaggatcacttgaggtcaggaatttgagaccagcctggccaacacagcgaaacccagtctcagctgggcgtggtggtgtgtgtacctgtaatcccatctacttgggaggctgaggcaggagaatcgcttgaacccgggaggcagaggttccagtgagccaaggtctccccactgcaatccagcctgtgcgacagagtgaaactccatttaaaaagaacaaaaacaaaaaacaaaacaaaaaggaaacagagacctagaagtggtattacagcaaaggttttgaacattttaaggcttttgagcgccagattcagacactcagtagttttacatgagagtgctacaacatcctcactaagtagtatttgggttcatcataattttaaattattttggtgtgtcaatttgaacactagagtgatataaaaactaaaaacttgaattcaataattttacaattgtattccatcttaaaatattttatggtaaacttggataaagtatataaataatccaagggtgtaaagtagaaagtgaaagctcccttctcccagttccagccccctgatgttgccaatattaaacgttgtatatccttgcagacacgcatctttgatttttgccctcatgtacattactcatttaaaaattatttcgttgagtagattcctaaaagtaagactgctgtattatatgatctttttaaagtatgttgctaaatttcccctcccttctcaaaaaattccaatttgcacaaatatacatgcatacatgcacacagtacattaaggtggataccaaggataaaacatgttctctgtttctgaaaatagagaaaagaccgggaagaagtttaaagttggctttcagcccaccaatagagataacactatataacaccattaaccatgtggtgcatgtaatttagatatacatataattttatttatttatttatttttcagacagggcccaggctagagtgcagtggcagaatcacggctgactgcagcctcgagctaccgggctcaagctatccccccacctcagcctcccgagtagctgggactacaggtgtgctccaccagacccggctaatttttaaaattatttgtagaggcggggtctcgctatgttgcccaggcttactattttaaagtagatgtaggatacaaataaaaaaaaaaatctccttccacgtaggtaaagcaggaaataccgtgccttgttaataagtaattccctcatgatccttttccccaggaacttgggtgagaaatcataaccttgtcctgatctttctaaacagcaatttagcattttcatctccctggcaacccaaggcgccttggccttggtcttccgagtgattgacagtgaccccacccaataaaatctttttatttgtcgtatctaaccaatctaacccctagcgcagagctagggggcgttcccaccggtgcgcgggcgagctgagccttccttacgtctgctgtgcgtcatcagtccgagccaagggcactattggccagttccgttcaacgaagtggttgctttttttagttccggcaatgagttgcgccggggcggcggcggctccccgcctttggcggctgcgcccgggggcccggcggtccctctcaggtaaaaggaggcgcgcagtcacagtcctgcgccggtctagcgagctagggaattttcgcttgaggtttgggtcgaagaggtcacgggggagaggttcgtaacgtcacaggcctgcgacggagcgcgactgcgtgacttcggcctccggggcgctggcgggcggggcggggtctgtagttagcggcgagagtgacaggaggacaggggttgtttcggcagtgacgcctggggagtgacgcaattgcacccctgtgcagtgatgtcacggcaggtgcggccagcgttccgagtcgaggacagttggcgacactgaaaattcagcgtctccgggagtctctctctttgtagtctttgcccagggccttgccaggcaaagggt

SEQ ID NO: 15436 - DNA, 2300 bp, Homo sapien
gtgaaaccccatctctactaaaaatacaaaaattagccaggcgtggtggcgcatgcctgtaatcccagctactcaggaggctgaggcatgagaatcacttgaacccaggaggtggaggttgcagtgagctgagatcgtgccactgcactccagcctgggcaacagagtgagactctgtctttaaaacaaacaaacaacaaacaaacaaacaaacaaaaacaggaaaggctctcttttcttctgcactgaagacaatgtgagactacagcagccaagggcatatggaggacctgtggggaggacagcccacttaaaaagcagagagctaagaagtgaagggagaacaggtctgcatagcattgaggcacctagattcagctgtacctgaaatcccctcatggatctcagttaacatgatacaataatgtgtgtgtgtgtgtgtgtctatgcgtgcgtgcacttaagccagttggagctgtgtttctgtcacttgcaaacctaagaatcttgactggtagatgatgatctcatagctaatattagtagatgggatctgaaggcagatctgcttagctctcaggggcccaatttaggatttactgggaacaacccagaagccatcttttgagtcctggttcccaggtggcagctgggttctaacatgttttaatatattcacccttgctctctttaaaggtcagtgccagcaaagaaggtgtaatgagtgtgaataaagaaagacaattatttaaatagatcagattatttcaggaagtgctccctgttatgaaacaaaacaagcttcctaggactgaggttccaatgtagacccagacaaaggacccccaaaattcccagcagatgaggaagagaccttccctgggccccctcctgggagttccaccccttggtttctgcccagctctacaaaggctgtgtaaccttgtgggggaggggggaaggggggcagctgaacctgcctgagctgaacctgtttgtgcccctttcctccactgggaaaataattttattttaatttcatttcattttatttattttattttttcagagacaagagtcttgctctgtcactcaggctggagtgcaatgatgctatcatagctcactgcagcctcgaattcctggcctcactcaagcgatcttctcgccgcctcggcttcccaaagtgctgggattacaggggtgaaccagcatgttccgatgaagtctcaggccaaatgtcacccctgtcatcctctggtttccacagggtagccagcaccttctcactccctcgggcacttttgtttattttagagcgttttcttgctgtggaatccttccccccactttttttttttttttttttttttttgagacggagtctcactctgtcacccaggctggagtacagtggcgcgatctcggctcacggcagcctccgcctcccggattcaagcgattctcctgcctgaacctcccgaacagctgggattacaggcgcgtgccactacgcctggctaatttttgtatttttagtagagatggggggcgggggggggggtctcaccatgttggccaggctagtctcgaactactgaccttaaatgatccgcccacttcggcctctcaaagtgctgggattacaggcgtgagacactgcgcccagccccttccttttttgattcccatttttacaaggctgtaagcttcacgaaggacagaaaccttgtccatcttgtcaactatgatttccccagcactgtggctccgacctggcacatggtaggtgctcggtgaatactggtttgaacagacgactgcggcagacggcaagggccactcctgtgccagggcctgccacgccaccgcagcttgtgcggtgggggtggggaggactggacagtctggctgtgcgcccttttctccttttcaacgtcccagtataacttcaagggagcgcaactccagaggctccctggacgaagctaccgccccggaatcagggccttcccaattctgccttcggggagggaggatgggggtgggccgcgggaggccagttccaagagcgtcctgaagtccctcccgccgccccgcgtcgctttaaggcggaggcccgggagggggccgacccggctcgccagctccacgctcggctccagactccggcatttcctccccgctagctggcgcggcctcgcctccccctcggaagaggaaactcccggggtccgagtaacagggtcaggcgcggagaggagcggcgggagagccaggagggccgcccagggtaggag

SEQ ID NO: 15437 - DNA, 2300 bp, Homo sapien
atcagagaattaaaagatcaaaatttgtgtaaagggctgaaaacagtgcctggtacacagacctcaaaaagggttaactttttttttttgagatggtatctcattctgtcacccaggctggagtgcagtggcacgatctcagctcactgcaacctccgcctcccaggttcaagtgattctcctagcctcagcctcctgagtagttgggattacaggcacctgccaccatgcccggctattttttgtatttttagtagagacggagtttcgccatgttggccaggctgatctcgaactcctgacctcaggtgaaaaagggttaactatttttacttatgggaacacctagcaaattcctcgaactccctcaagtgcccccaaggagcacccgttccaataggcatcctcctctgtgaggctcactccccacctggcatgccttgccatcagtgctggagaaagattgtggataaataccacaaagtggttaggagtggccactttgggttcactgctggacttgtgggttcaaatgtcagtgccctgggctaccagctgtcaggccttcatagaggctttacctgtctgggctgcagtccctcataaattggagataatcatagcacctccctcaggaagcagagtgaataaggcaacaaaaacaattactgagtgcctactctggctggacaggtgctacctaataggagtgatcaaggtactgcaggttgaaatgaaataacgcttgtgaagtgttgaggcgtgtatgcctgcagaatcataagcactcaatatgcgttacgtgctatatgctacaaactaaatatatcatactaaaaaatgtataggtctgctagatttttagacaaaaaatatatgcatctgaatatccatcttttgttactcccatattcattttctcatttattcccacaaatcagccctggaggataggcagggtggagattttctcctgtttttactgaggaaaaagaggcactgggaggttaaaattaaaatgctgataagctggtgtccggcaacaggagatgactgggcatattaaaaagaaaaccggcccggcgcagtggctcacgcccctaatcccagcactttgggaggccgaggcaggcagatcacttgaggccaggagttcgagaccagcctggcccacatggtgaaaccctttctctaccaaaaatacaaaaattagtgggcgtggtggcatgtgcctgtagtcccagctactcgggaggctgagacacgagaatcccttgaacctgggaggcggaggtttcagtgagccaagattaccccagtgcactccagcctgggtgacagagtgacaccctgtgtcaaaaataaaataaaataaaataaaataaaataaaataaaataaaataaaataaaataaaataaaataagaaatccagcggagggcaatgttccacctcgaatctctgagtggagagccagaggccttgggctgggaggtttgatggaggcctctgggtccagggcgccccagccacgaggacaggcaggagggcggcggtggacacgccccggggcgcacgctcgctggcggccgcctgcccgtgggcagaggagcgcacgaggccgggcacgacgctgggtggcgctgccgggccgccccgcgctagacctgttgcgtccagggcgcaactccggcaggtttagggtaaaggggcgctccgctctctccgcgcgccccctgcagccctggacgcagcacctccgtttgggacgccctacgcccaccttaacttgaggctcccatccacgcagcctctgcaagcctcaccgcaaccgtgctaggcgcgtcgggtggggcgggaataaagtttttccaacccagtttggggagagggctggatgggaaggaccctccctgctgcagacttcatggcaggctgcactgtgtcccctcggctccacggctgccccgggggcgctgctttcggtaggtgccagcccccgtgccagcaggatgggctgacctgtgtaccgccccctcccacccccttccccattcccatcccctcccccgcctcctgcgcgctccggccccggcgtctccggccccgcctgcgctggggtcgctgcagtccccgcagctgccccgggctgcttgcccaggcgccccggccttattccagcctggggagcgcctcggtggggagcacgggacagcgagggaggccgaggcgggggccctgggcgcccgatatctccgaaccggggaggcggccccgattccgagagccggaacgcaggg

SEQ ID NO: 15438 - DNA, 2300 bp, Homo sapien
caccaaaatttgaattttgtatactttgcacgagtcaagaggcattcatcttttttttttttcaaccttttaaaaactcacaaattattcttagctcaagggctgtagcaaaacaggctgcggggctggttttgatctgcgagccttagtttgccaacctctgtttagaatgcatgggttgtctttcttcctctttctttctggtgtgaattggttctcttccatcggtgtcaaacacgtgagcccaggagacccaatgccagaaagactcagcatgcctgggaatgtcagggcaccctctttcatcttctttgctttctctctgctccttgacactcatcttgcacctgggctttgagaaagttggggaggctgtttttcagcagggccatgaggtgaccttgtctctgttcactttggtttcataaatggcctcttttgaccaccacatgtctaggaaatgcttccctgtattcagaaaatggtcatagattattatgaaaaagtatcactttatcctaacattctaaagcactttttcatgcaagccctatgagggtataatattttgctgttttgtgccctgctgtacctgccgggacaatacccagtgcctactgggttccactaggtcttgacaatcacctaattctcatcacagaaagggtgcattttatttttcagctggaccgcacgcaagtatttgcatagtcagtgtcctgtcccacctcaacagcacgcctttgaggtatagagtagcctttccactaaagaagaggtaaccgaggctcagagaggccccctgtcttgcccaagtcacatgatcagtcgatggtgagactaggactctagtacttcctggctcagcttgttgcgtggcccctcagcacctttgggtcttgttctgtgtatggtttgagttttggctttagagagtttgtgataagtgcctttgactatttcccaagctgttgctattcccttaccacttcgaggatttcaattttttcacaagccacgtaccacctatactatgatgatgatgatgatgatgatgatgatgatgatgattatgattattattttagacagggtctcactctgtcgcccaggctggagtgcagtggtgcgatctcggctcactgcaacctctgcttcccaggttcaagtgattctcctgcctcagcctccccagcagctgggattacaggcgcctgccaccacgcctggctaattttttgtatttttagaaaagagggggtttcaccatgttggccaggctggtctcaaactcctgacctcaggtgatccacccgccttggcctcccaaagtactgtgattataggcatcagccaccacgcccagccctacctatgctattattaacttaattttttttctataaatgggctcatttttatttttactttaaaaaaatcatatgaaaaggaaacattatgtcactaatatcataggaaaccaagatcatgtgacatcgcagaaggcaactagaagaataaacccaatgggaataatgccacattactgaattctaggtggacgtggctgtctccaagcctctggacaagatctactttctttgtttaaaagaaaggggatgggggagggtggaaattggtaagtggtaaaagatgttaacatgtagtggtaccaaattgagactttctcctccttaaaggagaatcggaaaaaagataataactttctccctcttgattcaaagttctgagtttgagtcccacctcagttcacctctgggacatgcccgaggttgggatgcagtacttctaacctatctagcctacttggcccatttggaaaaccaccttaaagagaaggagggagtctgtgccttgagaacccaggagacgaagatggggaggcggggtggggccacaacaggaagggaggacctccttcctcaagaggaccagattagggcttcctttttagttccctctatttgtgggtggtgataggaaacaccccaccatcaccattggagcagaattggaaggtagggcctccgggagggcgggggagccaagtaacatccactgtgtgcctgcctgcatgttagctaatcatgtccttttgggttggctacatggctatttctgtataggaaggtttgctcttctcctgaagtgtggctgcattggatagcatgactatctatccgcccgctctgattcataacagcatacggtgcaaatcaaatcgaaatgctaaagtttcccatttatttggtgttggttaaccaggaggctaccagcag

SEQ ID NO: 15439 - DNA, 2300 bp, Homo sapien
tacaggacttttaagaggtgtctgggttataagagctcttccctcatacatggatcaaagatgttatcacaagagtagctcaggtatggcaggagtgggttcatcccctctttaaaaagctctgtctctctctctctgtgactcatctctcttttaccctctcactatccaccatatgatgactcagcaagaaagccctcaccagatgccaacaccttgatcttggccttccctgtctctagaactgtgaaccaataaattctgttcattataaattaccagtctcaggtgttctagtatagcagcacaaaacagactaagatagacacttttaaattccaagcagcacccaggaacatgacagcaggagcccccaaatttcagcttgcaagatgatagggagtagggagaaaatatccaaactttcttccacatttatatcttttatcaacctttaataatgtccaatgtgggtgtgtgtgttttataacagaaataatatattagtacagtgagtcgtacctgcacatcacttataaacatgtaataaatatatcccatttataaataagtaagtgtgcatgctctgggatatgcaccagtacactagttttgaggcaacagatctacccgaggaggcatcctgtaggttgaagctgagcctgagctgtgctcatattctgagtcagaccttggcagactttcagctccagtgccagcaggcaaggcaagctgtgtgggcacaagttaagttatttctcacaagcacagcagcaggtgttccagaaagacttggaagccaaacagacacattccagtccctgtgagtgccagccacatgaggtgtcagggcacctggcagagcatttctggagaggaataagggagtgcaggggcaggggatgtgggtgatgccaaggaaagccttgcactagatcaatgacaacaatagcaaatgttgctgtcatttattgagcacctactacttgccagcatctatgccaagttttagaaacaaattacttcatttaatccttgtgaggtaggtactctacttatcccccattttacagaggaggcaactgaggttcagagaggcaaagtgacttgtctaaggacacagaaagtgggggagaaagactgtggtttttagaaatattgattctccaaaagagcgatgagatcccaatgaaaacactaggggtttttaaacattgaattctgagcaagccacacagtagagctatgcactagtgatgacacttgcacctctttgtggagcacttattctgtgcaacactctgttgaatcttctacagatgcctcctttaacccccggaggaaccctgagagaccctgagaggtgaagggagaggaaaggaggctgactcacacaggcttcctggtgcttcctcagcggtggatgctgtcaggatcagacccatggggtggagaccttggtgaaccgaagctcaaagagcctggctgaaagagatgctctttctcagctccatgcaattgttgccctgtagaaatgagggctatgtttcgttaggtcttccgattttccaatagaaggcagaaatccggacttatacctagcatctcttggttttataccttaacaaattttttagaatttaaaactctgcagaccaaacaaatgacatccatggcccaggagacctctgcgctcaatgcttacttgcagtaattttaccttccagtacatatctactctgagggaggtgagatgctttgtctcctgtgacaggctggaatgtgagtttcgttaccatcccattttacagagggggaaactgagtctcagagaagtgcacacccaaggccacagcgtgactcagagacaagactgagagctaaattttgtcttggttcagaggcaagcttgggagctaaaatgtctcttggttctttgaggggggctggcctaggctgctttgctttcagctgtcattctgagctgtctccaacagtgtgaagaggagggaggagaaaaggaagaaaagaggaggggactggagtccatccagtctgtcccagctcctgccaggctccatctgaccctaggagagcaatcctggacccaagctccagccaaaaagcctctctcctccactcaggctgggaggttgctttctaggagctcaggatgcaaaggtggacactgtgggctgcagccttcctgaccctccactctgcacaggcctttccacaaacagacatcagtatcagtccaggtaagtgcagggaccagggctgggagcaggtggagagga

SEQ ID NO: 15440 - DNA, 2300 bp, Homo sapien
atgagcagttgttttggctttccttcagcgtcttcaatgcagcagttccaagttttgcgtccagacatggctacaacctaaggagaaagggcagtgctagaaacttgggtcttctccacatacctccctcctttcatcatggagaaaaatatttccaagatgtccccacaaacattgccttaaatctaactggccatgcttggtcatatggccaatgttagctgcaaagggagctgggaaaataaaatttggcttttctgggtcataatgaaggcaatggggtaagggattaggaatggctatgggatagacaaccagtagtatctgccccagtgcctggttgttgtgagaacgaaatgagttcatgcacttaagacactcagcacagtacctggcatgaagtcagtgctcaagaaacattttaatgataggatgaaaataattgtgttcatttctctacctctctgtttatcagtctatctattcatctatccatccatgtattcattcatccacccattcaaccacctatccacctacccattcatccatttgtctatccattcatccatccattcattcatcaatctatccatccatctctacttctttgttgtttttgggagtggactctcaccagggtcctccactgattccttttgttgggtgaattatttgataagctctttgaaatagaggataagaatccccccaaaagacacccatgacttctaaggatggtgggctgttaactgagggacttcgttttgctaagtgggcaatgcaagttgaagcctagagctgagtttcccaggaaaacagagattttggagatggtatgtgaaaaaagactaggagagaaggggatatattataaatgggcagtttaaggagggtctctgagagagaacagaaatgactagtggaaattttcatttatttatgtgatgtatgcaatgcaatgtaaactcctttcattgtctcttcatcatatcttcaatataatccacctcatttgctagtgtttttgagatggatttaaatttttagggatgagtagcagtactgagtccttctttgaactggcataggtcaaatccagagatgcccatgtaggaccggccacatatgggtgacttaatgaaaaatggaggccgaattggatcatatcctctatttactttggtccaggaaggtaaatatggattgctttcaatttttgactccatcctatgaaaagaggccatgaggaatcagctactattattcttaaattcgcagctgggaggagaatgtctttgtatatgacctcgtgaacagctgtgttcccggcatcccagctgacgtctggacaggccttcatgatcacagacaggtgagaaagcagtggccattgggcccccttggaagctccagccaggattctattttgatttaataagcttttcacatcagtgccaggtcacggctatgcacacagcatatagagagaaatcagacaccaagatgtcacagttacagcatgaccaatttgtgaaagacatttaatgatgtcctactaaatgatgggaacagatagcatggtcagagaaaacctgtttggcttgggttctcttaaaaaaaaaaaaaaaaagacactaggccgggtgtggaggctcatgcctgtaatcccagcactttgggaggctgaggctggtggatcacgaggtcaggagttcaagaccagcctggccagcatggtgaaacctcgtctctactaaaaatacaaaaattagctgggcgctgttgtgggctcctgtaatcctagctactcaggaggctgaggcaggagaattgcttgaacccgggaggcagaggttgcagtgagtggagatcatgccactgcactccagcctgggtgacagagcaagactccaacttgaaaaaaaaaaagaagacactaaaacatgattagatgtgcaagagatgttggaggggaaatatttgtgaacaaaaaagaggaaggaggcataagtaggcagggaaggactccagacaacaccaagggtctaagacacgtgaaagaagatcagagaggaaggactgggtagggagagcctcagatcacagcacagtgctgagaaagtcttggctaggccaatggggagtccccaaggaaagatgcccaagactggaatcctgcactgggcagaatcctgcaccagcaccattacccctgacatgctgagtcactggctaggaacagcctggaggaagcattgtctcactgtgaatgcagtggcagctccaaagaggcagag

SEQ ID NO: 15441 - DNA, 2300 bp, Homo sapien
tagaatgttttcaccttgaaaaactgaagttctatgttcattgcacacaaattatctccctcctcctttctctaagccattggcaaccacctttctcctttctgtttctatgattttcattgctttaggtacatccaatgattgaaatcatacagtatttgccctcctgtgcctggcttatttcgcttagcatgatgtccttgaggttcatccacgtggtagtatgtgataggatttccttcttttttaaggctgcacaatactccattgtatgtatgtaaccacattgtctttacccattcatctgctgatggacatttagtttgcttttaatgcttgactattgtgaataatgctgcaataaacatgggtgtgcaaatatcttttgttgttgttgttgttttgttttgttttgtttttgaggcagggtcttcctttgttgcctgggctagagtgcagtggcacgattactgttcactgcagcctccacctcccaggctcaagccatcctcgtacctcagcctcctgagtagttggagctacaggcatgtgccaccatgcctggctaatttttgtatttttttgtggaaactgggtttcaccatgctgcccaggctggtctcaaactcctgggctcaagtgatccacctgcctcaacctcccaaagtgctggaactacaggcctgagctatgatgcctggcccggatgtcattttgagaccttgctttgaatttttttagatatatacctttctgtttttgtttttttgccactatactgttttccacggtggcacccaatttgcattcccaccgacagtgcacaatttctccacatcctcatcaacacttattttttgtttgtttgtttttgttttttgatagtggccagcctagtagatgtgagctggaaatgttgcgggatttttttttttttttttttgagacggagtcttgctctgtcgcccagagctggagagcggtggcgcgatctcggctcactgcaagctccgcctcccgggttcatgcgattctcctgcctcagcctcccgagtagctgggactacaggctcctgccaccatgcccggctaatttttttgtatttttagtagagacggggtttcaccatgttagccaggatggtctcgatctcctgacctcgtgattcgttggcctcggcctcccaaagtgctgggattacaggcttgagccagtgcgcctggcctgttgcgggatttttaaggaatcacagagacctatggggttcaggaggatatttattaattatttaggtgcaccggcccagtcggattaacatccaaaggactgagcactgaacaaagagttaagttaacttttaagcatttcgtaggggtagggagatctgtgcagggggaagcatactacagaagcgagaaacaaaggcagttattcaattgagacatgcattacatcatttcttacttttcaaggaaaaacatgttttgttacttgagtttatctgtctagtgaccttgcagctacacagctagggaatcagggtcttcacaatgcctgggaaaggaggggagagaaggctcactagccacagaaaaataggcagttagttttaaaaggactccagctctttctctttctcagggggaattgagttttcttacatacaactgagtttctgcttatacactctttaatttcttttaattcctgttccaatatctcattatggttttgatttgcatttatctcgtagttactgataatcattagaggacttgcatctctcaggattagatgatgtggctcttggccagagttttggagagcacagccctggcccatgagcctgctgggtcctccgagcgccgccccacccaggcctgcgcggcgtctggtggccatcaggtaaggctgggtcatggaaagaaagaatgaatgcagactacgggcggtgaatagaggtctcggatgccagcaggcgtcccaacccagcaggaactggctcaattctcagaagaaagcgatcggccccgaggcaggaaggccggctccggtgcagggagcgccgcctgcgggctgcttcgggccagggtcgacccgagggccagcgcaagcagcggcaacaggagcgccaggaggtgaggcgggttcgccaggagtggggccagcgcccgggctgccagcctagcaggggcgtcttggcggagccccctcgccggctcccagagaggctgggaagaactgggaggggtgtccccaatgcggggcgcccaagcgtggcagcacgggctgggagcgg

SEQ ID NO: 15442 - DNA, 2300 bp, Homo sapien
tgaatgaatgatataccagcctcttgttacaggaaggggccagagtgaaatgactaagagttctgctttgggttcagagcaatccggatttgaccccagctctactgcttgctggttttgtgacaaattatttcatgaagcatcagttttcttagctataaaatggggttgattttaatatctacttcatagcgtaaatgttgtgctctatttaaagtacttggcctgcagtaatggcaggtatcattactgttaattatcactgttgggagaaggaatacatgggttctagttcaattttgacatttaatgaaagtgtgatgaggaggaacagtgtccgttcagctctctgcacctcaatttctacaactattaaataaacaactaggcctaggtgatttgaaattagatctattggataggaattgtgtttatgtgcctggcactggaacagaaatgtggcttagcaataaaggggtttatttttctcatgtactgagaagtgtgggttaggtgcaatggttcacacctgtaatcccagcactctgggaagccaaggtgggagaattgcttgaaaccaggggttcgagaccagcctggacaacaaagtgagaccctatgtctttaaaaaaaaacaaatagctgggcatggtggtgcccctgtggtcccagatactcaggaggctgaagcaggaggattacttgatcccaggaggtcaaggctgcagtgagttatgatcacactactgcactccagcctgggaaacagagcaagacctcatctctaaaaaaaaaagtttaaaaatttgtacttttttttacatgcggtggctcatgcctgtaatctcagcactttgggaggctgaggcaggcgaatcacttgaggtcaggagttcaaggccagcctggccaacatggtgaaacctcgtctctacaaaaaatacaaaaatttgccaggctactcaggaggctgaggcaggagaattgcctgaacccaggaggcaaaggctgcagtgagccaagatcatgccactgtactccagcctgggcaacagagagagactctgtctctaaataaataaataaataaaaatttttaaaaagcaaaaaaacaagaagcatggagggaggaagtgcaaagtttgtacagcagctccacccatgatgccctcaaggactgaagccccttctgcagcctttttctctaccatccttagcaggtgaacgttcgttctcttcttttcaaaatgtctggaggaagactggtgaagggcaaattgtgaacccaggcaaactgtccccttagaaagagcattcctggaagccacaagtctcattggctaaaactgagtcacaggcccacccttagccgcaaagaacactgggaaactttgagcactatgtctgcacaggaaatggagcttttgctggtgtgagaaagaagaagattagagactgagagccagacaaatagcagagtccactacctaaggcatcaggagataataattgtatcactgtaaacccatgtggatttctacaggcagataaaactacagatataaaatataagttcagccaggtgctgtgtctcacgcctgtaatcccagcactttgggaggccgaggcaggaggatcacgaggtcaggagatcgagaccatcctggctaacgtggtgaaaccccgtctctactaaaaatacaaaaaattagccgggcatggtggcgggcgcctgtaatcccagctacttgggaggctgaggcaggagaatggcgtgaacctgggaggtggaggttacagtgagctgagatcgcgccactgcactccagcctgggtgacatagcgagactccatctcaaaaaaaaaaatatatatatacacacatttagaatatatatatgtatatttagaacatatatatgtatatttagaacatatatatatgtatatatataagttctaggccagaggcactaaattataaaaaaaaatcttgccctttgactatgagtcatttagaaaaatatcttccttctgtttctagaatcccattgtcttaaatgaaagattctgttttcgatttcttgcctagctaccaagacagaattctctgcaggaaaacactccttctcctgagaaaactcctcaggggttagatgcagggagttatgttgtgatttgtgtaggggtggctttggtgagctcatcctggcattttaaaaataatgtgaatggtgtatccctttgtgatcatcatcactttttccctgcgagtcccaatcaatgcgggtgtgactgct

SEQ ID NO: 15443 - DNA, 2300 bp, Homo sapien
aattacaaatggcagaaagtaaatcaggccaagtcaaaatagagattgcaatgggaggaccagaaaggtctgccctccctgactttgctggggaaaaatggagagagggggcatttgagctgggccttgaaagacaattgaccatgacattgggatgggccttcgaggtggaccaaagaaagctaggaaagaaccagaacaaagcagatgtggtgagttcatggaagggtaaggagaccaactgtgactgtgtctttctgaaaacacttccattttgaactctgtatggctgcctctgtcactgaatatgggctccaaagaccttatagcaagatttcttaatatcagtacaagtaacatctgagggctggatctttctctgttgtgggggctgttttgttcattgtagggtgtgtagcagcatctctgatctctatgtacttgatgccaatatcaccccctctccactccttagtttcacaaccagaaaagtttccagacattgccaattgtgtgggggcaaaatccccctaggttgagaatgtgtattagtctgctctcactctgctaataaagacatacttgagactgggtgatttataaaggaaagaggtttaatggactcactgttccacacagcaggggaggcctcacaatcacgacagaggacgaaggaagagcaaaggcacatcttacgtggtggtaggcaagacggcatgtgcaggggaactgccctttataaaaccatcagatcggctgggtgtggtggctcatgcctgtaatcccagcactttgggaggccaaggcaggtggatcacctgaggtcaggagttcaagaccagcctggccaacatggtggaaaccccatctctactaaaaatacaaaacttagctgggcatggtgggcgcctgtaatcccagctactcgggaggctgaggcaggagaatcgcttgaacctgggaggcagaggctgcagtgagccgccatcaggccactgcactccagcctgggtgacagagtgagacgccatctcaaaaaaaaaaaaaaaagaaaaaggaagaaagaaatgaggtctcgttcagttgcccaggctggactgcaatggtgtgatcatagctcactgcagtctcaaacttttgggcccaagtaatccccccaccacagcctctggagtagctgggactatacaggcaggcactaccaacacacccagctattttttgttaatttttttcttaatagagacaaggtcccactattttgctcaggctggtcttgaactcctggcctcagtgatcctcttgcctcagcttccgaagtgttgggattacaggcatgagccaccatgtaactattttttgaatgaatgagttgcaacatttgtatctctcattttctcttgctgttccctacaggaaaatagttgacaaagaaaaaagcaaacagacccatcgtatccttcagctcaattgctgtattcagtgtctgaactccatttcccgggtaagtcagtaaaacaggcacagcaagagggtgaaaacagggagggaggagagtgaggatgaaaggggactcagggggaagatgaaccaaaaatcagagcaatttcattgcccagagccaacggttagtacaggtgtggaaaagcgaggtgggcatggggaagaactaagaggttgctgagttcattggccaacttggccattgtgagtggcaccttcaacagcaaacctgggaaggtcataatagctccaccttagagttgacataacatttgtaaacatgcctagcatggtgcctgcacttaacaatactccagacatggtggctgtttctgttattatggcacctgctcagtcgatatttgttgagtcaacagcaagccacacctgctttgaatcctgattccaggcttatcggagatccaagaacagcctgtcggaaattctgaattccatcagcctgtggcagaagacgctgaagatcattggaggcaagtttggaaccagcgtcctctcctatttcaactttctgagatggcttttgaagttcaacattttctcattcatcctgaacttcagcttcatcataatccctcagtttaccgtggccaaaaagaacaccctccagttcactgggctggagtttttcactggggtggtaagtcctccacttcccctaccccaagtgcaccaatcacctcggaaacccagggacgtgccttgccggtcacccactcacacctctcattttgcctgggggtcaactgatggggaaagtggatgtttgaaatgttttc

SEQ ID NO: 15444 - DNA, 2300 bp, Homo sapien
taggagaacctgtcagagctccgtcaggagaattccaagttgacgttcaatcagctgctgacccgcttctctgcctacatggtagcctgggttgtctctacaggagtggccatagcctgctgtgcagccgtttattacctggctgagtacaacttagaggtaaccaacaccagggtccagggcagagagaaccaggtgaagggatgagatgctggaggggaagggtggtgtgcagcctacggttcaacccaggatctatggccagcagcatcagcactagcagagaacttgttaaaaatgcaggggtgaggcacagtggcttacacctgtaatcccaacactctgggaggccgaggcaggaggatcacctgaaacccaggagttcgagaccagcctgggcaacatggagacttcatcgctaaaaaaattttaaaaattagcctgtcacggtggtgtgcacctgtagttctggctacagtggtggtcattcattggtgactacagtttcacatgaatggagctcagctgtgtcgtttcacagccctggggccaggccttgccttgtttgatctcagttaattcttgcaacatctctatgagtcatgtgatcatctctccattgtacagatggagaaaaggggctcagagaagctaaggatctggccccaggccttgcagcttacgtgtggggagggagccgcattggaacccaggttaccctggctccaaaactaccaccaaaaatgcaagtggtgcttttgaaccatccagaggtagacggaggtagggtgaggccatgcagggaggatatgggaatgtgagatatcagataaattcattggaatccctgactccaaggcccatggaaggatgcctagcagaagtgcagtcccggctccactcccagccaaatgccagagtgctgcctcctcctggaggcccagtgcctctcccagcctcacacaaaagtgcagcacagggccaggcacagtggctcacgcctgtaatcccagcactttgggaggccgaggcaggcagatcacttgagatcaggagtttgagactagcctggccaacatggtgaaaccccgtctctactaaaaatacaaaaattagctgggtatgatggtgcacccctgtaatcccagctactcgggaggctaaggcaggagaatcacttgaacctcggaggcagaggttgcagtgagccgagatcgtgccactgcactccagcctgggcaacagagcgagactccggctcaaaaaaaaaaaaaaaaaaaaaaaaaaaaaaaaaaaaccagcagcacgggctagcagagacacgccaaccccctaattcagaactcagagagaggtgaagcctggtgaaaatgaacaaggccacttatgctaaacaggagggagcacatcctcattgccctgggcatcttggtaaaaaagggaaagccacagaatgattgttcgagctcaggctcctgagtcagacacacctaggctccaatctgccacttccttgctgggtgaccctgggcaagtgtcttcccctccctgagcctcagtttgcttggcacggggtaaggaaattaatggtagcttaacaaaatagttaacctagccgggcgcgatggctcatgcctgtaatcccaacaccttgggaggccgaggtggatggatcacctgaggtcgggagttagagaccagcctggccaacatggggaaaccccatctctactaaaaatacaaaaattagctgggtatgttggtgcgtgcctgtaatcccagctactctggaggctgaggcaggagaaccacttgaaccgaggaagtggaagtttcagtgagctgagatcgcgccactgcagtccagcctgggcaacacggtgagactccatctcaaaaaaattaaaataaataaatagataaatagttaaccgcagaggagctacttctcgggttttctatcatgggagacttttgagtgaagcagaaaggggtacagtgtacaagtcagccctccgttctctcccccatcccctgcagttcctgaagacacacagtaaccctggggcggtgctgttactgcctttcgttgtgtcctgcattaatctggccgtgccatgcatctactccatgttcaggcttgtggagaggtacgagatgccacggcacgaagtctacgttctcctgatccggtaggtgatgtgtcgcgcccaacaccagcctctatttccacagagagaagtgggatggcagctagaaaggattatgctttagtatcaaagttttttctccagagagga

SEQ ID NO: 15445 - DNA, 2300 bp, Homo sapien
ttgagcacctgcagggccctgcaagagggcaccggctcaaagctgaagacgcgcagtagaacgaagaggctgccggtgaggaggcaggcattgaccgggctccgcgtcaccagcagcagcactagcagcaggaaggagaaagggcccaggaggccgccctggtcctcccacagccacatgccggcgcccgcaccggcacggacgggagtcccggacccgccgggctcctggggcagtagaacgagaagcgagggggagggtccaaggcaccggcagcagcaggaaccctctgaggggaccagcgccgcacaatggcggcagcagacacatccagagagggagtcggccgcccagccaatcagggatcgggattcgcagcgccagtgggcggagccgctccatggcaacgggggagggcccaggccccaggccccaggctcacgttccaaatctaaggtgggttagggttttccgaggtctgaacttcaacctgggcgttcagactcctaggcgagaaaaggagggataagaaccatcctaaagctgtaggactggaagggattttagtgactcctttatctgcccttgaggaaactgaattccagggaacctggagaggcaggatgcttagactatcaattcaattcaattcaattcagttcagttcagttcaattcaagatgtgccaaataccggtccaggtgctccggacacagttgaacaggacctacagggtttttgctcttatgggattcacattcttgtgggaggaaataaaagttagcaagtacacctaacgtttacagagcacttaccatgtcccaggtacttgacgagcaaacactttatatgcttatctcattctcaatacagcctaacagttactatcaggagactgatttcaatcgactttattttccagattctgggggactggaagagcctagcaaagaaggcacaatcggattataaaactggaaggggttttaaggattcccttatttcatagatgcggaaactgaggataggtgaattaagcagttaatggcagggtggggactgacataaaggcctccccagtgatttgtgacattttcactcctcctccccctaatcttacttctgctaagggcttttgtaccaggcactgtacaggagttacctcaactgtgcctcacaaccacccttgtgataggcacttttaaaacccccattttacatatgcaaaaacaggcactggaaggagggtaagagagatagaccatgaagccgagttagggagtgaaaaggggcccctggacatattttggagggctggtaacatttttatgtagagaactttgcaaaaatattcagggatttttctgttacctttttttcctttagtgcattttcccactgatttgcaaaaggggatagatgtcttaagccttccagttggcatctaggattcagcctttttttttttttctttcagacagtctcactctatcgcccaggttggaatgcagtggtgcaatcatggctcactgcaacgtcgacctcctgggctcaagcgatcttccgacctcagcctcccgagtagctgggatcacaggctcgcgccaccccacccggctaacgtttaaaatttttgtagagatgccgtctccctttgttgcccaggctgatctcgaactcctgggctcaagcgatccttccgcctcggcttccaaaatgttggaattataggcgtaagccatcacgcccggtgggttcagcaagtttttacctacaagaaaatattttggtgaatgttacatgttttctaacggctgcatagaaaggggttatctttatacagataagaaaaaaatggcaacttcaaggaacacttcagggggcttcagaccctgaggggtgttcctattctactaaataagtaaatttattaataaattctagtctctagcttgcaaggaagactacgtttcccggcgtgcagcgtgctggccgtaagcattacgtcctccatcgcgggcgcgcaatgcacctcggggatggtagtgttctggtggcccaacggttttaacagcccgggaatcaaccaccggaagtgccggccctgagaggtggagtcggggtggcagcggcggcggttgccaggagcccgcgttgcagcctgagatccgtaatatggcggggaggaggaggagaaggcggcggcggaccgagctgcgctctgtcagtaccatttgagccattcgcttcctgacaaggcccgtggcgaggggagaggagctgaaggggccgtgggggat

SEQ ID NO: 15446 - DNA, 2300 bp, Homo sapien
cggcgcctttccagggggctcgaggcccgggagcccagcacagagcccgccctcagcttctcagggcgccaatttcgcctcgccagaccacctctcagcccggacccgtcaaggctcaagccccctcctcatgcacacacctgatcccccacggccccttcagctcctctcccctcgccacgggccttgtcaggaagcgaatggctcaaatggtactgacagagcgcagctcggtccgccgccgccttctcctcctcctccccgccatattacggatctcaggctgcaacgcgggctcctggcaaccgccgccgctgccaccccgactccacctctcagggccggcacttccggtggttgattcccgggctgttaaaaccgttgggccaccagaacactaccatccccgaggtgcattgcgcgcccgcgatggaggacgtaatgcttacggccagcacgctgcacgccgggaaacgtagtcttccttgcaagctagagactagaatttattaataaatttacttatttagtagaataggaacacccctcagggtctgaagccccctgaagtgttccttgaagttgccatttttttcttatctgtataaagataacccctttctatgcagccgttagaaaacatgtaacattcaccaaaatattttcttgtaggtaaaaacttgctgaacccaccgggcgtgatggcttacgcctataattccaacattttggaagccgaggcggaaggatcgcttgagcccaggagttcgagatcagcctgggcaacaaagggagacggcatctctacaaaaattttaaacgttagccgggtggggtggcgcgagcctgtgatcccagctactcgggaggctgaggtcggaagatcgcttgagcccaggaggtcgacgttgcagtgagccatgattgcaccactgcattccaacctgggcgatagagtgagactgtctgaaagaaaaaaaaaaaaaggctgaatcctagatgccaactggaaggcttaagacatctatccccttttgcaaatcagtgggaaaatgcactaaaggaaaaaaaggtaacagaaaaatccctgaatatttttgcaaagttctctacataaaaatgttaccagccctccaaaatatgtccaggggccccttttcactccctaactcggcttcatggtctatctctcttaccctccttccagtgcctgtttttgcatatgtaaaatgggggttttaaaagtgcctatcacaagggtggttgtgaggcacagttgaggtaactcctgtacagtgcctggtacaaaagcccttagcagaagtaagattagggggaggaggagtgaaaatgtcacaaatcactggggaggcctttatgtcagtccccaccctgccattaactgcttaattcacctatcctcagtttccgcatctatgaaataagggaatccttaaaaccccttccagttttataatccgattgtgccttctttgctaggctcttccagtcccccagaatctggaaaataaagtcgattgaaatcagtctcctgatagtaactgttaggctgtattgagaatgagataagcatataaagtgtttgctcgtcaagtacctgggacatggtaagtgctctgtaaacgttaggtgtacttgctaacttttatttcctcccacaagaatgtgaatcccataagagcaaaaaccctgtaggtcctgttcaactgtgtccggagcacctggaccggtatttggcacatcttgaattgaactgaactgaactgaattgaattgaattgaattgatagtctaagcatcctgcctctccaggttccctggaattcagtttcctcaagggcagataaaggagtcactaaaatcccttccagtcctacagctttaggatggttcttatccctccttttctcgcctaggagtctgaacgcccaggttgaagttcagacctcggaaaaccctaacccaccttagatttggaacgtgagcctggggcctggggcctgggccctcccccgttgccatggagcggctccgcccactggcgctgcgaatcccgatccctgattggctgggcggccgactccctctctggatgtgtctgctgccgccattgtgcggcgctggtcccctcagagggttcctgctgctgccggtgccttggaccctccccctcgcttctcgttctactgccccaggagcccggcgggtccgggactcccgtccgtgccggtgcgggcgccggcatgtggctgtgggaggaccagggcggcctcctgggc

SEQ ID NO: 15447 - DNA, 2300 bp, Homo sapien
gtgcatgcctgtagttccagctacttgggaggctgaagcaggagaatcgcctgagcctgggatggggaggctatagtgagccgagattgtgccactgcactgcagcctgggtgacagagcaagactccatctcaaaacaaaacaaaaaagaaaccgatattagccaggcatggtggttcacatctgtagtcctaggtacgctggaggctgaggcaggaggatcacttgaacccaggagttacaggtggcagtgagctataatcgcaccactgcactccagcctgaatgagactttgtctccaaaacaaaaaagaaaaaagaaacagatattgaaaagtattaggccaaaacaaatattgtatataatcattctttacaagttccatgaaagatatatctcattatttaatatgtcccctgggccaggtgcagtggctcacgcctgtaatcccaacactttgggaggccaaggcgggaggatcacctgaggtcaggagtttgagaccagcctggccaacatagtgaaaccccgtctctactaaaagttggacttttcagaaggtaaaactcaggctggaaatgtcttaacttattaagagatagaagcctgctaagggaaggagagggagaaaagagaatgcgaaggttgaagctcacatcaaagctgttaatttgcacaactttaagaatcctcctcttgttactgcctaatcatgcagtgtgagcctaggaaaaggctcctcaccttgacctcttattgagatgttgcatgtgataacatgcatggctgtatgggaagagctccttgctttcccgtggccaccctttaacccttgttcacttccagtgttgggaatagcaggtacgagtggatatactttcctactcatactgagctgaacactggagggcccgttctggagatgatccttttccctgtcataggtcaccatctcatgaacaaccacagaccaccacccccgaatgaaaagtaagagttataaaaacatcgaatgctttctctctaagggaccataatggatatctaagtaagttataaaagtaataattaaaaaaaaaatttttttttgagatggagtttcgctcttgtagcccaggctggagtgcaatggcgcaatctcggctcactgcaacctcatcctcccgggttggagcaattctcctgcctcagcctcccgagtagctgggattacaggcgcccgccaccatacccaactagtttttgtattttttagtagagacggggtttcaccatgttggccaggctggtcccgaactcctgacatcaggtgaaccacccacctcggcctcccgaagttctgggatcataggcctgagccaccgctcccggcctaaaataatttttaaaaacgttctgtggtcgaaatggatatccaccttcctagaaacactgctttgccaagttggacgaaatgcgaaccctaatttccccacgtgcattagctgtagtcaatcatattagatctagggcagccctcggttgctagtcgtgggaagggcattctgcaagtgtctaaaaccgcccgcaaagcagtgggtaaagcagcggcctagagggggcatggctgtcccacgccaaacagcgtattagccgcaaaaccaggtactggctgaacctcagtttgcgtcttcgctccgccgccttctggagtcctttctgcccctagaggacgcaggtgagctaagcagcagtcatgccctttaccatcatgacgcccgcaggcgggaccacccggcactgtagacagctgccctttacaatcatgactcatagaaactacggcactctggccgtggccgacgttgctcctccgaagcatggcgccggcgggagttgtaacccgggctgtccggagcggggagctgcccctcacaagcatggcgtcagctgaaaatgaagcctgtgctgtgcggagcgtcgcctgcccctcacaagcatggcgtctgcagaaggtgctgtgcggccgctgcggggcggccagctgcccttcacaaacatggcggccgaggggtgcggggagtggcggggtaaggatgggaagccgagcagacggccccagaacaagcggtcatgtgactgggaagatggccgtctttccttggtaaggaagcagcggcgggtgggctttggagaggggctgtccttacttgtgatggggtcggcctgggtctgagagtgtgaattcctctctgtcgggttctggtggtcgaccggccacccccaagttgtcttgaccgtagaatccctggccgctacc

SEQ ID NO: 15448 - DNA, 2300 bp, Homo sapien
tcagatttttttttctttttaagagagagagactcattctgttgcccaggctggagtgcagtggtgcgattatagctcactgcagttttgagcccctggattcaagcgatcctcccacctcagcctctagaatagctgggactacaggcacacaccaccacacccagcaaatttatttatttatttatttattttgtagagatggggtttcgccatgttgctcaggctggtttcaaactcctgggctcaagcagtccacccatctgtacctcccaaagtgctgggattacaggcgtgagccaccatgcccagcagagagaatttcgtaaaaggaaaacggatactttattttcaaaggagcaacaataagactactattgcagcacaaagatgagcacagaagacacagggaccgtatctttaaaatgctcaaagaaggctgggagtggtggctcatgcctgtaatcctggcactttgggaggctgaggcaggaggatcacttgagctcaggagtttaagaccagcctgggcaacataggaagatgccaactctcaaaaaaacttaaaaaaaaaaaaaagaaaaggaaaaattctgtttggtttctataaattttactatgaaggctccaagtgtgttttgtttatttgcttttgtacttgtcctacttgggccacagatgtttcttgagtctgtagcttgatgtctttctttggttttggaaaagtttcacctattatctcttcagagactgttcttgcacattctctctctcctcctctttgggattccagttatatgtgtgttaggccttctcttcacgttgcttgtgtctttgaaattctgcctgtcgtcctgttctttttctgctccatgcttcagtctccccctttattttccagctcacaaatcctttctctttttgaaccctcaagaaaccaatgaaaacacagtgagctcttcatctcctttctgcgtggctcctttctcttgccctatgcagctcaatgggcgaataccttgaggggaaatctgggctggatttctgtcttctctgtgctctctcctcttcctcctggctgtcttgatagccctgaactcctgtttatctgtgcagctctgtgaggtttccttagagcctttttagctgctctgctgcctcacagctgccctgtgcttggcgtcagcctcttgtcctgtgctgagaattcacaaatgccctcagcgggaaagctgggcaaggagtgttagagtcaccttagtgagtttccctttgttctggtgtgtggcataacaagtccagtatgctggcagctgtttataccttcaaatatatatatattttttgagacagagtctcactctgtcccccaggctggagtgcagtggcatgatctcagcttactgcaacctccgcctcctggttgaagcgattctcctgcctcagcctcccaagtagctgggattacagacatgtgccaccacgcccggctaattttttgtatttttaatagagatggggattcaccatgttagctaggatgatctcgatctcctgacctcgtgatccgcctgcctcggcctcccaaaagtgctggaattataggcatgagccactgcatccggccaaacagattttttaaaatgttgtgttttgttttttgtttgccatggagtctcgctctgtggcccaggctggagtggagtggtgtgatctcagttcaccgtgacctccacctcccaggttcaagcgattcttctgcgtcagcctcccaagtagctgggattacaggcgtgcgccaccatacccaccgaatttttgtatttttagtaaagatggtattttaccatgttggccaggctggtctcaaactcctgacctcacgtgatccacccacctaggctgcccaaattgctgggattacagatgtgagccactgcgcctggccaaaaagtttgtttttaaatgtagtttctttttaactttggtgggaatattgtgctgttctaaactaccttgtcattgaagaagtctcatcagaagtttttagtgttttaagtacccccatccactaattggctgtgtttcgctgtttaccaggcactccaggaataggaactacaaagctgaatttgcatcatgccgactggaggctgtaccattggagtttggggactatcaccctctgaaacccataactgtaagttttgttaagggtctttctgaatgatattcttatcccttgaaatgaaagacaatcttcctgagtcttttccgttttgccagtggtagccactttt

SEQ ID NO: 15449 - DNA, 2300 bp, Homo sapien
agacaaatctcttttattccacagtaaaggactatctggcttctatttatatatgtatatatttaaagatcaaaatgatattgctgctgaagagattatcttgcctttctttaggacagctccagaaggaaacgtgatagagatgataactccgttgtaggatcggattttgagccttggaccaacaaacggggagaaatccttgcccggtacaccactaccgaaaagctgtctattgtgagtaccaggagaccctctccagagtctactttggagttagtagtaatttctttttgttatgttgcttcaactcctgggctctgtaagtttcacttatttatttatttttctacttctcttaaaagctcacatataaggcttcatgtagtatgtcagtgttgttggcagaaaaatgtgctgacaggtttcccaaaaaaaaatgttaaggatcagggatgtggcacaggccagagaaagaattagaacagcagagtcttgtctttgggaggaggtttgaattatgaagggaggaggtcgggcacggtggctcacgcctgttatcccagcactttgggaggccaaggtgggcagatcacttgaggtcaggagttcgagaccagcctggccaacatagtgaaaccccatctctactaaaaaaattagccaggcgtggtggcgggcacctgtaatcctagctactcaggaggttgaggcatgagaattgcttgaacccgggaagtggaggttacattgcgcagagatcacgccactgcactccagccttggtgacagagtgagaccctatctcaaaaaaaattaattaattaattaatttaaaaaatgaattaagggaggagagcacaacactggaggagaaaggtgtcactcagtaagtcccatatagctgggttttcccctggagctggaaatttactatttctctggatggccattaggtgaagtagttggctttggcctcaagacacttacgaaattcgaggcttacccttcacttggcaaattgctgtggaaggaaagactcaggagagctgagaccaacccagtcaggttaatgcctgtgtgagttaggactgggttcagttgcttagaactaaagcccctgctaacattgtaaacaagagtgacctgtatccctccttacgctggagaaaagtctcgaggagaggagtccagggctggtttggcagctccgagggcatcagggttccgccgcattctttcttgctcctcggctgtgttgagtgttgcctcacattcatgttggtagacagagggaggaaagggaaagaaagatgcgccccctcccatttaggaagacttcttggggtcccgcaacacttttagttacatttgtcttgaaggtgtgatcatgggccacgcatagatgcagggaggctgagaaatgtagcagcgtgtccatctacaaatggggctgtgccctggaggaaacagtgaacttggcaggccatggggaacgcttggcctcaacgcctcttctcttcattttttcctcccagggtgtgtactcattgaacagaatgataggcagaattgctggactatttaaattgagtcttttttttttttaactgtacagagttaacttagagcagtgattctcaaccaggagtaatttttacccctgggtcatcatttggcaatatctagagacatttttgactgtcacagttctgggggtggtactgacatttattgggtggaggccagagatggggctaaacatccaacggtgcacagaattaatctcccacaaaaagttatctggcctcaaatggcagtagtgtagagggtgataaaccctgattcagagtaggttaaaaatagttctattatgtgactccgctgtcatatcaaaaattttagtatttgtctgctgactttgagaaccctgacttgagtagaaatttgaatctccagtggtttttagtgactgtatttttcttctttgaatatatatttctttctcttgggtatgtaaatggctctgttggaaaacaatgaacatactgccttcgatttttaaaatattaatgaattttatgtctctgcagaatctgtttatgggatctgaaaaaggtaagatgagtttgttgttgttttgatgggaaaattctggcattacttttagtataattttacaaaggaaaaaagttttatgtgatatgattctgatgtttgattcagttggagctgctatttcttagattgtggatagacgtagaaataaaatacatatttagagcatgaattaaaaaaat

SEQ ID NO: 15450 - DNA, 2300 bp, Homo sapien
atcacctgtatcattgtattacaccttattccctcccacacctacttgcttcttgatgggtggtgttttatcttgttcatctctgtatccctagcatgtgtgcattcattcagtgagtatgtattgagcacctgctatgtgccaggcactgagcaggacactggaaataaaccaggaaacagggcagacagcaatgaatgagtatagttattcccttgactctccaggtgcgcctggagtgggttatgaatgaacttgacctgtagctcaggcctggctctttgaagctgctaagagagagccagctccagtgtggaccctctgagttccgaagctgaggagggctgcaggatggagaagtttttcctttccctcccatgatcctaacttgctatgaaatattttgggatattttgcttctagattctgggaatgtctagtgcaggaacttggctggggactggagtgagagcagtggtccagctggacactgatgggtattgaggaccccagcccattctcacaggtgcttccacgatatctgtccaagacaagctgggtgccctcagtactgtgcatcattgtgactcattcagtgttggcaatcaacttcaaattttaaaaacagtggaactaggccaggcaaggtggctcatgcgtgtaatcccagcactttgggaggctgaggcgggcggatcacttgaggtcaggagtttgagactagcctggccaacatggagaaaccccgtccctcctaaaaaagaaaaaaaaaattagctgggcatgatcacgggtgcctgttatcccagctactcaggggaggctgaggcaggagaatcacttgaacccaggagacggaggttgcagtgggccgagatcacgccactgcattccagcttgggtgacagagcaagactctgtctcaaaaaaaaaaaaaaaaaaagagaaaaagaaaaagggaattaacagtgtaccaagccctttccatgggttatctcatttactccctccaacacccttttgaggagggaggtgttatattcccccattttccagatggagaaattgaggctcagggaggttagctgatttacttaaggtgagagaggcatttaggtttgaacctagggctgtgtggatttaaaatttacgctgtttctgtagtatttctttttttgctttaaaggaatcatgtccattttccctgtcccacaacgctttgaccacccactcaaagaaacatggctcttggcaatgcttagtagaattgaacacaggatggcttggtatgggataacttgtaccatttgttttttcaggaatgatcaccaagacacacaaagtagaccttgggctcccagagaagaaaaagaagaagaaagtggtcaaagaaccagagactcgatactcagttttaaacaatgatgattactttgctgatgtttctcctttaagagctacatccccctctaagagtgtggcccatgggcaggcacctgagatgcctctagtgaagaaaaagaagaagaaaaagaagggtgtcagcaccctttgcgaggagcatgtagaacctgagaccacgctgcctgctagacggacagagaagtcacccagcctcaggaagcaggtgtttggccacttggagttcctcagtggggaaaagaaaaataagaagtcacctctagccatgtcccatgcctctggggtgaaaacctccccagaccctagacagggtgaggaggaaaccagagttggcaagaagctcaaaaaacacaagaaggaaaaaaagggggcccaggaccccacagccttctcggtccaggacccttggttctgtgaggccagggaggccagggatgttggggacacttgctcagtggggaagaaggatgaggaacaggcagccttggggcagaaacggaagcggaagagccccagagaacacaatgggaaggtgaagaagaaaaaaaaaatccaccaggagggagatgccctcccaggccactccaagccctccaggtccatggagagcagccctaggaaaggaagtaaaaagaagccagtcaaagttgaggctccggaatacatccccataagtgatgaccctaaggcctccgcaaagaaaaagatgaagtccaaaaagaaggtagagcagccagtcatcgaggagccagctctgaaaaggaagaaaaagaagaagaggaaagagagtggggtagcaggagacccttggaaggaggtagtttttccttcagaaatggactttgccgtgggagaattaagggtggggtttgggaggg

SEQ ID NO: 15451 - DNA, 2300 bp, Homo sapien
cctgggagggcatctccctcctggtggattttttttttcttcttcaccttcccattgtgttctctggggctcttccgcttccgtttctgccccaaggctgcctgttcctcatccttcttccccactgagcaagtgtccccaacatccctggcctccctggcctcacagaaccaagggtcctggaccgagaaggctgtggggtcctgggccccctttttttccttcttgtgttttttgagcttcttgccaactctggtttcctcctcaccctgtctagggtctggggaggttttcaccccagaggcatgggacatggctagaggtgacttcttatttttcttttccccactgaggaactccaagtggccaaacacctgcttcctgaggctgggtgacttctctgtccgtctagcaggcagcgtggtctcaggttctacatgctcctcgcaaagggtgctgacacccttctttttcttcttctttttcttcactagaggcatctcaggtgcctgcccatgggccacactcttagagggggatgtagctcttaaaggagaaacatcagcaaagtaatcatcattgtttaaaactgagtatcgagtctctggttctttgaccactttcttcttctttttcttctctgggagcccaaggtctactttgtgtgtcttggtgatcattcctgaaaaaacaaatggtacaagttatcccataccaagccatcctgtgttcaattctactaagcattgccaagagccatgtttctttgagtgggtggtcaaagcgttgtgggacagggaaaatggacatgattcctttaaagcaaaaaaagaaatactacagaaacagcgtaaattttaaatccacacagccctaggttcaaacctaaatgcctctctcaccttaagtaaatcagctaacctccctgagcctcaatttctccatctggaaaatgggggaatataacacctccctcctcaaaagggtgttggagggagtaaatgagataacccatggaaagggcttggtacactgttaattccctttttctttttctctttttttttttttttttttgagacagagtcttgctctgtcacccaagctggaatgcagtggcgtgatctcggcccactgcaacctccgtctcctgggttcaagtgattctcctgcctcagcctcccctgagtagctgggataacaggcacccgtgatcatgcccagctaattttttttttcttttttaggagggacggggtttctccatgttggccaggctagtctcaaactcctgacctcaagtgatccgcccgcctcagcctcccaaagtgctgggattacacgcatgagccaccttgcctggcctagttccactgtttttaaaatttgaagttgattgccaacactgaatgagtcacaatgatgcacagtactgagggcacccagcttgtcttggacagatatcgtggaagcacctgtgagaatgggctggggtcctcaatacccatcagtgtccagctggaccactgctctcactccagtccccagccaagttcctgcactagacattcccagaatctagaagcaaaatatcccaaaatatttcatagcaagttaggatcatgggagggaaaggaaaaacttctccatcctgcagccctcctcagcttcggaactcagagggtccacactggagctggctctctcttagcagcttcaaagagccaggcctgagctacaggtcaagttcattcataacccactccaggcgcacctggagagtcaagggaataactatactcattcattgctgtctgccctgtttcctggtttatttccagtgtcctgctcagtgcctggcacatagcaggtgctcaatacatactcactgaatgaatgcacacatgctagggatacagagatgaacaagataaaacaccacccatcaagaagcaagtaggtgtgggagggaataaggtgtaatacaatgatacaggtgataaaagcaaggacagtgctaaggtcagggtggtggaggttgtggaacctgtcctaccagttgtcaggaaaatttctgaagaacaactgcaggatggtggtattaatccctgagacaaaggtactgaaggcaagtggctgaagaacaggcttgattggacagatgacttggagatgttcactggacaggtgaatatatatggatgaggagtttgggtggccgtgctgacacgggcgacataaagttaggaatgtatgggtggtgataagccttgaacagaacaagcctgagacaagacttc

SEQ ID NO: 15452 - DNA, 2300 bp, Homo sapien
tggtggctcatgcctgtaatcccagcactttgggaggatgaggcgggcggatcacctgaggccagtagttggagaccagcctggccaacatagtaaaaccccgtccctactaaaaatacaaaaattagccgggcgtggtggtatgtgcctgtaatcccggctactcgggaggctgaggcgtgaaaattgcttgaacccgggaggtggaggttgcagtgagccgagatgatgccactgcactccagcctgggcaacagagccagaccttgtctcacaaaaaattaggtgcagtaaacgattaccaacaatctagctagtaataaaatagaacaattacaacagtatactgtaataaaagttgcatgcatgtggtctccctctcaagataacttcctgtactgtgctcacctattttgggaccagggttgaccaggggtaacggaaacctgggattaggtggcgagctactgtatttcttgaagtcttgtctcaggcttgttctgttcaaggcttatcaccacccatacattcctaactttatgtcgcccgtgtcagcacggccacccaaactcctcatccatatatattcacctgtccagtgaacatctccaagtcatctgtccaatcaagcctgttcttcagccacttgccttcagtacctttgtctcagggattaataccaccatcctgcagttgttcttcagaaattttcctgacaactggtaggacaggttccacaacctccaccaccctgaccttagcactgtccttgcttttatcacctgtatcattgtattacaccttattccctcccacacctacttgcttcttgatgggtggtgttttatcttgttcatctctgtatccctagcatgtgtgcattcattcagtgagtatgtattgagcacctgctatgtgccaggcactgagcaggacactggaaataaaccaggaaacagggcagacagcaatgaatgagtatagttattcccttgactctccaggtgcgcctggagtgggttatgaatgaacttgacctgtagctcaggcctggctctttgaagctgctaagagagagccagctccagtgtggaccctctgagttccgaagctgaggagggctgcaggatggagaagtttttcctttccctcccatgatcctaacttgctatgaaatattttgggatattttgcttctagattctgggaatgtctagtgcaggaacttggctggggactggagtgagagcagtggtccagctggacactgatgggtattgaggaccccagcccattctcacaggtgcttccacgatatctgtccaagacaagctgggtgccctcagtactgtgcatcattgtgactcattcagtgttggcaatcaacttcaaattttaaaaacagtggaactaggccaggcaaggtggctcatgcgtgtaatcccagcactttgggaggctgaggcgggcggatcacttgaggtcaggagtttgagactagcctggccaacatggagaaaccccgtccctcctaaaaaagaaaaaaaaaattagctgggcatgatcacgggtgcctgttatcccagctactcaggggaggctgaggcaggagaatcacttgaacccaggagacggaggttgcagtgggccgagatcacgccactgcattccagcttgggtgacagagcaagactctgtctcaaaaaaaaaaaaaaaaaaagagaaaaagaaaaagggaattaacagtgtaccaagccctttccatgggttatctcatttactccctccaacacccttttgaggagggaggtgttatattcccccattttccagatggagaaattgaggctcagggaggttagctgatttacttaaggtgagagaggcatttaggtttgaacctagggctgtgtggatttaaaatttacgctgtttctgtagtatttctttttttgctttaaaggaatcatgtccattttccctgtcccacaacgctttgaccacccactcaaagaaacatggctcttggcaatgcttagtagaattgaacacaggatggcttggtatgggataacttgtaccatttgttttttcaggaatgatcaccaagacacacaaagtagaccttgggctcccagagaagaaaaagaagaagaaagtggtcaaagaaccagagactcgatactcagttttaaacaatgatgattactttgctgatgtttctcctttaagagctacatccccctctaagagtgtggcccatgggcaggcacctgagatgcctctagtgaagaaaaaga

SEQ ID NO: 15453 - DNA, 2300 bp, Homo sapien
gtttcctggtttatttccagtgtcctgctcagtgcctggcacatagcaggtgctcaatacatactcactgaatgaatgcacacatgctagggatacagagatgaacaagataaaacaccacccatcaagaagcaagtaggtgtgggagggaataaggtgtaatacaatgatacaggtgataaaagcaaggacagtgctaaggtcagggtggtggaggttgtggaacctgtcctaccagttgtcaggaaaatttctgaagaacaactgcaggatggtggtattaatccctgagacaaaggtactgaaggcaagtggctgaagaacaggcttgattggacagatgacttggagatgttcactggacaggtgaatatatatggatgaggagtttgggtggccgtgctgacacgggcgacataaagttaggaatgtatgggtggtgataagccttgaacagaacaagcctgagacaagacttcaagaaatacagtagctcgccacctaatcccaggtttccgttacccctggtcaaccctggtcccaaaataggtgagcacagtacaggaagttatcttgagagggagaccacatgcatgcaacttttattacagtatactgttgtaattgttctattttattactagctagattgttggtaatcgtttactgcacctaattttttgtgagacaaggtctggctctgttgcccaggctggagtgcagtggcatcatctcggctcactgcaacctccacctcccgggttcaagcaattttcacgcctcagcctcccgagtagccgggattacaggcacataccaccacgcccggctaatttttgtatttttagtagggacggggttttactatgttggccaggctggtctccaactactggcctcaggtgatccgcccgcctcatcctcccaaagtgctgggattacaggcatgagccaccacgcccggccctactgtgcctaatttataaactttctcatagatagtatacacaagaaaaaacagttatatttagggttcggtactgtctgtggtttcaggcatccactgggggtttaggaacgtactgcccgcggataatgggggagggggactattgtattggcatttaaataagtgggcagagataaaggagcttgcaaagaagaaggtgcaaaccttgaaatagtgtagtcaggagagccaagacgacttcagaataggggagcagtcaagagagccaagacgacttcagaataggggagcagtcaagagagccaagacgacttcagaataggggagtggccaagagatctggtaagaacaaagaatccaccgggaggttgcgggtcaactcttaatccccttctctccccatctcttgccatttagaaaagtatagcatcctcctctttagccctgcgaccaaatgcattcactctttcaaggagaaaggaaaagaacgttacagtgcatctcctgcaaacgcaaacgctttctccaaaaccgcttttaaattccagggacagccttgtgaagatctttgtgaatacccgacctcgcaagctccagagactacaataattcacttgccctaggttccaaagccagcaagtggaaaacggagactggaattccgcccacaggactccaaagcctgtgcagcaacaccccactcccccggcaggatcaccagcaggacgcgcgggagccaggaagtaagatccgtacctccaaggctcccatgggcccaagcctccgcatcaacagactgggagggattacgtggggtcccagggccggctctgaggcgggaaaactttctggaggcggcggcctcaggccggagcgggcgcacaccgactggaggggtcggattcagggatgtgggtggaccgcatttccccatcttccccgccgcgcacttcctctggtgcaatctccacaccccgcgccggcccgcctgcaacgcgccctggcactcaccggtgggcgaaatttccccgcctccacgtgagagccagctccgccgtgacccggaagtccacttcgagtcgccggcccaccctctcgggttccggcttcttccgggtcgcggccttccggcgaacgcggttaccgtggaaaccgcggccatggcggcaccgcggcaaatccccagccacatagtgcgcctcaagcccagctgctctacagactcgtcgttcacccggacgccggtgcccaccgtgtctctcgcgtcccgcgagctgcctgtctcgtcgtggcaggtcaccgagccgtcaagcaagaatctgtgggagca

SEQ ID NO: 15454 - DNA, 2300 bp, Homo sapien
tctgagtagattctttggggtagagtgattagctccttggatcatagcaccaagaggtaaggacgtaggggtgaaagtgacaaagagaacatgcaaaatgaaagggatttttctagcacaatgtaaggttggagaaggaatttaagtactggatggggttgaaacagacagctttggagggcatctatcaactgagtctactattctcttccttctctgtattctccacttctttcgagtcatcgcatatactggtacattcattctttttttccattcaataaacatttactgacctgcactatccaatacagcagccactatccaaatgtggctatttaaatttattaaaattaagtctgggctgggcctggtggctcaggcctgtaattgtagcactttgggaggccgaggcaggtagatcacctgaggtcaggagttcaagagcagcctggccaaaatggtgaaaccccttctctacaaaaataaaaaaattagccaggaatgatgacgggtgcctgtaatcccagctactcaggagattgaggtgtgagaatgcttgaacccgggaggcggaggttgcagtgagcccagccagtgccactgcattccagcctgggcgacagagcaacatgccgtctcaaaaaaaaaaaaaaaaaaaaaatttgagtccaacaagaaattcagttactcaattgcactaatcacatttcaaatgctaactaaccacacttttttttttttggggatggagtctcgctctgtcacccaggctggagtgcagtggcgcaaactcggctcactgcaacgccacctccctggttcaagcaattccctttcctcagcctcccaagtagctgagattataggcgcacaccaccacgcccagataattttttttttgtattttcagtagagacggggtttcaccgcgctgtttcaggcagcttaggtagtgatggtggccacacgaatgaaaaatctgagtccttgaccttgaggagcttatggtctagtggaggaaaaagaaaacatcccacccaacattattcattaagaactagcgcttacgtagctccttctgtaaatcgagcagtttgtgtttttttttccccaataatccttttgccctcctaaaatcaggcagtttgctaagcactttttgtgactatctggttccatcttcttaacaccatcgaaataggtgccattattatgcccactttgcagacagggtcataagttaaataatttgcccaacctaagtaacaaatactgagtagagccacaaaggaagatgtgctcaactccgcctggggaggttaaggaaggtttgaagcaagaagggactaaaacccgtttgtccacaccatggttactgaacgtgtgggccaccgactacctacgttaggattacctggggtgctcttttaaaaagtgcagattccctgcatcccaatttgaagctctgtgggcggggcctgggaacctccgtttataacaagatccccaccccggcccccgccccagcaattcctttcggttcactaaccgaggtttaagaaccaatggtccacaccgcatggttctctttattcagctttccctcgccgttcccttgcctttaacctcactacggatcgcgattggagtccgcgctgcgtaacctcgggccagcctctccgagcctcagtttccccatgcgtaaaatgcggagcccgggcccgcggagccgctgcccggcggccccgcccgtcagccgacaggcgcacagtgggcgctccccaaacgcggcccccgtccggccgcccgggtcccgcccctctcggccagcccaggtttcctacccttgcagatctgctcccacagattcttgcttgacggctcggtgacctgccacgacgagacaggcagctcgcgggacgcgagagacacggtgggcaccggcgtccgggtgaacgacgagtctgtagagcagctgggcttgaggcgcactatgtggctggggatttgccgcggtgccgccatggccgcggtttccacggtaaccgcgttcgccggaaggccgcgacccggaagaagccggaacccgagagggtgggccggcgactcgaagtggacttccgggtcacggcggagctggctctcacgtggaggcggggaaatttcgcccaccggtgagtgccagggcgcgttgcaggcgggccggcgcggggtgtggagattgcaccagaggaagtgcgcggcggggaagatggggaaatgcggtccacccacatccctgaatccgacccctccag

SEQ ID NO: 15455 - DNA, 2300 bp, Homo sapien
ggaagtcagcaaagacacaggctctttctatcccctgcttcaccatccttagcatgtggctttgggcctcatggctaaaaggggctgctccacttccagccccacatctgtgttccagcctagaagaagtgaaatgaaacttcaaggaagaaggggcagcagaaatcaggaaagcagaattttctcagaggtccctagaatatgtctggttttatctcatcgggcagaactgtatgacatagctgtcccttgctacatgggagcctgggaaatgtagatctttggctgagttgattgccatttggaagcaatcaagtttctgttaataaggttgaagtggagagtggaccgtgggtggagagctagcagggtcagccacactgctggcggcacctgtgtgcggggtgtctcgtgaaggtggcacttagacccgaaggactgctgctcagaggatttgagtggatttggggtaaagcaatatatacagttactcagagaatcacagtctaaatttaaataacaaaatcctgcaattccaaaagcatgtagtaagcctcgatatgagcactgtcttttattactacctaatgtcagaaaatgtgcttattgaaagaggactaaagaaatgtctttggaattctttgcccaagttactgtttgttgatgttcttataaatctcataaaggattcacgcgtatttcatctaacacaagcaatcaattaacctcccttcctttttcctactcagacatgggcaaagtaagaatatacagttgactcctaaacaatacggatgccaaacccccgtgcagtcaaaaatccacttataactttggccgggcacagtggctcacacctgtaatcccagcactttgggaggccaaggcagggcagactgcttgagcttaggagttcaagaccagcctgggcaacatgatgcaaccccatctctacaaaaaatacaaaaattagccaggcgtggtggtgtgtgcctgtagtcttgggtactggggaggccgaggtggaaggatcacttgagctcgggaggcagaagttgcagtgagctgagatcacgccactgcagtccagcctggatgagagaatgaggccctgtcacaaaaagaaagaaagaaaatcctctaaaacttttgactccctcaaaacttaactactaatagcctactgttgacttaacagtcacacaaattttgtatatgtattatatactcgaaacttaactactaataccctactactaatagcctactgttgacttaccagtaacacaaattttgtatgttttatgtattatatactatagtcttataagtaaggtagcaaaagaaaatttattaacaaaattatagaaagagaaaatatatttactagtcattaaatggaagtggatcatcataaaggtcttcctcctcatcttcaggtttagtaggctgagaaggaggaggaagaggaagaattggtcctgctgtctcagaggtggcagaggtggaaggggaggcaggagaggcaggcacacttggtgttaagtttcttttgttttttttgagacacagtctcaccctattgcccaggctggagtgcagtggtgaggtctcggctcactgcaacctccacctcccaggttcaagcaattctcctgcctcagcctcctgagtagctgggactacaggtgcccaccaccacgcctggctaatttttgtatttttagtagggatggggtttcactgtgttggccagactggtctcgaactcctgacctcaagtgatccacccgcctcggtctcccaaagtgctgggattacaggcgtgagccaccacacccagccagtgttaagctttattgaaaaaagtcatgtataagtagacctgtgcagttcaaatccatagtgtttaagggtcagttgtaatttaattatctcttctctcttcagaggaaaagaaccaaattcattgcctgtgattttctgactgagtggttatacaagtaagttgttcgtgtctgactattcagtgatcctaagaattcagtcgtgttaatttgcaagcagaatagcaacaactgacttgaattcttgcttattgttttcttgtcaatcaaacatatggcatcatgaccagccaaaatccaaagagggcaggggagccattcacagaatttttctccattccatttgtggaggagcggctaaagcaacagtgagtatgacacaaggctttgaataatttattcctaatttaagattgtgttaataatacttttcttccatctaagagaacaaac

SEQ ID NO: 15456 - DNA, 2300 bp, Homo sapien
tctctggcctaaagggtaactgggaggattaaatgaattaaagaatttaaaacacttagaatagctcctggcacacagaaagcactatgtactcagctattattgttattattatcatccatgggtgtttgaactttttggagggaaggaatgcacctgccactcaatgtcctccttcattttcactctgtgctccctgtggtatcatcacccaaagtgaaactgaccatcacagtcagggtcctctgtaaaacaagtgggaaagggaatataaccgtaactgcaatgttaatcagctcatattaaggattttccacatgccagaccctgcgtgaagcactttatatgttagcacgtgttagaccttcacaacaaccccaataggcatgtgcgatgaaaaagatctccattttgcagacgttgaggacatgtggctcacgaaagtgaacttgcccacgttgacaaaaggatctcggcgtcagttccaagagctgccaccaggtgacagtgcccatccactttccaattgcgcagtctggcgggaacacactttgggtcgtcccgcaaacatttaatgagcgcctactgtgcctggaactgttctgggctctgaggatccatgcaaataaaccaggagtggggcgaaaaactgccattatggttcttcctttccattttcccttgaatataataaaaggtatcccagagatgcgtgcccaagggggatgtggcctaaccggaccggaactgggaggctggcagggagggatgggagtatctggaagggccacggtccccaaagatcaggggctgccactattcccagaaggaggtgttctgcatctccccttcctgcagcccccgggagaggggagcaggggtccgtcctatcccttttggtcttatgtggctgggatggttgcggcgacgggggtagagattggggggcgcaccgcggagggagaaaggaaatctcaccctgagaatctggagtgcagggaagggatgctgctcaaaggtctgtttctggctttggcggggggccacctgagactgccagggtttgatggtctgaaggtcacccagggaaccagccccatatggggtgccggagcgcagctcccaggcctggtcgaagcaatgcgacctcggagaggcctgaggactaggacggggtgagggggactcagagacggctgccccggacccctccttcaagcaggtcccacggccgcccagcggacacgcgtccgggctgtgccctgaccgtctgcggagcgcacggccagtggcccgggccgctgagtgtgtgagccctgaagggcagtggacatgtgcgtacgtgggtgatgtgtgcggtaggggtggtggcgatcctgcgtagggacccacgtgaggggtgcaccgactggacgtgtgtgtttcgaggggccaaggaagcgggtgttggtcccagtgtgcgtaaacggacaacgacatctgggagttgggcagtgaggagagagaagagtgtgtccaggaggaacctgcctggaggaggcctagcggtgtgtgtgcgcctaggtgtataccggggcgttggtgacttcgagaggcaccgggcgggatcgatcctctctgcgtcctggacctggtgctggtgtgtttcggggaagttactgcttatgaaccccccttggagcgtggcctgggggcaggaaggcttccgcgctgggacccctgggtcgcgatacctccctcggtaagtgtattggctaggggagtgttcccgcaaatggatctaccctggggagttgcccggctcgtctggactgcttacgggcgcactgacgttgtggggggaatgtccccgaattgggggcacgaggtcgggggaatcgtctctgagatccgggctagaagctacgagcttgggctccgggggtgcatgcagacggcgcctagccccgcgcggaaccgccggcgggaccgggggtggggctcggaggcccgggggcggggccggccgggggcgggggcgggggcggggccgcggccgctgcagcagcgcgggccgggccagggggcgcctcgcgcggcagcgactctggcaggcgctgcagtgaagctggacccgcaggcgggcgtgcgtggagcgggggccgcggccgcgccgcagagatgtgactcgggccgaaggccagctggagcgtcggcgctgcggggccgcgggggtcggtaagtgcgagctgcgccgatgcagtggaggacgctgtggggaccccagaaacttttcccgccgtggatttgggagaattggg

SEQ ID NO: 15457 - DNA, 2300 bp, Homo sapien
tggccagtgcaaaagcccagaagccttatccatcattcccaatgcagagggcatctttgaagagactaggagggctttgtcagatcacatacatttcccccgcccctggctatccccaacttctcatctcagtctagctgcctgcagaccaatccaatctataggtttttgaacaattatttattgagcttctacaatggccagccactgctttattcatcaatgcagcggtgttctcgttttctttgtgtttgcagtagtcatatttaatcgagagaggtcataataaaatttcagtatctaatggggcttgaaatctcagacctggcctcactgggctgggtccatgtgactctaatctgcccttttgtggggccacgtgcctccttgcttaccacagacccagctagatccagtagatgccccccttatgcagactgcctgactctgtatgctttggagatttccactctgccctagagtgtcccccatccctgcctggggtaacctctaacaaagacaagaactggatacatgctctttgctggtcttgagggacaggggtctgctccacgttgggagacctggaagaggctggggaaagcttagccagttccttctctccaggaatggatgtgatataggggtgaggggcgttgggaagcagcgggagtggggggtttgagggcggggggtcttaggcttctcagacccatcacagctctttgcataggcagctgctacagtctgctcctggggatgcctggcctgggtgttcctgcagaatctttaactctctcacactcactgtcttgagccccagacagacactatgtccctctctctctctctctctctctcctctctctcctctctctctctctctctctctttctctcctctctttctcctcaagtctgtggtggccacacccggaaccctccacctgcctgccctgaggagaaaggaccacccacccacacattgcttggatcccacctgccttacaaatgctacccttcacacaaccttcaagcactctcgacaagcccccatgactcccgcgtgcgttttcgtatgtttggagcgccctgtgagtgtggtcttgtgcatggtgatgaggatgcctgcgtgttttcaagggtctgggtgtgggatgggagagcatccgcgtgcctgagtgagcgtgtgagtacaccgcatgcctgggtattgtgtgtctttgtgtgagcgtgggcgagtgcgtgtttgagtgtctgcaacatccttattcctgactgaagggcggcatgcaggaggggcttctcttagccagtctgtatcctcttcaaacgcactccagttaggggacagttcaccggcggccacccccagagtcgccacacacacgcacagggaggcacgcacccctctttccagagccagcaagctcagcttcccttgtcgaggaaaaccgacaacgctttagcatcctcgctgctccaacagccccaccccttcccccgttctttgccctaggtatagaatcctctatccggagatggactggaagcattggagaggggcaagagaggtggctgcgaggagagtggagaaaggcaaactgaggacacgctggaggagtgaggagccgctgcgggagaggcagatcctacccacaccacgcccctccctcggggttggagattggggatagcctgttttccactccggtcttccttcggggctcccaggtctaactgcatcttctcccctgaaagtggagccaagcgaggcggctgggaccccctcctcttccgcatccctcccaccccacacacactccgcttccaggcagccgctgattggctgcggggagcggcgtcccagccccccggctttgaggcgggagtggagcgggtccgaggtgggaggcgcacagacgggctccgggagcccctcccgaggccccgcgcagcgcgccccgcaccctgcgccccgcgccctgcgggagggctgagccaagactccaggcgggcaggtgcggagcgagcagaggggatcacggccaagggtaggagccagtcctgcggggagagaggcgctgctgctccagctgccgctgcctccgccgccgccaccaccgagccggcgaccagagtcgggctggcaggccgggcgcgaagcggcaaggggagcgaggggcgcgctcatggagcacacgcacgcccacctcgcagccaacagctcgctgtcttggtggtcccccggctcggcctgcggcttgggtttcgtgcccgtggtctactacagcctcttgc

SEQ ID NO: 15458 - DNA, 2300 bp, Homo sapien
aagttccacattttagagactatttattctccagttgctctgggagtagagaaggtggcttgtagcaccttttctttttccaggttgaggttttgtagaaggtgttaccaatgccaagaccctcctgctcccttgactccagttgccttggctccttaaggagtcccagagtgacagagaagaagcagtggccattttttctgcaaaagctttggctcttttatgaagtccatgatttctaccatgtcatgaaagccaggtccaagcctggagttaataagtccaagatcctctacagcctcttctcagtctcatgccttccaatctctagggcagcctacatatcaaaagggatttacaggggctactctggtgcttcttttgtccaagaacctttgtctgtcctttgccattccaaaatccatcatcaccaaattagccattccaaaactgctcagcattagaaatccggagttgggtagattctatggaccaataaatggaatttttcgaaacatccacactcccttctttcctttcctatgtgtcctcttagtctaactggccccaagctcagtggccttcagacagaagcagaaatgttccaagatgattagctaggaacacaaggtacaactgaaaatccattgtgcaaacaagtgcctgtttgattttctcttcacttccctttgggtattaagcttcctttcaattcgtgtttggtttctggtaataaatatggcaccagtttcattgattaattatgaagattaaatgtgagaagtcaagaacgcaaagcagtgcccagcatgttcagcattcagcacacagcactattgtttgtaggaagcattcgcacaatgctgagacagctggaagggttgacattgtgaggggagggcccttctttcaccatcctttgcgtaaatggcttatctcacctccactcaacaagcccagtgtatggcctagaactcccatcatacctgtgcaccaattgaggagagacacatgggtgggaaattgcaataaaaagacggcccacagcaggctgcattcccatggctggccagaggaggaacgctttgtgttctcatcggaggtaagtcctgctttaagccccaggaggcttcctcctaatcctgggaaatcttgatccactggacatgctaggattctttgtttctggaaatttttagaacccagcaagtagtttggaccctggccattgtcaagtgctccaggtaccactctatgtccaactcagtcatgcttccagtcatctgcgatgctccaggcctacggacgccaccctcttccttgtcccagatattcccaccagggaactaggtctctattgggatctcatctctaagaatcaccaatcctgggtgcttccctatccctgctgtctcatagcatactcatggtatccctgcccgaaaccgatctctattttccactgaagtcttccagaggttgtaggaagttatccaaagatttggccatttagggaaagtatttcccagaaaagtaaatgccatccaaatgctggcaggcttttttgcagctctttctttctgcctcgccaccgcccccaacccccattgatttatttattcatccttaatcctctactgagtactccttgtgtgccagattctgtactaggagcaaggaacatgaggctcggtttggcatggttccacagtcacagaaatctacatccatagaggacatttcagggggctcttagcagcacccaatgcataaaactaagaaagggcagccattacttttgtgtgcaggtattcacaggtaccatatccctttttctctatccaatctccaaagagcctctacttccacctgagcagggaccatcctgagacctttctaggacattctgcagtactagccagctctaagcttgcctttggtttgcttactgtcaattttatcacccattatctcgctctatctgtccataagtcacacctactttgaaacaatgcagctctttatgaaggaagtcaacggatctgtttctaagaacatagacctatgccctaatcttatcttggtcttttctttcccatagctgcatgggaagtctgcatacagcaaagtgacctgcatgcctcaccttatggaaaggatggtgggctctggcctcctgtggctggccttggtctcctgcattctgacccaggcatctgcagtgcagcgaggtaagtattctgctcacctggcatctcagatgtcaaggaagacctagcaagtgaggatagaagtgcaga

SEQ ID NO: 15459 - DNA, 2300 bp, Homo sapien
ggtggcctacaactgtagtcccagctattcaggaggctgaggtgggaggattatttgagcccaggagatcaaggctgcagtgagcctatgatcacgtgactgcactgtagcctgggcaacagagcaagactcttgctaaaaaaaaaaaattaccttcataaggaatggtggcccgaatttggattggtgaggtggagatggagaagaaaggattattggaaatgggagcagagggagaaaggaaggagcttagaaaggaagaggccaagtttccagcttggatgactgggaggcaagtggcacctttgattaaaatagatcatacaatgaggaggagaagatttaggtgacttgatgagctcagagttgcacttgctgagtttgaggtgtctcaagcatctcagcggcagtgagaggtccagcaatcaataggtagatggaactgaagttcaagggagtagcgaaagctggggatacggattcagaactcaccagcctggagatggtatgtgaaaccatgagataacttgatacctcccagggagagtttatgacgtgaaaagaaaaatgggacctaaccagcattcttagagacaggatcttgtagcaacagagcagaaatctccaggtagaaacaggagaatcaagaaaatatgaacatgcggagtcaaggaaatgcaaggtacccggaacaagcagtaggcaaatccaatcacaaaggagcagaaacaaactacccagtggatttggctataaagttgtagctacatggttcagattggaatggagaagccagaagagggatggaggaactgactttgaaaaggaggaacatcgccttatcagaagttggagggggaaggggtggaggatggagaccagtatttatatgtttacaggggaaggagcaaggtcaggtgttgtggcctaaattgtttttgaagtagggtaccagatatctgctgagaaaggtggtgtgagtgggtgataatagctgcagagaccatttaagaggaatgggaaggttaagagtggccactggggagactgggatgggcacctggccagactgaatggatcagtaggtgatttagtgggcccagttgtcacaagttccacattttagagactatttattctccagttgctctgggagtagagaaggtggcttgtagcaccttttctttttccaggttgaggttttgtagaaggtgttaccaatgccaagaccctcctgctcccttgactccagttgccttggctccttaaggagtcccagagtgacagagaagaagcagtggccattttttctgcaaaagctttggctcttttatgaagtccatgatttctaccatgtcatgaaagccaggtccaagcctggagttaataagtccaagatcctctacagcctcttctcagtctcatgccttccaatctctagggcagcctacatatcaaaagggatttacaggggctactctggtgcttcttttgtccaagaacctttgtctgtcctttgccattccaaaatccatcatcaccaaattagccattccaaaactgctcagcattagaaatccggagttgggtagattctatggaccaataaatggaatttttcgaaacatccacactcccttctttcctttcctatgtgtcctcttagtctaactggccccaagctcagtggccttcagacagaagcagaaatgttccaagatgattagctaggaacacaaggtacaactgaaaatccattgtgcaaacaagtgcctgtttgattttctcttcacttccctttgggtattaagcttcctttcaattcgtgtttggtttctggtaataaatatggcaccagtttcattgattaattatgaagattaaatgtgagaagtcaagaacgcaaagcagtgcccagcatgttcagcattcagcacacagcactattgtttgtaggaagcattcgcacaatgctgagacagctggaagggttgacattgtgaggggagggcccttctttcaccatcctttgcgtaaatggcttatctcacctccactcaacaagcccagtgtatggcctagaactcccatcatacctgtgcaccaattgaggagagacacatgggtgggaaattgcaataaaaagacggcccacagcaggctgcattcccatggctggccagaggaggaacgctttgtgttctcatcggaggtaagtcctgctttaagccccaggaggcttcctcctaatcctgggaaatcttgatccactggacatgctaggattctttgtttctgga

SEQ ID NO: 15460 - DNA, 2300 bp, Homo sapien
ttgatctctagtaattattgagccctgggaggggcagtccctccatgatcagtaaggccccaaaatgtacaagcaccaaatacagaaactagaaagcatggtgattacacttatgaatagattccaacccaaactccccattttcctgcccaagtctttgtcaagaaaactccagaagccacctggggtcactgtctttaatcctttgaagacacccataataaggtttagacaaggcctcatgaaaaaggtataggataaaaacgactagttcagaaaaaaaaaagtaaataaatgaagagataacttcccttttcatcaaagaattgcaaaaatgaacaataatgagatcgtttccacttatccttttggcaaagatgaaagcaagttaccaatgctcagaactggtgagtagtgttggtgggattgtaaaccaatttataataattctctggggtgctgtttgggaagaggagtcaatattcctacagctgtgctacctctttgacccagaatttccactccttggacataatcctgaggagatgacaacaccagtgccagtggttaccctaccactgagtgggacaggatggagaaatgtcctgaaaagagcaattcacaatagcaaagacttggaaccaactcaaatgtccatcaatgatagactggattaagaaaatgtggcacatatacaccgtggaatactatgcagccataaaaaatatgagttcatgtcctttgtagggacatggatgaagatggaaaccatcattctcagcaaactatcgcaaggacaaaaaaccaaacaccgcatgttctcactcacaggtgggaattgaacaatgagagcacttggacacaggaaggggaacatcacacccaggggcctattgtgggatgcggggagcggggagggatagcattaggagttatacctaatgtaaatgacaagttaatgggtgcagcacatcaacatggcacatgtatacatatgtaacaaacctgcacgttgtgcacttgtaccctaaaacttaaagtataaaaaaaaaaaagatcaatgcagtgatcatggtgatattttcctgctcagcccaagttcacacatattttatttttctcaacatgatgacagccactctcacactgacttttggaatgtcatgtatgttgaactgggtctgaagacatggttttaactcaggctctgtcattttctacctcagtgattgcacaacagcaaagcagaattttcactacttccatgaatataatcattactatatgactttacttgcatcatctcctttggttactattactactgtgggagatgggtattctcattttatagacaaggaaattgacctctggacctcaggaaggttaagaaatgagcccactgccacacaataaacaccagataaaggaggcagactgactccaaagtcagtctatttaagtgcaaatttatttcgcctccaaagggacctcccagtcatcagacctgattctttgttgtacagagtgggtcaggtccagtgatgtctgaactaccttctggttctgactttcagccattctcagctcctctcttgcttgtgtctggattctaaggctgatctcatgagaatgggtgtttcagaagggtgccctctccaagacaggtgcacctcccatctggggcagtgaatatcccttttgtccttatgcagcctggcttcagatactggcttctgcctggctccttgatcccaccctgcccttgtcagtgaccaagaagaagcccagcaccttggcactgctttcccagttaatttctaactatggaatctcttgctgttagaaggtgcgaaacagtgaccttgtatttccgggcacaggtgtgaccccccaatgtcaatcatttggggtctctagctattaggaaaaagaacaacaacaacctcacagcttggacaaggcaaacattatgccaggaggaaaaaatattccacccccaagaaaacaatatcaaaaaacagaactagagactaattggaggagagattgccagcctggggcaaatgtgtatatataagtatgaggcacatcatgaccagactaactctacctttctggcttcaggtaaggctatctgtagctgtcttctcctagcccagcttctccccatcctatttgagggaggtaggagaggaaattaagaccttggacactggggtcagacctggatttgagtcattattctgccaattattggcttcatgatctttagtaagttagttttcctctctttgatc

SEQ ID NO: 15461 - DNA, 2300 bp, Homo sapien
tacaaaacgaacacacttgtgtgactacaacccaaatcgagaactagaacatcaccagatcctcagcagtccctgttgtgcccactcccagcctctactcccctcaatccaaaagtaaccaccactctaactacttcttcttctccttcttctccttcttgttcttcttctgcttcctcttcctcttcttctccttcttcttctttttattttaccttaagttctgggatacatgtgtagaacatgcaggtctgttacataggtatacatgtgccacggtgctttgctgtacctatcaacccatcacctaggctttaagccccgcgtgcattaggtatttgtcctaatgctctcccttccctcgccctccactcccagacaggccccaatgtgtgatgttcccctccctgtgtccatgtgttctcattgttcaactcccacttatgagtgagtgtgtttggttttctgttcctgtgttagtttgctgagaatgatgacttccagcttcatccatgtccccgcaaaggacacgatctcattcctttttatggctttgtagtattccattgccaccttaacttgtaacagattacattagtctgcctgttcctgaacttcatataaatgttcttggctctggtttcattatgtttgtgagattcagccacagtttttcatgtacttgaagattcatttccactgctgtgaatatcccacaacttatttgtccattctctgctaatgggcatttagttgctctcattttagggcattttttttttttgagacagtttatccttctgtcacccaggctagagtgcagtggtgtagtcgtggcttactgcagcctcgatctcccaggctcaagccatcctcccacctcagccccctgagtagctgggactacaggcatgtaccaccacacctggctaatttttattttttgagacagagtcttgctctgttgcccaggctggagtgtaagggctcaatcttggctcaccgtacctctgcctcccgggttccagtgattctcctggctcagcctcccgaatagctgggactacaggcacgtgccaccacaccccactaattttttagtatcagtagagacagggtttcaccatgttggccaggctggtctcgaactccaggtgatcctcccgcctcagcctcccaaagtgctgggattacaggcatgagccaccacgcccagcccacacctggctaatttttaagcaatttttagtagagacgaggttttgctatgttgcccaggccagtctcgaactcctgggctcaagcaattctcccaccttagcctcccaaaatgctgggattccaggcatgagtcaccatgcccggctggggctattctgaatgaattcttgtgcatgtctctggggcacactgtatgcacttctgttgggtgtatagccagcaggagaatttctggtcatagcagatgccatgttcaactttagtagatatagttaaggtcatgttaaaagccacaatgagtcaaacctatggaaattcatgtgaagctgatatggtggcttcaagagaagagagaaggaggaggcatcatgccaccctcagaccttggtaccccacatctgctgtaattccctcctctgagatatcagcctcaacactgagtttctgtacagtgtttccagccatctttaggtaaaaataagtcacacttggaaacaaatggtttctcttatatgcttttgtctggcaaaagtatattgtaagtgatccaaaaggaattgatttacaaaatctgaaaatatccaaaaacaaaacctgccaaatgaatttaaatttcaggtcatcagaaccattgctctgatgtcactttgtgccaccctctgccctttccacactccaacgttacagttatcttccagaacactggcttcagccttggcttgtccctcctgatgggctgccctttcctcagctcttcaagggcagtgccttcttctgcctgttcaattctcagttggttcttcttttcttttagccaatcactctctgtcttatgacctgttctattttcttttcttttattttctttttctttttttcttttttttgagatggagtctcactctgttgcccaggctggagtgcggtggtgtgatctcagttcactgcaacctctgcctcctgggttcaagcaattctctgtctcagcctccggagtagctgagattacaggtgcccgccaccacacccagctaattttttgtatttttagtagagatggggtttcaccatcttggcca

SEQ ID NO: 15462 - DNA, 2300 bp, Homo sapien
tttataaaaagaagctttaagccgggcacagtggctcacgcctgtaatcccagcactttgggaggccgaggtaggtggatcacctgaggtcaggcgtttgagaccagtttggccaaaatggtgaaacctcgtctctactaaaaatacaaaaattagccggccgtggtggtgcatgcctgtaatcccagttactcaggaggctgaggcaggagaattacttgaactcaggaggcggaggttgcagtgagccaagattgcaccactgcaccccagcctgggcaagagagcaagactctgtcaaaaaaaaaaaaagcagcagcagctttatcagtaaatgagtatcatcataaaagtgcctatgttatgtcaagaaacaactgtgtgcaagagtgaaggaaaatgaatgaaggacatttgggataataacccaagtgttttagtttgtgactaacagttgacaagtgtgaaagatgtcaaaataatatatgccagactagattgttgatttaggcctgggagaaaaaagagtcaaacacatcccaggaattatttgcaaacacaacatccagaaaaggaataattgccaagaaaagttgaaagggacatgatgagttcaaattaagacattcagatattcagtgagtgtggttcaaccaaaaagagcttttctaataggcagatggaaaacggtcttaatagtaaatgtaatcaattgatcaaatcctggagagtaaatgagagagtaacttataaaggggtgtatttgaagtcatgcatttaaacaagccaacaaaagtatggaagttaagtatggaaagagaagagtggggccgcatgccgtggctcacgcctgtaatcccagcactttgggaggccgaggcaggcagatcatttgaggtcaggagtttgagaccgacctggccaatgtggtgaaaccccgtctctactaaaaatacaaaaattagccagacgtggtggtgcatgcctgtagtcccagctactcaggaggctgaggcaggagaaccgcttgaaccctggaggtgaaggctacagtgagtggagatcgcgccactacactgtctcaaagaaaaagaaaagaaagagaagagcaaagcgctaggactaaaacccacagatgttaaaatttagtgaaatgaatgttagtcatctccatcagtatttaataacagttgggcagcagatagccaaaggctgcaaactctgacagtaataacgatgctaataatatcaacagccttttctttattcattcaacaaatatttactgagcacctatcaccaggtaagcaaagtaaattatgtggagtttagaagaaaattaatgctatgaaggaaaataaagcctggaaggaggatgaggaacgcctgagagggggatggggcacttacaaatttaaacaaagtggccaggaaaggcccaactgtggaagtgacatttgggcaaagactggaacgagctaaggggtgaaccctgagtccacctgggtgaagagcctccctaacaggggaaaccacaagtgtagaggcccagacattgtattggaggactggcagggacaccagtgtggctggagcagggtgagtggagatctttctcccctaggagatgaggccagggtggtgatgcgtgaggggctcctgccttctaggtactgagctgctcgttttgcataaatcctcttattttatcccatccccctctcaggcgttcctcatcatccttccaggttttatttttcttcatatcattaattatcttctaaattccacataatttactttgcttacaacacccccatgagttagatgccatgtaacaggcatggaaactgaacctcagaaagagtaagtgacattctcaaggccatacagctgttcaagacagagctgggattcaaattccaatctataggcactgagttcagagccctcctgggccatacccagcaccccacactgagttttgtttctagcccctcaagcaaactcagcaagggctgccaggcagggccccctcttactcaacaatggcccattcttctacagggtcacccctggtcctctagaaccccagaactcagaactttgctgctgaggctgctgtggcctctgtgtgcccaggaagggacttcatttctgcctgtggattctttagaatgcccagtcgtctgcgggtcctgccctgatcacaaggagaagccaggagcctcctcttcaggctacaaccttccttcttaagggccacagagtttgtggccccacccccagcacagccccac

SEQ ID NO: 15463 - DNA, 2300 bp, Homo sapien
ggcagttaatggctcagcatcctctctataggacacccataaccctgtcatttgcaacaacatggatggaactggaagtcattacattaagggaagtaagccaggcatagaaagcaaacattgcacattctcgcttacctgtgggagctaaacaggaaaacaaatgaactcatggagacagtagaaggacggttaccagaggctggaaagtgttgcagggagttggaggagaagtggggatggttaatgggtacaaaaaagtagtaagagtgaatgaataaggcctagtatttcctagcacaataggatgactatcttcaaaaataatgtaaccatacacctaaaataactacaatagtataaatggattgtttgtaacacaaaggataaatgtttgaggtgatggacaccccatttaccctgatgtgattctaacgcattgcatgcctgtatcaaaatatctcatgtaacccataaatgtatatacctactatgtacccacaaaaattaaaaataatttaaaaagaacttcagagaacaaacaacaaaaagaccggtatggctggagcagactgagacaggaggtttgaggcgaaaggctcacaggaattcctgtggggccctgtaggcaattgccaggactttttttttttttttgagacggagtctcactctgtctcccaggctggagtgcagtggcacgatctcggctcactgcaacctgtgcctcccaggttcatgccattctcctgcctcagcctccagagtagctgggactacaggcgcccaccagagtagctgggactacaggcgccaccacgcctgactaatttttgtatttttagtagagacagggtttcgccgtgttagtcaggatggtctcaatcttcagacctcgtgatccgcccgccttggcctcccaaagtgttgggattacaggcgtgagccatcccacccggcaatcgtcaggactttggcttggactgtgagtgagatagggagttgcaggaagctttttcgaaaaaccacctttgggccaggtgcagtggctcccacctataatcccagcactttgggaggccaaagcaggcagatcacttaaggtcaggaatttgagaccaacctggccaacatgttgaaaccccatctctaccaaaaaaatacaaaaattagccaggcatggtggtgcatgcctatattccccgctactcgggaggttgaggtgggaggatcgcttgaacccgggaggtggaggttgcagtgagccaagattgcgccactgcactccagcctgggcgacagagcaagagcctgtctccaaaaacaaacaaaaaaacccaaaaaacttcttttggcagtgtacaattattattactattttttgtagtaaatttacagagatctgcagtcatgaccacaatccaaatttagaacaattctatgacttcaaagggatgccttagagccgttccctggaaccactcctctgttctctctgtatctactggagggttctaagcagaaaagaaacaaagtctgacttatattattatcactattgcaccttttctgttaaaacatcataatcccagcactttgggaggccgaggcgggcggatcacgaggtcaggagatcgagaccgtcctggctaacacggtgaaaccccgtctctactaaaaaatacaaaaaattagccgggcatggtggtgggcgcctgtagtcccagctactcgggagcctgaggcaggagaatggcgcaaacccgggaggtagagcttggggtgagccaagatcgcgccactgcactccagcctgggccacagagggagactccgtctcaaaacaaacaaacaaacaaaaaaaaaaacccgtcataatcttcctgttgctttttccgattagatggcgacttgaatttttagggaatacatccaccagtttgggcacacccaccaggcacgacagttgaggtctgatcttccagccactgtgagtactgagaaaacttggcagggggccactctcactggctcaatgcaccctgaccactggaagccactgtgtcagctgctgggttctggctctgcccactcttggctgcatttggggctgaagttccctgtgggaggctgttttctgagggagctgagtgtttacagccactcagccctgctctgctcagctgaagcagaaaacagagaccttttgcattactttggttcaagagcaaggtaatttggaaagaaatttttcagacgaaggtatcagctgcctctgaggcctttgctgattaaatcaa

SEQ ID NO: 15464 - DNA, 2300 bp, Homo sapien
ttggctacttttgattacatgctaaagggatagttttacattctattaaaaggagacagtcacaagggtctctatcttcactttgtttagcgcagttttgaataaagaagagtctggttaatgtataacatctcaacacaaaggtcagaaagcaacggtcatgcaccagaatcaggggaagttgtgttacctcagtcagctttcaggccttaagttttcccttttgcatgataaatttggaaggtcctaaatttaaattttttacaatgctgatagaaatatagacagtacaggccatgccaaaaaatctcagatagaaatgagaaactcattggaagctggagcaaaattcacccatgttactctgtagcaaagaacttgggtgcactgtgtccatgccctaaggctttgtggaaggctgaactaagagtgatgacctacggtgtcagatgcaagagatatctaagcagcaaagtgctcaagaagtgatgtggttacttttaacagcttatgttaaattgtgacagcaaaggaatgacctaaagcctgtgtttataattaaaggggaagaagagcattaaaatttggataattatcagcctgcacatagtggtagagaagaaaagagaattttcaggagaggagtccaagaaagtgtcagaacaactctgctaaagcatgaccaaaagggggcctggtgctaataggataataggaagaaggttccaaaggcatttcagaaatctttggggctgctcctcccatcacaggcccagaagactaacaaagacagaatggtattaattctgcaggcacccagaatgtaggggccatagatgcttggtggtaagatcctctacaaagaattccctctagggaaatgcctcatgaagccatgggagtggggccacccccaagacacagaactgtaggatcaccaatttgcaactctagcctgagagagctgaagcatgggctgataccagctataagacaatgttggccatgcatggtggctcatgcctgtaatctttgggaggccatgatgggaggatcacttaagttcaggagttcaagaccagcctggagaacatagtgagaccacgtctctataaaacgttaaaaaattagctgggcataatggcatgtgcctgtaatcccagctgctcaggaggctgaggtgggatggttgcttgagcacgatagattgaggttgcaataagctgtgatcagactactgcactccagcctgggcaataaagtgagacgctatttcaaaataaaataaatatgaagagatataaagagtttttttccctgttgagttttgggcttacttggacagtgttgggttgggttggaacagggaagagaatgggtcagactctgagtgtagcctgcaggtggatctgatggctttttcacatccatgtgagaaagaaaagagtcagggcaatctctaagatttgatgttggaagaactagaggaataggggtgacatttgctgagatggataaaaccatacctggaatgagagtggccagggaaggatgtgatcaacctcttagctttggacaaagtatgtttgagatgcctgttagatatccaggtggagaagtcaggaagatgaggatgcaggagagaaaaccaggttggatacacacgtgtgggggccattggcaagccacatggtatccaagctatgacatttgatgagataatgtacagagtgaacgtggataaagatgaggaggaatcagcaaaagagaaggaaagcaagaggaaaaccaggcaaaagtggtatgctggaaccaagcaaaacaaagaattaaaggagtgttcatcaagcctatgtgagctccatttctctctcttgggttgaagcaataattttctgtcagtcctgggcataaacctgcttcatgccccttggattgaaagtgcaagtccagttgacctcaaatgctctaatgttgtaatgtccataaacttggctaggaggactgctgttaccctttgtaagactccaaagttatccactgtcaatgattagctgagctctctttctgacagtgcagggattctgaagctgtctgcttgagttactgtgctctcttccaaggctgtaggagttctggagctgctggctggagaggagggtggacgaagctctctctagaaagacatcctgagaggacttggcaggtgagcactgtttcaaggaatgggctgatggggtcataatccatgataacctcaccaatcttttagagtcacagctggtgagaagagcaaaaat

SEQ ID NO: 15465 - DNA, 2300 bp, Homo sapien
ttttaagcaaattcttactctgtgtccttctcaaaaggacttgaactggtttttattaagttccaccattaaaaaaatgaaaacagacataaaattataaagcccattgggaaaatttaggttggaggtgtagggtggaaaagactaaggaaattaaggagaaatatagcaaatgagtatgtagttacaagctgagcttctagtaaggcaaagcaataaggaatatgggatcattttcatagcttatatctgtgtatcaagcacacttgaaggaaattattgcatgatactcacatttgtcattttttctagaccttttgcttaaaccattgccatggtttgaatatttgtgccccccaaaactcatgatgaaacttgtaaaccaaaaataaaatcctaaggccccatcccgccagccatctgaatggacttcctccttagccagggttcttttaaaatttaacctgagagactgtttcaggccatgataggaagtgggagtgggacatgcctcattatacctctctggtattaacatcaatacagactttaagtctgattaaaaaaaaaagattacaacctgttctgtctaaagcctagtgccagtacctaaaagcttcctctgcaaataagaacttgggtctccacaattatttatcttaactaaggcattcctttctattgatcccaggtctttagataaactcaaccaattgtcaaccagaaaaatttaaatctacctataagctggaagcccccgcttcaagttgccccacctttctggaccaaaccaatgtattttttaaatgtgtttgattgatgtcttatgtctccctaaaatgtataaaaccaaggtgcaccctgaccaatttgggcacgtgttctcaggacatcctgagggctctgtcatggccatggtcactcatgtttggctcagaataaatctcttcaaatgttttacagagtttggctcctttcatcaacaaactcaatccccagtgtaacagtagtaagcggtggggcatttaagagatgattgggcctcatgagggattaatggattaatgggttatcctgttagtgggttagttttggagagtgggtctgttatataaaaagccagttttgctctacctcgtgagcccctttacaatgtgatgccccgaccctccttgggactctgcggagtccccaacagcaagaaggctctcaccagatgcagcttcttgaccttggactttccagcccctagaactgcaagaaataaatttattttcttcataaattactcagtctccggtactcagttacagcaaaagaaaacagattaagacaatactctattacattctgcataaagaaaagcatgggatggagatggtgttatacgacaggaatacatgctgcaaataatgatcccactacttgctgactaggtgaccttggagcagctacttaaccttgtacatcatgggtttcccctctgtatcatgaggatgatagcacacactccgtgaggttattgtaaaaattaaatgagataacacaggacatggcaagtattcagtactaggtctttttgcagcacttgttttgaaatgtctatagatgtctttagcttttcaaagaacttttatatctaaaatatattccaaaaatattttcaggaaaataaggctggaaacaatctattataaagctggctacagaaagttaaggaacttaaccaagacagctgctgtgctcaggcagctgatcttcccttagttgctggggggtgatctactcctaggggtgtgttaacgagggcaagtcttaaactggcaggaacagacatccaggatttgacaaaaatgtttcaaattagccttagactttttcactacaataatatgtattcatttccctgttatttgtgtcttcagggtgcatgagagttgtggggctcatttaacctgaatcagacatagtaaacaagctagggttttcatccagacctctacaactccatagctcacaattgtaaccactgtgcatagccataagttggcatttgacctggtgaccaatgtctcacctggctcttgtcttccagacactctccagttatccaatcaagagtatgatgggtgcccccattgtttaccggatgttgctacagcaggatctttccaggtgatggggctttgaggattggtaagagagtctggccccatccccctgactccctcacatacattcatgcctatctatctgaatctctcgcacacagagagccccatgaagccatttgcatcatc

SEQ ID NO: 15466 - DNA, 2300 bp, Homo sapien
atgtgatgccccgaccctccttgggactctgcggagtccccaacagcaagaaggctctcaccagatgcagcttcttgaccttggactttccagcccctagaactgcaagaaataaatttattttcttcataaattactcagtctccggtactcagttacagcaaaagaaaacagattaagacaatactctattacattctgcataaagaaaagcatgggatggagatggtgttatacgacaggaatacatgctgcaaataatgatcccactacttgctgactaggtgaccttggagcagctacttaaccttgtacatcatgggtttcccctctgtatcatgaggatgatagcacacactccgtgaggttattgtaaaaattaaatgagataacacaggacatggcaagtattcagtactaggtctttttgcagcacttgttttgaaatgtctatagatgtctttagcttttcaaagaacttttatatctaaaatatattccaaaaatattttcaggaaaataaggctggaaacaatctattataaagctggctacagaaagttaaggaacttaaccaagacagctgctgtgctcaggcagctgatcttcccttagttgctggggggtgatctactcctaggggtgtgttaacgagggcaagtcttaaactggcaggaacagacatccaggatttgacaaaaatgtttcaaattagccttagactttttcactacaataatatgtattcatttccctgttatttgtgtcttcagggtgcatgagagttgtggggctcatttaacctgaatcagacatagtaaacaagctagggttttcatccagacctctacaactccatagctcacaattgtaaccactgtgcatagccataagttggcatttgacctggtgaccaatgtctcacctggctcttgtcttccagacactctccagttatccaatcaagagtatgatgggtgcccccattgtttaccggatgttgctacagcaggatctttccaggtgatggggctttgaggattggtaagagagtctggccccatccccctgactccctcacatacattcatgcctatctatctgaatctctcgcacacagagagccccatgaagccatttgcatcatcaaagcacccagaaacccagtctaggcctgagtggactttggttccagggaggctgagggcaaacatttatttctcttcttcagttacaagttcccccatctacagaactgcgtcactgtaggggagtcccttcttccagaaactctggagaactggagggcccagacaggactggacatccgagaatcctatggccagacagaaacggtacctgttcccaggggaaccatgggctgtgtgcactttttgggcttcaaaattctctttgacaataaaaattgttagccaccatgtatcattcatctattcgagaagtatttattgagcctctatgaagggacaggtactgagtattgaaaattccgcacagaacaaaaaaggcaaagttcctgttttctgggagattacattccagtgagatttggggagagagaaaataaactaagaaatatctagcatggcaggtggtgagaaatgcgatggaaaaagtaaagtagatgacatggggtgagaagttggtaaatcagatatggtagtcagaaaattcctctgtgatggggaaacattttagcagagaccaaagtttatcaaacatgtcaagcactgtacaaagctacttagactgaagtgaggaatgggaagaagaacccaccatgactttactgcacctcctgacatatcttcttggaactcttgaggtctcatgtgcacaatgtggatttatgctattctatactattttacttatcaaaactacatggggaatacttttccccaactcttcttctcctttttccagtgcctcttacttgtgactctcagcacttcttgcctcttcctctccactctcttaccctgcatccttctttggctaatgagtacccttggaagaacttttgcagaaggttgacggcagctctgtggtatgaaagagccaggaagagctctgcaaatatgaataaggacaatggagttgtggcaagcataccctggcaggggcctcccaccattcagaggaggacatgtttaggatatgcttacaaggacactcaggttcccatgatcttaatcactcagcagcctctcttctgaggtgggtggataaacttgccctttccagcacagtgggtggcgggaaaagatgggtcattg

SEQ ID NO: 15467 - DNA, 2300 bp, Homo sapien
aaactttattgataaaaacaggaagtgggctgtattttgcctgcaggccatagtttgctgacctctcctccatttcattgtgttttgaacaaactcttctcaacaaagtcagtcttgacttatagaagaattcttatatcagccactaagaagatactttttccatctcagtatccctattattaaattaaagttaataaagggttaatttttattaattcaagaccatctaacacttaaaccaatggcatggcaactgagccatatcactggaagcctcaatgaggcatcttcaccatccatatctttggatttgggaatataagagatagaggatcctcaacttcaaacattccttttaacaagatcaaatagtgaaattggagagattttatagttttgcttagggtacattgataggaaatgattgatgtggaattcaaaatgaggtatcctaattcttagatgtctaaagacctcagattaacccagattaataaccacagctaatatttttcagtggttactccatgccagtaacttagccttcataatctccttttgtccatgtaatcacccaatgaagttactattatcctccatcttactcagtgggaaaactgagtcttagcaaagccaaggacctggctaaagccagatgattggtagaggaggagctggggtccagagagactgatgtcaaggctcagctggctgactgctgtgccatgttgtgtctgttatgctgttccttctctgtctgagaatatgtcaaagacctttatgcccaattctagccatcctcttattgtcctcatcccagagcactttctgaagcttcttattgcacagggcagctgccctgaagtggctccagcctgaagaacttcccctcaccctacagcagttctgaaaaatgcaacccactgtcgtcacagatcacccaccctggactgatttgtttttcaacagatagagtttgtcttgaacctgcccaagactgtcacagggaaaattcaacgagccaagcttcgagacaaggagtggaagatgtccggaaaagcccgtgcgcagtgagacatctaagagacattcatttggattcccctcttctttctctttcttttccctttgggcccttggccttcctatgattatatgagattctttatggaagaacatgaatataagttttgtcttgccttggttattagcacaaaactttaccatgttagatgttgaaagaagaaagggaaggaatgagagagagtgaaaaggagagggtaacagaaaaaaaggaaagaaaagtaagtcagggaaatattaaaactgcaagggaaagcaattgaaaaagaaataaagtagggaaagaaggagagaggaagcaagggaaggaggaagaaaggaaagaggagatgaaagggggagaaaagatagaagaaaaataattgaagggagaatcagaaaaataaagagcagaaaggaaagaaataaagagagaaagagaaagaagaaagagcaaaagaacacaagaaagaaagagagggagaaagagagggagaaagggagagaaaaaaattgtaaaaataaaaatagtaaaagaaactgataaagaaaagtaatggaagacaggaagaaaagaagagaaggaagtaaagaggaaaacttataaatattcccacagatagacaaagtcaagcataaaactggagcttgagaaggaaatgaaaggccgtggcaccttcttataccctagaagaagacctccatacaggaagacttgtgtgtggggttgggacattagaatcatccacaagtcaccccaaaccttggaactgtcagggtcagaggggaaccaccatttattaagcatttgccatgtgccaggcactaacccagatgcattataaataccacgttgtttcacctgtgtgtggcatctacagaccttagatcatagctgtgagaacaacgtaagcactgccaaagttatcagctacccatatctcatgtttttgatgttatctactcttcctagaatcaaatattaaaataattttaaaaccaagatcctgacaatagtctttgggaaaaacaaagaaaggcagggatgaggtaagtgtacgcttccaaaagcttgtgagttggggaatccatgaagagagactggggaggtggttttgttgaaagaacaaccagcacctcaattcctggggcttctgggacaccagatctatggtccaggagatggagagaggtgagcactatgaggatttcacctacaacccagagatggagga

SEQ ID NO: 15468 - DNA, 2300 bp, Homo sapien
ttggctacttttgattacacgctaaagggatagttttacattctattaaaaggagacagtcacaagggtctctatcttcactttgtttagcgcagttttgaataaagaagagtctggttaatgtataacatctcaacacaaaggtcagaaagcaacggtcatgcaccagaatcaggggaagttgtgttacctcagtcagctttcaggccttaagttttcccttttgcatgataaatttggaaggtcctaaatttaaattttttacaatgctgatagaaatatagacagtacaggccatgccaaaaaatctcagatagaaatgagaaactcattggaagctggagcaaaattcacccatgttactctgtagcaaagaacttgggtgcactgtgtccatgccctaaggctttgtggaaggctgaactaagagtgatgacctacggtgtcagatgcaagagatatctaagcagcaaagtgctcaagaagtgatgtggttacttttaacagcttatgttaaattgtgacagcaaaggaatgacctaaagcctgtgtttataattaaaggggaagaagagcattaaaatttggataattatcagcctgcacatagtggtagagaagaaaagagaattttcaggagaggagtccaagaaagtgtcagaacaactctgctaaagcatgaccaaaagggggcctggtgctaataggataataggaagaaggttccaaaggcatttcagaaatctttggggctgctcctcccatcacaggcccagaagactaacaaagacagaatggtattaattctgcaggcacccagaatgtaggggccatagatgcttggtggtaagatcctctacaaagaattccctctagggaaatgcctcatgaagccatgggagtggggccacccccaagacacagaactgtaggatcaccaatttgcaactctagcctgagagagctgaagcatgggctgataccagctataagacaatgttggccatgcatggtggctcatgcctgtaatctttgggaggccatgatgggaggatcacttaagttcaggagttcaagaccagcctggagaacatagtgagaccacgtctctataaaacgttaaaaaattagctgggcataatggcatgtgcctgtaatcccagctgctcaggaggctgaggtgggatggttgcttgagcacgatagattgaggttgcaataagctgtgatcagactactgcactccagcctgggcaacaaagtgagacactatttcaaaataaaataaatatgaagagatataaagagtttttttccctgttgagttttgggcttacttggacagtgttgggttgggttggaacagggaagagaatgggtcagactctgagtgtagcctgcaggtggatctgatggctttttcacatccatgtgagaaagaaaagagtcagggcagtctctaagatttgatgttggaagaactagaggaataggggtgacatttgctgagatggataaaaccatacctggaatgagagtggccagggaaggatgtgatcaacctcttagctttggacaaagtatgtttgagatgcctgttagatatccaggtggagaagtcaggaagatgaggatgcaggagagaaaaccaggttggatacacacgtgtgggggccattggcaagccacatggtatccaagctatgacatttgatgagataatgtacagagtgaacgtggataaagatgaggaggaatcagcaaaagagaaggaaagcaagaggaaaaccaggcaaaagtggtatgctggaaccaagcaaaacaaagaattaaaggagtgttcatcaagcctatgtgagctccatttctctctcttgggttgaagcaataattttctgtcagtcctgggcataaacctgcttcatgccccttggattgaaagtgcaagtccagttgacctcaaatgctctaatgttgtaatgtccataaacttggctaggaggactgctgttaccctttgtaagactccaaagttatccactgtcaatgattagctgagctctctttccgacagtgcagggattctgaagctgtctgcttgagttactgtgctctcttccaaggctgtaggagttctggagctgctggctggagaggagggtggacgaagctctctccagaaagacatcctgagaggacttggcaggtgagcactgtttcaaggaatgggctgatggggtcataatccatgataacctcaccaatcttttagagtcacagctggtgagaagagcaaaaat

SEQ ID NO: 15469 - DNA, 2300 bp, Homo sapien
agagcaaaactccatctcaaaaaaaaaaaaaaaaaaaaaaaatatatatatatatatatatatataaaaaacatatttatatattatatatcatatattaaatttatatataaaattatatataaatatataaaatatatacttttatgtcatatataatatatacttacatgtcatatataaatataattataggatatataatttatatataagtatatataatatatatcatatagtatatattgtatataatttatatataagtatatatatacatatacatgtatatgtaagtatatgtaagttatatataatatttatgcttatatataaattatgcttatatataaattatgtacaaaatatgtataatatataatatatattatataatatataaaaatataaatatataatatatgtaatatataatatataaatataaatatatataatatataataaatataaatatatataaaacatattacatataaatatataaaaacatttatatattatatctcatatataaaatttatatataaaattatacataaatatataaaatatatacttatatgtcatatattatatacacttacatgtcatatatacatataattatatgatatatatacttatatataaattatacttatatataaatttgcatattatatatatattatatataaaattactgcgatcaatgtacctctgccctagcatgagcttgagatggcagataagatctgtggttccctcagtctctcttgtttctcaggagcttcccctggactgagagggccttgggcctactacaattgtaaatgcaaggcttctatggtgttcaaagcaactgcaaataatcccaacacgagaggaaacactaggtctgctggtcttgctgtgaaatggtatcatactgactttgggaaattcgagggatttttcaagagtactctgttttaattaaattctctgacattagactacagcataagatgtgactttgctgtaatgtttgccttttggggttgaaataaagagctttaaaaactcaagtattactccaagaaaacaaacccagcatggtttgtgtgtataatgtgagacatgactgaaggcttacagaatcagagttttggaggcagaaggggcctttcttatctccagccttccttcactttgcccccaggtgtctctgaaggcacccagtccctgggagatggaaagagtttgctcccaaagctacctataagccatagttggcaattccatttttcttggggtcttaagttttaccttaaaaattcattttaacctttcattcaactacttcatatatttttaatagaaaaataagactttaggtttcccacctacaaggaatatgtaacacaataaccccctgactttacaaatctcctttgcacagtcccaggggtgagtatattttaatgagaggaacatggaaggttgacttgctgaaaaatgtgaaattttacagataaagcaactgagatcaagagagggcaaggaactaggtcagggtcacatagcaaaacagtgacataagtgaggtttctgacaactgacttgatgaccttcctaccactggctgcttgtctctcaccacttgggagtgaatggcattcttctacctgtggaacaggaattaaaagaaattaaagaatgtgtaagcaaaaactcagttgtatgtaagaaaacccagttgccccagaggaagagaaagaggtggagtcctttaaaaattaactgcctgtttctctgtctgtggctagtgagccttatctctccctttcccaggcattgtgaagaccctgtttctctagctgtgcagctgcaaggtcactagacagataaacccaagttgcaaaacatgtttttccttgaaaagtaagaaatgatgtaatgcatgtctcaattgaataactgtctttgtttctcacttctgtaatatgcttccccctgaacagatctctccctcccccctctccacccccaaaatgcttaaaaggtaacctgactctttgttctgggctcagtcctttggatattaatctgactgggttggctggtgcacctaaataatacatatatcctcctcaaccccatcggtctctctgattcctaaatcatccccaaacatttctggtggcccatatggggattggagataacagatttactgtctcctttgcccatgggactagggccctggggctgtggaagacctggcatccaaggcatgccatgggggagtttcaccc

SEQ ID NO: 15470 - DNA, 2300 bp, Homo sapien
tttacaaatctgggggccaccgtttcagggatggctagcctcccactggaaaatttttactatccttcttcaatgtagttgatatttttctgggcaaaacaagccctttcatttggagtgtagcttgggatctacagaaggggaatctctgggaggagaggcatagctaaggcttcttctttagaaggtggggttgtcctgctttgcctctttgtctcatttatttatttatttatttatttatttattttagcctttagtattcttcctttatggtgccccttgcagtgcatctctgccacatcttttaaggcctatacagcatttaagagctgtagaatttcttccttgtactttatttctttactttcagcagttaaaagccttttttttctttgtaaatagcctcatgaacatggaaagtgtcagaagcatatttggaatctgtgtaaatatttgtcttttggtcttttgctagccagagagctcttgtcagagctattagctctgctttctaagcagaagtttctgtaggcaaagactgcacctctactactgagtccaaagtcaccactgcatacccagctcagcagattccctttcgtatgaaactgcttccatcagtaaaatattctatgtctggctccccaaggggcctatctgtcaaatctctctggcttgagaacacttcatctatcacatttacacagcaatgaagggggtctcctggtactgacttgatgaggagcaaggtagccgggtttagggtattcacagtctctaaagttagtttgttagcttattgagccagtagggcagtggcagctattgctttaaaacaaggaggccagtgaagtgccacagaatctaattgcctggataagtatgtcactgggtgatgccatgaccttatggcttgagttagaaccttcatggcctccctttcacttatgggcatacaagaagataagcttagttagttagatctggcagtcctaaagctggggcctgagtcaaggctttttttttttttttaatttctttaaaagtcttctcctggttagcctcctagaggaggggctctttctttccttctctttgtggcttagccataagctagaaatttgggatctaaatgcagcagaaccttgctgcccttaggaactctcttatttgacaccaggtggttggagtaggaagtgcacaaacagattgcttttgtttactactaagccatctttcctcttggcttatataaaggcttaaatactggagacttttagagcagatttgagcttttttctgacactttatgtcctgcctttcacagcaggtgcagggagtcttgggtttctcctgggtgcagtagcccttggctggagggtttttttttataccatggccttgaccattctccttattttatttatttattttttggggcatttattcttctagtgtcatttccttttgcaccgtgcacattaatctctctctagccttggccagctttcaaactcctgtccaaaccagccttttccatgactgtgttcacgcccacgaccatgcctccttgcaaagccagcttctcttcccataagggctgctgctagtaaattagcctttgttaagcctctgatcagctttcttctctgcctcctgaactcagttaatgtacaccttgtaaccactttaataagctgagttgcattcacacctacggagcttctaacttctgcaatttgtgcctgatatctccttgggcctgccttacaaatgctgtgtccaccatgcactgattttcagcagccttagggttaaacagagtgtacaaccaaaatgcctcaaaaagtctttcttaaaactggctggtgcttttatctgcaccctggagcacctctgagattttttatattggttgcctttttcttttaccagcctttagcctttgcagaagggcttcttggcacttttgtaggtgctgaagctggactgcatcatctgggtcctagtgggtgtcctcttgtcctcttaagaggcataagcataacttgggcgtgaccagacctgagacaccctccctgacttttccagcctttcactttaacttcctggagctctaatttctccttctcaggtgagactgggagcctgtatctctttgaacttaattccttaggggcagttagccttggtaaagggaggtagattggaatgtagggaggaggggtctctattccctcctgtggttcttgcaaaactggttttctctttcctgagacttttcttttgtctccgta

SEQ ID NO: 15471 - DNA, 2300 bp, Homo sapien
tgttggcagcatatttcaggatctgaaggggcaatgaggtttaattttatgtgtcaactctgatgcattggtatcagctgtcctgaatgctactctagggaagaactcaatgccacatcccagtccattggaaagtgcagtgacattagcagtgaggactaagatctgaatttttttttttttttttgagacggaattttgctctgttgcccaggcttcagtgcagtggcatgatctcggctcactgcaacctccgactcccaggttcaagtgattctcctgcctcagcctcaccagtagctgggactacaggcaggcacttccatgcctggctaatttttcaaatttttagtagagacagggtttcatcatgttagccaggatggtctcaaactcctgacctcatgatccacctgcctcagcctcccaaagggctgggattataggcatgagccactgtgcctggcctaagctctaattttttatcttgctgaaattcctatctaaggggcttagggagttatgccctacaaaccataaattctcatcagatgggttttatttaaccctgtatatcaagacttactttccaatcagactctggcataacaagaagaaaatcaaaatgttttacccaaaaatatatttccttgccataccttgaaattgccctgcaaagtctcttgtaggaaaaatccacattctataaagaaccccatttcctctttgttttctttccttccttcccagatccaggagacaatcaactaagagccacatacccttttaggtctaagacatattttacaacctgctctctctctgacgtctggtgtctgagagataccggtgcacaataaaacttggtctccacaaagctttaccttaacctgaacattccttgccattaatcccaggtcttcaaataaactcacccaattgtcagccacaaaatgtttaaatttacctatagcctggaagcccccactttaggttttcccacctttctgaaccaagccaacacagttcttaaatgtatttaattaatgtctcatgccttcctaaagtatataaaaccaagccgtaccccaaccaccttggccacatagtctcaggatttcctgagggctgtgtcacgggccaggttcactcatatttggctcagaataaatctcttcaaatattttacagagtttaactctttttgtcaacagcagcatctgctctgaggatgatggtgtatatttttcagtatctttatagtctcaagtgacagaaacccagtctcaggcaaaggagaatcttttggcttacagaatccagagaatattaacaagacaggggcagacatgcagaggaacaatttgaaccagggacttgaatgactgcaggattcttactccacctcatctcattgtttctgtacatcagtttcattctcgcctgtaggggggctgtctccacatgataggaatcataaccacaaacagcacacaaaatgtgcattccaccagagggagacagcctgatatatttaaatctgtttagaaacacacacacacacacacacacacacacacacacacacacacacacacacacacattggagaggtattatgattggcccagcttaggttacaaagtcatgagaaatgactgctcaaccctggaccaatcaactttagtcatgggatgggatcatataaagatatcacagcttccatggcaacaacatgatttggcttggcagaaagggaagtttctaaagtaaagacactataaggtacagaactttccaaaaggcgagttgctctaccacaaaagggatgaccatatggcttccatcctgggctgacatcttagcaggttgaaggagaagacccctaggaacgcgcaccaaacccataatagtagctatataacctccccagcgttttctgccatgtggttcctcagctgggaagataaatccccaccaaaatcaatcaggggtgccttccaaattctggtgacctgaaacaaagctataactgtagcaattaaccaaaaacatgcacccaatttagggagaaagttttggatacacagccaatctattagccatctcttcccaaggcaggtggtgacttgagaactctgtgcctggtttctgaggactgtttcaccatgcagtggctaatgaggttccggaccctctggggcatccacaaatccttccacaacatccaccctgccccttcacagctgcgctgccggtctttatcagaatttggagccccaagatggaatgactatgaa

SEQ ID NO: 15472 - DNA, 2300 bp, Homo sapien
ccataaaatatactaatgctaacaatagcagatgaattttttttaattgcagaaaaacctcagagtgttttaagaaagtttattaatttgtgttgggccggttgaatttcaaagctgtcctgggccacatgttgactgtgggccaacaggttggacaagcttgatttaggccaaacttaaatttagcctaaagctgcctcctcacatattttaacaaaactgagtttttgtttttcaagtttgcctccatatagtactcaaatatgcttgggacttgaaatatatatattttaacttgttatctgtatgctaatatttgatatcctaaggacaggtggcagagtgtgggcaactgaaacccagccagcagaagagagagagatttgggggaaggccaatgccagtgtcatgacactgctcttcacaaacaactgaggacttctagaaatctctgctgtgcagtgtccaccaaagaaattctgaaaattaaatgctgtattgaatacacaggtaaaagcaaacaataagatgataaaatttttggacatagtggtagatctggggttagaacctagggtttattgactgtgaattcggtgtccctttcaaaatatcagattacatcttttagggctttgtaggaactcaaatctgctaagaggtttgtacctgaagagtagtatgagaagcacttgttttttaaacacattcttcaaaagtggcatcttcaatgatttttaaaaagacagtaacatgataagttgccaagactatggataaaaggccgcaacgaaagcagcatgaaacaacaccagccaacatccttggttttaagtgaaatagaaacatagcctggaaaattgaggctgaaatggaatttactggaagccttttgagtaactgttctatgtgggaaatgcgcgaggggaaaaaacaagacaaaatacggccaggcgcggtggctcacgcctgtaatctcagcactttgggaggccgaggcgggtggatcacgaggtcaggagattgagaccatcctgactgacacggtaaaaccccgtctctactaaaaataaaaaatattagccgggcgtggtggcgggcgcctgtagtcccagctactcgggagggaggcaggagaatggggtgaacctgggaggcggagcttgcagtgagcccagatcgcaccactgcactccagcctgggcgacagagcgagactccatctcaaaaaaaaaaaaaaaaaatagacaaacatacaatacctttgggggtaaacaacctttatcccacgtaaatggcaatgcagatataataagcaaatgatatagtaagcaaattgcaatgggaaggggagaagggaaaaaaaaaaaatatatatatatatatatatatttacacgcaccagactatgttggattcatcaccagaccgggaagcaacagcctgggctccagagtcagccacttgtccgtgcacagaggaggaggggtctcaagaagcttccgtgtggcctgggaccctggctcattttttttttttttttgagacagagcctcgctttgttgccaggctggagtgcaatggcacgatctcggcttactgcaaccgccgcttcccgagttcgagtgattcccctgcctcagcctcccgagtagttgggactacaggtgcgcgccaccacgcctggctaattttttgcattttagtagagatgttggtcaggatggtctccatctcctgacctcgtgatctgcctgccttggcctcccaaagtgctgggattacaggcgtgagccaccgtgcccggccgaccctggctctttttgtaatgcgttgattggcatgaggcccagtcacgagggcccttctcgactgggctcaaggaacacataaaggtcaacttgtttctgtgattgtctgtttttcaataactcaagtacaggtacagagttatctgtaacagtgctggatgaatgaatgcctcaaggggctcatgcaacctgttacgggacttgaccattgtgtccacgttcaattgagttcaaatttaatatttaacttttcctccacagtagctggcagaattatagggaaggctggaggaacaggtaccaaggttgggtggaagaagctatatggctggagccagcttcaagggcttgaggagccaccgacaccacttccagaatggctgctatgctgcctctactggattcaggttgcagtcgggaggcggggcaggaggcggggcttgggcgggtatcactccacccctttcacgattgcagaccggccttagg

SEQ ID NO: 15473 - DNA, 2300 bp, Homo sapien
tgtgcacaacttcagtaaagacattgcacatgtggcccctcccaagtgctgacaggccactgcacgtgcagacagcccatgccaaggaaaaaatcaaaggagatacaaaacctcggaagcatgccaatgtataaaacgcaaagtcaaaagtcaaacagggcacctggatctctcaagttgcctgcttgcccctcttcctttggttcctgctctaaaactttctaataaactctcactcctgctcaaaaacttgcctcagtctctcactctgccttatgcctcttggatgaattctttcctttgaagaggcaagaatcaagttattgtagatccgtatggattcaccactgctaacattatgctgaatggtatgtgagagtagaaaaaaaaacactgttttttccctgtctctaataatgagcttaacatcagaatagaaataatagaagaaaaaaatcaaagaactggaagccagaatttactcaacctgaacaaaagaaagaaactagaatgggaaaaaaaagaaaaaaaagaacagagcctcagggacctgtgaaactatcataaaagatctaacatgggggctaaaaatttactccaagaaataatagctgaaaagttctcaaatttgtcaagagacataactatagaattcagcaatacagaaaaagaaatatacaacaggaccaagcaaggtttattccagggaggcaaggctggttcaatattagaagatcagtgtaatctatcttattaacaggctaaagaagaaaaacaccacatgcttatagtaactgatgcagaaaaaacacttgccaaaattcaacacctattcatgataaaaacactcagaaaaaaatagaaatagaggagaatttcctcaacttgataaagggcatctacacaaaacctactactaatattgtacctaaccatgaaagactgaatgttttccctctaagatcaaaagcaaggcaaggatgtctgctctcatcactcttattcaacgtagagctagacactctagcctgcgcaataaggcaagaaaaggaaataaaacgcatatagatctgaaagaaagaagtaagatctgtttacttatttacaggtaatgtgattacacagaaaatcccaaggaatcaacaacaaaagactcctagaactcaaaagtgaccaacaaattcctctttaagtaaagttgggtctctcacatgtaattgaaagagtcctttatttattcacatatccatcaactatttattgaatgcctaaaatttgccagtagctattccaggcaatagatacaccatcaaacaaaaagagttcttaccctcaagggtgatagtaagagatgtaaaaagttaaaaaatggtaaaagagaaaaaatgaagagtgctactttagaaaatgaggtaagggaagagttatttaataagacacctcagaaaatgaggaatttggccagggggatatctgaggaaagagttccagtcagtggaaactgtgaattcagaaagcctgaggctgaaacaggcaagtgtgtttgagaaaaagcaaggaggccggtggctgtgcagagtgaggcagaggaaggagaatgggctgtggatcagaggaccctgtgccagatcatacaactccttgcagttcatgtaaggactcggattttacctggagtggaaaaagaagcactgaaagatttgagcaggggagtaacctgatagcgtttatgtttagtcctgccacttcgacagataaacgcaccaatgggcttgatgagatttaggccaacccataaccgcccctcaacttctttcctttcaatttcaaaactcctctatggcttcctccatctgttcttccttctgagaagtgctctctctgcccctttacagaactaaccacttcggcaactccttggacactttccttcttgttaataatttgctttctccgcccctcaaaagcttgctgtttctgtaaatcattacctgtaagaggaaccgctgggagtcctgtaaactttagcccagagcttggctcctcctccagaatgtctccaccaatcaaggaaagtgttttgggccagtcttgctcctccggattgtcagactgctcctccctcttctttagactgccacgaggaaaaagcagatgtgagaactcaaggttcagggctgctcttctaagaaacaagtctgccataatctccatctgtgttggaatctgttaactagtgagtacctcatctcccctcctgtgtaagatttcctgaactggcacatctgttttttgagcaa

SEQ ID NO: 15474 - DNA, 2300 bp, Homo sapien
actaattcatgacacatgaaaattaaatgaaattctagtgtcagtaccataaataaggttttattagaacacagccatgccaaaatttatttatgtattgtcaatggctgctctctcaatggcagagttaaatacctgcagcagagaccatatggcccacaaagcctcaaatatttagtgtctggcccttcacagaaaaagtttgctgacccctattctagtagagagtaatatgcttggcaccatgataagcattttgcatacagtatcccattcagtcttcaggacaaatctctgatggaggttctattagtcgctccattggtaaaatgtgaaactgaggttcagagtgattaataattcaaataaggtcatgcagttcataagaggcaaaactgggagaccatatcacatgaccatatgactcagtagccagtgtatttaaccatcatgccatagactggtgcttttcacacttgaatgtacataccagtcacctgggatcttgttaaaatgtcaacatctaccaattcagtagatctagagtggggcctgagaatgtgcatttctaacaagcttctaggtgataaagatgatgatggtggttcacaaatcacagcctctaaatcagtgattctcaaccatggctgctgcacattaaaatctgaggacattttaaaaaatataaatgggcccagagcccactctgaaatattctgatttaattgatccaagacctaggcatcagagtatttttttttaatgctttcttggtgattcaaatgtacagctggactgcaaaccactgctctattgaaatcctgtcgaatgacagtaaaaacatttaatccaaagaccagagttctagttctaactctggtatgacagaatgaagcaggctgtttcccctctctgggtctccagttttctttgcaggtgaaaaaggaaaaagctgaaaccagatggtgtcagagggctcaagatcactgacttgtcaggtcttcacacacataaatgggaaggacagaagtacccaggtttcctgatgcatcggttatatcaacatgatgcccaaacaccaggtctgcttagggtaaaactgcaataactgtagatgtcagctaaactgtccatttagctgacatctgcaattatgtattgttttggcaatgtatcaatacagaaatgcttccacatagccagactgccttacatggcacacagctagaattgtagttagaatgatgatttaatgattatgagagtaatatatattgcattgtaggaaatttggaaaattacaggaagtataatgaggagaatctcaaacactcataatccctagaactgtatttttaacagcctcaaccaagtaaatgacattgtgatcaaatgatttcccacagaagcaggcgatggcccagaggggcctccccgacaaaagtcctaaatgttaaagccccattattacatctctattaaatgcagctccaagcctggacttaaaagtagtatgggcccctattgagagcatgggaactgcaacctatcaactagacagttcataaactgtgacagtgctttcatgtctaattgttattgggctactctcgatttcttcatctacagattatccactgtgaaaaatgctccttaacatttctaccctactttgaaatctgcaggtgaaagatattagacaagaagccttagccctttgctttcagtgagattaagtgggtgacccagatctttacttctttagaaatgcatatgggtgtcaatagtgcacagtattctggagaatgggctaggacctgatagttctgggttcaaatccagccaatgcctcttactagtcattttctcaatctgtaaacagagatgataatagtacccacttcacagggtttctctgaggatttaataagaaagtgtctataaaacactgagcactgtgtttggaacacagagtgtacgcagcaaatggtactatcatgatgattatcaatactaataacaaaacttagccactttggggtatggctaccttcaggacagaaacaaatatatgtcctttttgcttgtcttttagatgaactggtctctgtgcaaatcctgagtgctaaagcttccaacaagactgatgctagctcgtgtcaccaggaagatgctacgtcatgccaagtgttttcagcgcctagcaatttttggttctgtgagggcactgcataaagataatagaacagcaacccctcagaatttctccaactatgaatccatgaaacaggacttcaaac

SEQ ID NO: 15475 - DNA, 2300 bp, Homo sapien
tcatgcctgtaatcccagcactttgggaggccaaggcaggtggattgcttgagctccggagttcgagaccagcctgagcaacatggtgaaaccccgtctctacaaaaattataaaacctagctggggcgtgatggtgcatacctgtagtcccaactactcaggaggctaaggtgggaggattgcttgagcccgggaggtggagactgcagtgagccgagatcatgccactgcactccagcatgggcaacagagcgagaccctgtctcaaaaaaataaataaataaaataaaataagaaaaaaagagaagagcttactgaggtcttaagtgcaagtaaaacaaactacttggtattagcaggtagagttttaactaggcagacacctcctgtagttttctgtgtttgctaagagtgggaagtgccaggatttgggaataataaatatcatttattgactgcttactacatagcaggtactaaaattaaactaagatgatggcctcctttaatcctcaacaagtgtagtagctagaaacttttcctacctatattttatggatgagaaaactgattcttaatttgccaaagaacatagctttggtatgtgaacccaagactgtccaattctgaagctcatgctatttgctattatattacatctttctagtaatcagaaatatgcacagcgcatccaggaatcagggaggacacaataattcatattgtgaattaaaaggatcactaggccaggcaccgtggctcacacctgtaaccccagcactttgggaggttgaggcgggtggatcacctgaggtcgggagttcgagaacagtctgaccaacatagagaaaccccatttctactaaaaatacaaaattagctgggtgtggtggtgcatgcctgtaatcccagctacttgggaggctgaggcaggagaatgacttgaacccgggaggcagaggttatggtaagccgagatcgcaccactgcactctagcctaggcaacaaaactccgtctcaaaaaaaaaaaaaaagatcactagaaaatgggtttgtaaaaagtagaggttcctcttcaaagacttccttccccgtctaattaggaataaatagtaacttctcttagagcaaaatttattcaaagacctgtgctaacattcttaaatatctgctagatataataaagaaatcaatgtactttatgttcttagctcccacaatttagcctaaatatttgccctggcatgcttatactggtccaatcaaacattaggtcatagcctgttcctcttccttacttaaaagtgtttttacctttctcagcattccacaagttacttccttcttcctttgttctcctctgcctttgcctcttttaaaaagttctatgttgctagtcagtcgggacaaatacagaatgtgaggtcccgttccagccaaaggaaaccggacacagcagtagggtggacgcgccacgttataaatgaccctgtctcctttgttcagtgtactctcctggcaaaactgctggcgagtgtaccctttctgcaggaagtaaaaatggccttactaaataaattaaatttaagtttaagttctatttctttacagcaccgaggaacgagcatttcgaacaggttgaacaccttgacagattcagtgtgtggcctgcctgagacctccaaccagtctgcagggcactgtcacgtccagtcgtttcccaaggcctaaaataggcaggcactggctcaaggccacacagtcaaggccccagggttcgtccgcctcgggctcctgtcaccctcgggtagaaggtggcccaaggctgaagaccgaggtccagggaggcgcctttccaaccgtgccagagagggcaggtcgcagacgccggggctgcggggaatagaggccctcaccgcagatgccacctgccgtgccctgctctgcggccaacgccagcgctggacccggagctacccgcccccgacccggaactccctcgagtaccgcgcgagccgcttggtcgccattcccgacactccttgcttttccaagtccagctgccggaagtcgctcgacttctacttccggtccgttcaaaaagcccgcgaggctgaggggcggttgttgttggcagctgtggctaaggaggggagaacctctgctccccgcccgtcttctcttctgcgtttcccgggctagggggcgtggggagtggttttaggcggcgaagccgctcggcagcaccttccttctttgccaggcagacgcccgttgtagccgttggggaaccgttga

SEQ ID NO: 15476 - DNA, 2300 bp, Homo sapien
cctgtctcaaaaaaataaataaataaaataaaataagaaaaaaagagaagagcttactgaggtcttaagtgcaagtaaaacaaactacttggtattagcaggtagagttttaactaggcagacacctcctgtagttttctgtgtttgctaagagtgggaagtgccaggatttgggaataataaatatcatttattgactgcttactacatagcaggtactaaaattaaactaagatgatggcctcctttaatcctcaacaagtgtagtagctagaaacttttcctacctatattttatggatgagaaaactgattcttaatttgccaaagaacatagctttggtatgtgaacccaagactgtccaattctgaagctcatgctatttgctattatattacatctttctagtaatcagaaatatgcacagcgcatccaggaatcagggaggacacaataattcatattgtgaattaaaaggatcactaggccaggcaccgtggctcacacctgtaaccccagcactttgggaggttgaggcgggtggatcacctgaggtcgggagttcgagaacagtctgaccaacatagagaaaccccatttctactaaaaatacaaaattagctgggtgtggtggtgcatgcctgtaatcccagctacttgggaggctgaggcaggagaatgacttgaacccgggaggcagaggttatggtaagccgagatcgcaccactgcactctagcctaggcaacaaaactccgtctcaaaaaaaaaaaaaaagatcactagaaaatgggtttgtaaaaagtagaggttcctcttcaaagacttccttccccgtctaattaggaataaatagtaacttctcttagagcaaaatttattcaaagacctgtgctaacattcttaaatatctgctagatataataaagaaatcaatgtactttatgttcttagctcccacaatttagcctaaatatttgccctggcatgcttatactggtccaatcaaacattaggtcatagcctgttcctcttccttacttaaaagtgtttttacctttctcagcattccacaagttacttccttcttcctttgttctcctctgcctttgcctcttttaaaaagttctatgttgctagtcagtcgggacaaatacagaatgtgaggtcccgttccagccaaaggaaaccggacacagcagtagggtggacgcgccacgttataaatgaccctgtctcctttgttcagtgtactctcctggcaaaactgctggcgagtgtaccctttctgcaggaagtaaaaatggccttactaaataaattaaatttaagtttaagttctatttctttacagcaccgaggaacgagcatttcgaacaggttgaacaccttgacagattcagtgtgtggcctgcctgagacctccaaccagtctgcagggcactgtcacgtccagtcgtttcccaaggcctaaaataggcaggcactggctcaaggccacacagtcaaggccccagggttcgtccgcctcgggctcctgtcaccctcgggtagaaggtggcccaaggctgaagaccgaggtccagggaggcgcctttccaaccgtgccagagagggcaggtcgcagacgccggggctgcggggaatagaggccctcaccgcagatgccacctgccgtgccctgctctgcggccaacgccagcgctggacccggagctacccgcccccgacccggaactccctcgagtaccgcgcgagccgcttggtcgccattcccgacactccttgcttttccaagtccagctgccggaagtcgctcgacttctacttccggtccgttcaaaaagcccgcgaggctgaggggcggttgttgttggcagctgtggctaaggaggggagaacctctgctccccgcccgtcttctcttctgcgtttcccgggctagggggcgtggggagtggttttaggcggcgaagccgctcggcagcaccttccttctttgccaggcagacgcccgttgtagccgttggggaaccgttgagaatccggtaaccgatgcggacggtaaagccgtttgggttagagcggcgcgggtgtccagtccgcggaacggggagatcgttggcaccttcgcttttttaggggaacggggatagttcggtaaactgaattgagaagcggatccgagggaggttgaaagctgtcaagcccgtgtagctctcccgctaggaggcggcacgcgggggaataggggcgctggagtttccccagctctacctcatctttctccacagccatgg

SEQ ID NO: 15477 - DNA, 2300 bp, Homo sapien
atttttatcatttgtctctgcccactagaatataagacctactagggcagtgaacttgattcactgatgtaccccaagcacctaggtcagtgccccagcacatggcagacaataaaaaccaatgaatagctgggtgcagtggctcatgcctgtaagaggcagagacaggaggatccttgtcacaccactgtagtccagcctgagtccagcagagcagagaccctgtctcaaacacaaaaacaaacaaaaaagcccaatgaacgactgaagggatgaatgaagtatatttagttctcagtaaatggtaaggatgatagggataatcagcctttttattcccctattgcagcggtccccaaccgttggcaccagggaccggtttcgtgttagataatctttccactgactgggagaagggctggggggatggtttcggggtgattcaagtgcattacatttatcattagagtctcataagcagcatgccacctaggaccctcgtatgcaaagttcacaatagggctcacaataggtttggcacattcctatgagaatctaatgcctaggtggagctcagggggtaacgttctatcggccaccgctcacctcctgctgctttgtggcccggttcctaacaggccagctgtggacagtgggttggggaccccatggacaggcaggtactagtctgtgcacagggggttggggacccccgccctactggaatgtaaactgcacgagggcaaggaattgtatttttgtgccccaggatatcgatgaacattcctattatgtacaggcagttttttttttgttttgttttttgttttttttttttaagagatggggtccttgctatattgcccaggctggtcttgaattcctggcctcaaatgatgctcccgccttggcctcccaaactgctgggattacaggcgtgagccactgcacccggcccaccatcccagtttttttttttttttttttttttctgagacgtgatttctttcttgttgtccagggtggagtgtaatggcgtggtcttggctcattgcaacctctggttcctgggttctagcgattctcctgcctcagcctcccaagtaggtgggattacagtcacccactaccacgcctggctaattttgtgtgtgtgtttttggtagagacggggatttctccatgttgacaaggctggtctcgaactcctgacctcgtgatccgcccgcctcggcctcccaaagtgctggaattacaggcatgagccaccgcactcggccgactcactatcccagtgacagccaatgacagccttgttgcaggaaggtggtattacactcattcccattttaatgatcagggatcaggttcggagaggccagggcggagagcccgcccgaatccagtgcccccgacggcggttgggcgagggtccgggagctccaaaccgcctagggccgcctgctcgggatccccgttgctcaccttggcctcgggctgactctcctcgagatcccaaccggctttcatcgcctcagctgccccgaccagcttatttggggcctgcctgctttccctgaccttcctggggtgtctctcggtcccttccctctctggctccatggctgtggagaaagatgaggtagagctggggaaactccagcgcccctattcccccgcgtgccgcctcctagcgggagagctacacgggcttgacagctttcaacctccctcggatccgcttctcaattcagtttaccgaactatccccgttcccctaaaaaagcgaaggtgccaacgatctccccgttccgcggactggacacccgcgccgctctaacccaaacggctttaccgtccgcatcggttaccggattctcaacggttccccaacggctacaacgggcgtctgcctggcaaagaaggaaggtgctgccgagcggcttcgccgcctaaaaccactccccacgccccctagcccgggaaacgcagaagagaagacgggcggggagcagaggttctcccctccttagccacagctgccaacaacaaccgcccctcagcctcgcgggctttttgaacggaccggaagtagaagtcgagcgacttccggcagctggacttggaaaagcaaggagtgtcgggaatggcgaccaagcggctcgcgcggtactcgagggagttccgggtcgggggcgggtagctccgggtccagcgctggcgttggccgcagagcagggcacggcaggtggcatctgcggtgagggcctctattccccgcagccccggcgtctgcgacc

SEQ ID NO: 15478 - DNA, 2300 bp, Homo sapien
tcttccttgttatttttgcacatttactttctaggaagtagtttacaaatggacaccagccatattccgtctttttctcaggtcattcagagtcttgctcccaggtgggatcaaggggctcctgtggtccttgagactctccggaggatggctgtgccagtacaaccgcctcagcccctggcagctgtagaaaagctgtctgaggaattcatgtacttatgttctctggcctttgggtatctgacatatgtaggaagaaataaaaagctgcacccagctagctctacaaactatttagatgaaagttgaaaagatgggctttttatattgttaatatgtaggagcaccagcatctggcagtggtttcttgctgctgaatagattctagatgggaacagaatggaggagtggaatggattggtcccttctgtcaaggaagcctcagagcagatctcaagtgctttgctgacactgacttttggtgccagcatttgcctcctgttttttagctcctcatttcacaagtctgttccttgggtgacaggctgtccattagtagtagccaacatgcattcctctgagtgggcttcctgacccagcgagctgcagcagtttacttgggtctgttttccatgtctggacctgttactgaccctccagagatcaaactaagatgattaaggagagggaaggctgcaaaactggtgtttcctatccctcgttgttcagattggagtagccctgctttccctctgcttttggacttctgctttttctttgactctgatagtcttgggcaaggagtagtgtgagatctgttcaccaaggaggcaaagtgcctgtccttaggagggttgcacatttagaactttggcctcactgaatgccaaaaaaggtgaagtagtcccagaatattagaccttggaaagactaacccagacctctcactttaatgtcagtgtcacagaaactcagagaggttaagtggcttgctcgagagtgcacattgctcaggaggatttcacaccagaaccaaaggcttcctgggggcgtattctgttcctattgacttggttcctcaggaatatacttaggcattgataggatgttggacattttcttcttggggcaccaggacctccttaggggtaggggaatatcctggcacacatcatagcagagaacagtagtgagaccagtgatggaaagtggcgagtttagagtcagactgcctggatttgaatccttctcctccattggctgtgtgacctcaggctacctccctcaagctctattcacttcctccctctgtaaaatgaagattatattgtcttccttatagagtcgtggattacatgtgataattcatgccaataaatatatgtaattatttttacaatattgttattaatatacattaataacatgagccaaccatatcaaccctctccctcctcctttccatttcatgcttatagacatttaaggaccagaattaaacctgccttctctctgaaacttgcccatggaaagtctggcagactggttttattttccagccttactgcttagtagttaagagacctgtttcctaatctatgaaagctgcaacaactattttcttgaggttgttgggaggcttgaaggtgatgatgaatatgaagcatgtagccccaggctccacagatactgatttcacgtccccagtccctccctacctttctttccgtaatagtagttcacacttctctctccttctcctgtctgcatttgtacagagtctcagtgtgagtttgtcctctgtggtggttctgttctgtaagacacagttgagagtaagcccctagaagacagggacttgcctggttgtcatttcatgatctgcctaggagatgggaacaacttcctgatccctctttggagctagagcaacccagggactgcagcctctgggattgccctttgggctcagcagtggccgctccaggcctaggaccaggcagccagccaagcccatccccaggaacagcggccagcgctggcacaggggaggaaagagtctggaggctgatgtgcagaggagggagggagaggcagagcagctgggctgagactgagggagagaagctggaggctgatcttggtccagcagaagctgagcagagctgctgtctttggtctttcaggtaaacactcaaagctataagtagaaaagaaaaaaagcctagaagttggtttccccagtgcatgggttttttttttccttctttcttctgccttttctttctccacatccctcc

SEQ ID NO: 15479 - DNA, 2300 bp, Homo sapien
aggacttacgggcactttctaatcaaaggactccgaaaatgtaggcactatctcttaaagttcttcagaaaacagtttcagattctacaaaagatttccgaagaatgtatcaacaccaaaaggaaaatcataacacttcactctgatatctgtctgagaggctagaagagtgctccttgattttttttaaaccaacagcatatcaacaaagaggccttctttccattctttgcttcaaataattttttcacatccgttattggtttgtattcgcccttaaaccaaaactaaacagatcacactgtctcatttaggacccccatacacaaagaatcagctacgtaaagatgaaaatcagcacaagctgaacgtgtcactgatgatttgtgtgtcacacataaatggagaaaaacataaaagagctattgtccaattgtagaaacaaaaaagtaatatggggttttctgttctctgaagtgcatcatgaaaagtgggtggagagaaacacagaaatccagaattagcctagcaaatcattttgggaagagctgacaacatgtaaattcctcacacataaagtatttcgagcaagagaccttgattcctgggctatgatgccattcaggattccttgcaaaggctctggaattccagtattcataaaagaaaatgctcattataatcggagcgtaagaggtactcccaacgtgacagcctgtatgaagtattacaaagcttacagttaagatctgggatagaggctgaacaccaaattcaaaagaggtaaccaaggcactaagtgccataaaggaggaaaggggaagaaaaaaaaatccactattgccactcagccacagagaattaaagtggaaaccaggggtgtgcatgggggaggatgaggggtgagaagtgcggggggtgtggtggaggaacaaacaatacatttgtcaccccgtcccacttcctatagaggatacaggcaaagcctccagcctcattacctcggacacagatggttatcgtttatagcaaaggtgcacaaaaaggccttcaggtctgagccccttaattccagggctgttaatgattaaagagaacgatgggggtggggagggaaatgagggcggagggagctgggagattcacccaccacctccccctagggctcctacctcacagcgctcacccaggacagaggaccagagtctgcaccccctccagggcagctccaaccccatatccccaggccctgggttgaggggtgctggcggtggggaggcagggacagtaggtaagttttctgagccctgcggctgacacgccacaggctcccctcacagcctcttctttcagaggtaccactccagacaacgcgctgacttccactcctccctttccacccccctttctcgaaggtacccaacccccgccccttcatctctcaatgcccccccgccttttcctcaactccccccctccccaaaactcacagctgctccagaggttcctccagtcaaaccctttctggaaacgacggcggcccggcgggtccaaaccacctaccatccccgctcgcgtttccaggctccctacccccgccgccgccgcctcttcttccaccactgccaccgcctcctcttcatctgcggcccaccggcggcggccgccccgaagccccgccccctccatcgcctcctgcatcatcacttccggtaaccccgccggccgccagctccaggagggagaatgggagaggggcaaggagggaacgagtggaagattgcgtcacgacgcacataaagacgtacgaagccgtcgccaagtaagggcaaagacctagcaacccggagggagctgggctggaccatttttttttcttgttttacgggaatggagcggggaggataatgaaagcgtaaaggaaaaatagggggaggaggagctcagcttattgttggatgcggcgggagatgggtagagtcagtcagtcgagactcccccagacctggaactggtgctcccacagaggtgggcccggtggtttggtccggcctggcctactggaccagcctgtgctcggtcggccacggctctgctgggctcctggcgccgcctcctcccagcccgccgcgggctgcgcgcttctgtgggtgggggaaggcaggactgacgcagagtgagtgtaggggatggaggcgccgactccaggcgcgggagactggcggggaaggggttggctccccacgggcagggatggtttggaggttgggctgcggcgttgccgggagacgggcctgtgt

SEQ ID NO: 15480 - DNA, 2300 bp, Homo sapien
aacagatcacactgtctcatttaggacccccatacacaaagaatcagctacgtaaagatgaaaatcagcacaagctgaacgtgtcactgatgatttgtgtgtcacacataaatggagaaaaacataaaagagctattgtccaattgtagaaacaaaaaagtaatatggggttttctgttctctgaagtgcatcatgaaaagtgggtggagagaaacacagaaatccagaattagcctagcaaatcattttgggaagagctgacaacatgtaaattcctcacacataaagtatttcgagcaagagaccttgattcctgggctatgatgccattcaggattccttgcaaaggctctggaattccagtattcataaaagaaaatgctcattataatcggagcgtaagaggtactcccaacgtgacagcctgtatgaagtattacaaagcttacagttaagatctgggatagaggctgaacaccaaattcaaaagaggtaaccaaggcactaagtgccataaaggaggaaaggggaagaaaaaaaaatccactattgccactcagccacagagaattaaagtggaaaccaggggtgtgcatgggggaggatgaggggtgagaagtgcggggggtgtggtggaggaacaaacaatacatttgtcaccccgtcccacttcctatagaggatacaggcaaagcctccagcctcattacctcggacacagatggttatcgtttatagcaaaggtgcacaaaaaggccttcaggtctgagccccttaattccagggctgttaatgattaaagagaacgatgggggtggggagggaaatgagggcggagggagctgggagattcacccaccacctccccctagggctcctacctcacagcgctcacccaggacagaggaccagagtctgcaccccctccagggcagctccaaccccatatccccaggccctgggttgaggggtgctggcggtggggaggcagggacagtaggtaagttttctgagccctgcggctgacacgccacaggctcccctcacagcctcttctttcagaggtaccactccagacaacgcgctgacttccactcctccctttccacccccctttctcgaaggtacccaacccccgccccttcatctctcaatgcccccccgccttttcctcaactccccccctccccaaaactcacagctgctccagaggttcctccagtcaaaccctttctggaaacgacggcggcccggcgggtccaaaccacctaccatccccgctcgcgtttccaggctccctacccccgccgccgccgcctcttcttccaccactgccaccgcctcctcttcatctgcggcccaccggcggcggccgccccgaagccccgccccctccatcgcctcctgcatcatcacttccggtaaccccgccggccgccagctccaggagggagaatgggagaggggcaaggagggaacgagtggaagattgcgtcacgacgcacataaagacgtacgaagccgtcgccaagtaagggcaaagacctagcaacccggagggagctgggctggaccatttttttttcttgttttacgggaatggagcggggaggataatgaaagcgtaaaggaaaaatagggggaggaggagctcagcttattgttggatgcggcgggagatgggtagagtcagtcagtcgagactcccccagacctggaactggtgctcccacagaggtgggcccggtggtttggtccggcctggcctactggaccagcctgtgctcggtcggccacggctctgctgggctcctggcgccgcctcctcccagcccgccgcgggctgcgcgcttctgtgggtgggggaaggcaggactgacgcagagtgagtgtaggggatggaggcgccgactccaggcgcgggagactggcggggaaggggttggctccccacgggcagggatggtttggaggttgggctgcggcgttgccgggagacgggcctgtgtgaccccagcttcgcgggggcggctcggtgtcatcgccaccggcctcggggacctgcctcacggaagtggctcgcgcgtccaagaggggaggcctggtgtggggacgctcaggtgccggcgtggggccccctcggaggctgtgaatcttttggacccccgaatgtaaatgggagatggtaggggccggtccgggggcgagaggtgtctggctggggaacgttgacccacaccaggtcccgtacaggaacggagactccctaggaccgtgagagccagcttcgtaattctct

SEQ ID NO: 15481 - DNA, 2300 bp, Homo sapien
ctcttttatttacacgctcttcttaggtgatctgggagctcctccctgccttccttatttattatctccaactatgatttttccccgacttgtatatctaacttcttgacaacttcatttgacttgttaatagacttatcaaacttaatatgttcaaaagagaactttcgatattcctttctaaactgttttcccgtagggagttaaccttggttcctccctctcctacacacttcacatccaattccccagcaagtcctgcaagcactacctcccaaatatatgctgaatggaattctctccatttccactgtgactgagggccttttcttttttcttaagacggagtctcactccgttgcccaggctggagtgaagtggcgcgatcttggctcactgcaacctccacctcccgggttcaagcgattctcctgagtagcagagattacaggcgcgtgccactacgcccagctgatttttgtatttttagtagagatggggtttcaccatgttggccaggatgatctcgatctcctgacctcgtgatccgcccgcctaggcctcccaaagtactgggtttataggcgtgagccaccgcgcccggccggccctttcaacactatcttcacctctcctttgtcttacagtgcaacagtctcctaacaggtctaactacttccacccttctctatccagcaggcagagcggatttttaaaaatgtaaatcaggtcaggtcacttcccttcttaaaacccttaaggtacacattagccaaacccctgccttgggctaaaaggcgctgctacagtcatgccacttccccaactacatcacagggcactccggccctggctctgtttgcttcagccacatggccttctggctgtttccaacctaaaagtccttctcattggctcttctctccacccagaaaacccattgtctcggatccccgcaaaaccgtggcctcctttgaacgaccttacccgatttcgaggggccctccccccatcttctgtcacctcatccggtctttggggggcatttctcacttgctgataccttctttattgatttacttaactctctcctgcacacgaatggaaggtaacggagcaacaccctactctcaggtttgaagagcaagagaattacgaagctggctctcacggtcctagggagtctccgttcctgtacgggacctggtgtgggtcaacgttccccagccagacacctctcgcccccggaccggcccctaccatctcccatttacattcgggggtccaaaagattcacagcctccgagggggccccacgccggcacctgagcgtccccacaccaggcctcccctcttggacgcgcgagccacttccgtgaggcaggtccccgaggccggtggcgatgacaccgagccgcccccgcgaagctggggtcacacaggcccgtctcccggcaacgccgcagcccaacctccaaaccatccctgcccgtggggagccaaccccttccccgccagtctcccgcgcctggagtcggcgcctccatcccctacactcactctgcgtcagtcctgccttcccccacccacagaagcgcgcagcccgcggcgggctgggaggaggcggcgccaggagcccagcagagccgtggccgaccgagcacaggctggtccagtaggccaggccggaccaaaccaccgggcccacctctgtgggagcaccagttccaggtctgggggagtctcgactgactgactctacccatctcccgccgcatccaacaataagctgagctcctcctccccctatttttcctttacgctttcattatcctccccgctccattcccgtaaaacaagaaaaaaaaatggtccagcccagctccctccgggttgctaggtctttgcccttacttggcgacggcttcgtacgtctttatgtgcgtcgtgacgcaatcttccactcgttccctccttgcccctctcccattctccctcctggagctggcggccggcggggttaccggaagtgatgatgcaggaggcgatggagggggcggggcttcggggcggccgccgccggtgggccgcagatgaagaggaggcggtggcagtggtggaagaagaggcggcggcggcgggggtagggagcctggaaacgcgagcggggatggtaggtggtttggacccgccgggccgccgtcgtttccagaaagggtttgactggaggaacctctggagcagctgtgagttttggggagggggggagttgaggaaaaggcgggggggcattgagagat

SEQ ID NO: 15482 - DNA, 2300 bp, Homo sapien
tggcggctcacacctataatcccagcactttgggaggccaaggtgggcaaatcacctgaggtcaggagctcgagatcagcctgtccaatgtggtgaaaccccatctctactaaaaatacaaaaattagccgggcatggtggcatgtacctgtaatcccactcagctgctcaggaggctaaggcagaagaatcagttgaatgtgggaggcagaggttgtggtggccggagatagcgccgttgcactcagcctaggagataagagtgaaactccatctcaaaaaaaacaaagcgaaagaaaagaaacctctggaggtacctacctgggggtaaatttattcctccatccccttgggtggaagtgataagagagacccagctacgcccatatccacggactttaggacatggtctaccccctgttactaatgcattctgactggtgccctggaaacttactcagatggaccacttctctctgagaagagaaaagagtcagagagatgcttcaagtggctcctcccatctaggtcaacataggccagtgaaggccaagatagaatttggatccacatttctctctctctttttttttgagatggagtctcattctgtcccccaggctggaatgcagtggcatgatcttggctcactgccacatctgcctcccaggttcaagtgattctcctgcctcagcttcctgagtagctgggactatagccatgcgccaccatgcccagctaatttttgtatttttagtagagatagagtcttaccatgttggccaggctggtctcaaactcctgacctcaggcaatttgcctgcctcggcctcccaaagcactgggattacaggtgtgagccaccagtcccagccacatttctcattttttactgcccagtatttgtaagcaccccctgcatccatcccagccaacagccatattagatcgtcacaagcagctttcacaatgccatgggatagtagaaagcacccaggcatggtgtcaggaagcctagattctagccctggctctagctctaactgggtgactcaggcaagttacttctcctctaagatctaagataataatgcaatagctggtgcatactgaacacttactatgtgccacatactcttgcaagcacttcagttgcattctatcatttattctcatgataactctatgaagagggtaaagttagtctgttttgagatgaaagaatagagatctacaagggttgtataacttgcccatgctagtcggtagcaaaacaagaactcaaatcaagatctgtctggctgggcgcggtagctcacgccttaatctgaacactttgggaggctgaggctgttggatcatctgaggtcaggagttcaagacaagcctggccaacatgatgaaaccccatctctactagaaatataaaaattagctgggcctggtgttgggcacctgtaatccccaggtgtttgggaggctgaggcacgagaatcgcttgaacctgggaggcggaggttgcaatgagccaagatcgtgccactgccctccagcctgggtgacagagactctgtcttaaaaaaaaaaaaaaaaaaaaaaaaaaaatctgtctggctttgggattcttctgatgcatattggttctgcattcctaaatgacttctgatgtccatgttgaacactgggaagctccaacagttgagtgatgctatgaggtgtcctcatttggcataggagaatgaggtgtaccagcacctagggccttccacagaaccattgagggacccaatgtaagtaacaacatgtacccgcatagggccagtggggaggttggttgagccatgcattggcccaccgaggatggtccatctgcactcacttgtcccccagtccttcttgcctttattgtcactggagtggcctgaatgaagcaaagctacttccctttgcttctgtgaatgtgcgttccctcagtattcactgcacgtgttccgattctgatttgttgtttcttttccaggccttgttccggacagtggccatgatggtcccagattacgccctcattggagaaatctccctctactccatggggtttctggactccagaaggtgtgttacatgggttttccagtgcattctaaaggactttaaatagcggctttttgcgtggcagattcaaggtggtttgcccattggaagaagagagagaagcttgagaaacttgcttctgcttactgggtggtctgagagcacatagccctggccttggtcttgccccatttctgacggggaaatgg

SEQ ID NO: 15483 - DNA, 2300 bp, Homo sapien
actaactaatttaatctttgtaatactcttatgggtttgggaacattattattgtccctgttttataaatgagaaaataatgatttgcccaaagatacaagactggtaaaatgatcaagctagaattgatacccaggaagtctggataagatattcagccatttaacctctctgagccacatttttaccctaagttaaacacacacacacacacacacacacacacacacacacacacacctacctcaatatttatgcatttttataaaataaaattaaacactctcagcaaacactttgagaatgttgttgatagtcacataatttaagttaatttcatcttgaaaatacagattgctaaaaaaagattttaattttaaattatacgaatgtattattactcttatggccattgagccttattcattatagcacatgatggagatagagggagtgtatatccatagagatcacccatttgaatttcacttgggagtgggagaaattgacatctcactggatatttgttagttgatcagcaacaaataattattactctttgtacttgctcaacactgtagatacagtgtattcgtttgctttgctgagtaacaaatgaccccaaaagttagaagtgtgaaacaacaatcatgtttcacatgatcagtttagctcagaattctctaggttggcagattgagctgggcttggctgggtggttcttctggcctcactggggctcactcatgactgcagtcagccatcagtcagcatccttaattgcttgtctggtcattggcttcctactggctggacaacaggtatttgggccacatgtcttttatcctgtagaagactagcctgggtttatttatatggtggtggtcacagggttcctaagagcagcaagagtgaaagcatcatggcctcttgatgcctaggcttagaacgtgcacagactcatgttcacttacattctattagccaaagcaagacacagagccagctcaagtttgagaaatgtgaaaacagactccaccccttgatgagaggaactgtaaatatcgtggccatttttgtaatccaccatatttggtaaagaccataatcacacaatccctccatcatagaactttcagcctgatggtcacagtacaggtttgaatattggacattttctgaaggtttgttgttgctgcttttaggcctgaacaagagatgaaattgtcttattatctctaatttaaaagatagtaaagggctgagtgcagtggctcacatttacagtcccagtactctgggaggtgaggtggatggatcacttgagcccaggagtttgagactagcctggccaacatggcaagaccccatctctacaaagtatacaaaaattagccgtgcgtggtggcatgcgcctgtagtcccagctactcgggaggctgaggtgggagaattgcttgagccctggaggtcaaggctgtagtgagccaggattgcaccactgcactccaggccgggtgacagagacagaccctgtctcaaataaaataaaataaaaataaaaataaaaataaaataaaataaaataaaatataaaataataaaataaaataaaataaaaaaataaataaaataaataaaaggtggtagaggcctctgcatgtaaataggctcattattaacatttactttcttgtatcatgcctatacaatgttcttgcacggatggagagaaggaaagacaaggaagtctctctctcctgcccctacccagtggttctcaacactgactgcacattagaatgacctgaaatttaaaaaaatacaaatttcatcagccgcactcccagatcaattctattagaatctctggacaatgggactgtggctctggaattttgtataagctccccaggtgattctaaagtgcagccaaagctgagaattgctgttctatccgggctcctttcaactgatagcacccatcccccagtcctattaaacccacacatgccagcttttattcgttctcttgctgtcagactcaaaaccatcgcttcttggtcttttgactaagatcaagtgtggtatctcagagtcaaaaccatctccaagctgggtgcaatgtctcatgccagtaatcccagctactcaggaggctgaggagagaggattgcttgagcccaggagttcaagtctagcctgggcaatatggcaagacctcatctcttaagaaaagcaaaactccaccttccatgccccagatgaaaagtgataaaagagagtgggcctttgtgaag

SEQ ID NO: 15484 - DNA, 2300 bp, Homo sapien
tgctagctactctcccacctcctgcagggctctgtggacagggcccagcccggatccaacagacaagagaatccaacactgcagattgggcatcaccttccaggtgcagagccggagggtggggtaggaacagcaaatggagaataatcggcatggaaccccaaaaccattaatgtggactgggaaaataaagccagatttcttgcagaggaagcaagattgttttctcatgagatggatggatgcatgaatatggcttaatccatctcacaggctgttctcaggattaatgcaacatgatggacataaggatttaaaggttcaccgaagagaggggtgagcccagggctgccctgctgagcctcttctagagccgccctctgctggcccctgctgttaagagctggggaaccagcggatgagatcaagctgagagtcacccctcagaaggagacaaggacactctactcctctcgtcataaatgacaattgttcccattcctcacagagccacccctcactcctcctaacttcaacagcatttactgtctctaattggtcttggagtaatattctaaaatcatgcatgcaaaattgatgccttggaagttgagaagcgtttttctccccacagaggtccctgttcaaagggagaaggaagctgatagttttgggattcctaccacgtgctgtttaccacctaagcacaatctcagatcatctcatttcatccttcagcaccatgagagagggtctgattctatcccgttctccagatgaggggcacagagtctcaaaaagatgagccttctgtttatttatctaacaaaaaaagtgattttgccacccaagttgtaagtttacttatataacaaacctgcacatgtactcctgaacctaaaataaaagttaaaatatattaaaaagcaaataaagaaattgctgggggaaaatgattttactttcctggttagacataaaaaagtggtagatatatagagtggatactactcagccataaaaagaatgaattaatggcatttgcagcatcctggatggattgaagactattattctttttttttttttttttgagacagaatctcgctctgtcaccaggctggtttcagcatgttggtcaggatggtctcaatctcttgacctcatgatctgcctgcctcggcctcccaaagtgctgagattacaggcatgagccactatgcccggccaggagactattattctaggtgaagtaactcaggaatggaaaaccaaacatcgtatattctcactcataagtgggagctaagctatgaggatgcaaaggcataagaatgatacaatggactttggggactccagggaaagggtaggaggggggtgagggatacaagactacaaattgggttcagtgtgtactgctcaggtgatgggtgcaccaaaatctcagaaatcaccactacttactcatgtaaccaaataccacctgttcccccaaaaacctatggaaaaaaaatcagttccatagaaaagggtgtagagggtgtgtgtgtgggggggggcagggtgggggagttgggaggtatatgggaattctttgtactttctgctcaattttgctgtgaatctgaaactgctctaaaacatagtctattaatttaaacacaaatcaattccttccatcaggctaagttctgggctccagggccagtatccatccaggtggaggcaggaaaatacacacacactcacaaacacacacacacaaatgttttgcactccctggggagcacacttaggccacattttccaggtagcaactacatgggttgacccttcagccaaaactctcccatttggtgtagaaatccctgcttttatctattcttgtcctttcttgtaagtatttgcaggaactatggcagctcaagttgggagtgggagtttcttatgtgaaggggacagggtaattgatatgaatctgcaggtcataatcaaaacgtgaacctggagtgggtgtgtgtgtgtgtaaaaccatgtccatggcactggcccacttcacttgacattattggatttgtcagtatgtctatattttctatgtcgctggattaaaatctttatttagcagccaaacacacatagatgtctagaacagagcatagcacatcatgaaaatccgcaataaataccaactgaattgacaaataatgaatgaataagtgattacagccacattagctctgaataagaccagctgcaaaataggcaatttctcagcccccctgccatgcctttat

SEQ ID NO: 15485 - DNA, 2300 bp, Homo sapien
cacattttaccttaacaaagtaacaaaaattaaaaattacctggttataaaaggttaagttttccaaatgaagtaataaagattaacaattggtcttttgctcaaaaatatagaaaccagtggggctgaattgcaatgttagctctctaaagaagaccaatctataaatgtcattgtgattgtctactttgctaagcataagaaacccaggggtggaagccaatctcactctaaaattccacacaaagggaaatgtaaaatcttcctgtgtctggaaaataggggggaatttataggtatttgatatacagtaggtattcaccaaatatcatcagtcatctttaaatggatctagaaatctctatgtaagaagtactttacagctgccttctgacaatttcattaggcgctgtagtttatgagggcatcctgggttagagcttttgtagggaattggaaatagctctatgtcaatatttctgttgtagcaaggttgacattttgagtgtctaaaataaactatgctcattagcaactccatttggggttatatggattatgattaatacttttggactgaatcaataaatttttattgagcacctgttaggtactatatgctgtctcaggtattttggaggagagaggtgatcagacatagatcctgccctcaactttagaatagacaagttgagatacgcatataaattcctaccagagagaaagaaaaaaatactaggctgggcctagtgtctcatacctgtaatcccagcactttgggaggctgaggcaggaggatcacttgagctcaggagtttaagaccagcctgggcaacatagtgagacctcatctctaaggacacaaataaaataaattaaaaaaaaaacagaggaagtagaaatacacaagttcagaagtgggaggagattatatccagctgagaaacagggaggcttcccaaaggaagaaatgttttagctgaattttgaaggatgggaaggatctagatattgggtgcaggaattaccaagccgcataaacaaaagggaataaaggctttgggaaagggagagtgcatggagtcagggtgggctaagctatacccaatacatattttatttgttttttatttttttgagatggagtttcactcttgttgcccaggctgtagtgtaacggcgtgatctcactgcaacctctgcctcctgggttcaagtgattctactgcctcagcctctcaagtagctaggattacaagcacccatcaccatgcctggctagttttttgtgttttttagtagagacggggttccaccatgttggccaggctgatcttgaactcctgacctcaggtgatccacctgtctcggcctcccaaagtgctgggattacaggtgtgagccacggtgcccagccccagcccatattttaaatataaacagtgtatgatgcccttcattgccttttctggtcctcatgtagttctatgaatgtataaaattcactcccttgattttggaaggcccaattttgtaacgcttgccctaccttatgtctcctgaaggatgggaatgattttaaggagccctaccaagagatgaagtttttcatacctcagctaatcatgatcaaacttgaagtcagtgaacccattattgtcttcaatccatcttttgatggctgctgggaattaatacgtgactctttcctggaaattattaagaactctaatgggatccccaaggtatagtagtcacttaatcattcatttgcatgattttttcacttagtgaataaaatgtattgaaagaggttgtacaagtcaggtcgctgggatattcagttaagggagcttcactttggagatatatcctgaatataaccccttgaccccagacaaatgatttagaccataaagaaatattcacgcagcccagaattgtgcttctaacaagagcacgaagagctgctttgtaggagaatcacttgaacccgggaggcagaggtttcagtgagctgagatggcgtcaccgcactcctgcctgggcgacagagcgagactccatctccaaaaaaaaaaaaagaaaaaagaaaaaaaaaaaaagacctactttgtgagagagtatagtgtcctccatgatgtcaacctcaatgaatcagataggtcccaagccatatctgtgggttaataatccatcatgaatcaattgccattaacttgccaagaactttttttcaatttcagtttgaagtttcactcttctgtgtgcttatttgtttgttggtttgttatgtttta

SEQ ID NO: 15486 - DNA, 2300 bp, Homo sapien
tccacccacctcagcctcctaaagtgctgggattatggcgtgagccaccgcacccagccagtctctgtgttcttaagagctgtgcagcatttctgaaacttgcctgaagataagggtcacctggggtccttggtaaacaccctaactgcctgaggaggggcctgggaatctgcattttaacaagcactttttacccccaccctgcacccaggcagttcttaaaatcagaaaagctttgcaatactcccctgttagcagctgcttttactaacgttggagagaggcgagagtaacaaagaggctggcagcagcaacctctttttcttttcttttttttttttgagacagaatctcgctctgtcacccaggtttgaatgctgtggcgtgatcttgccccactgcaatctccacctcctgggttcaagcaattctgctgtctcagcctcctgagtagctgggattacaggtatgcaccaccccacctggctgatttttgtatttttagtagagatagggtttcaccatgttggtcaggctggtctcaaactcctgacttcaggtgatccacccgccttggcctcccaaagtgctgggattacaggcatgagccaccgtgcctggccagcaacctcttctgatctgaaacttaaaaacagacttcaagccctttcctcacactctgtgcttctcctctatctgacattagtcattcccagagccactcagccatccagcagctcagaggcaaaccctaaatatacaaaatttcctgaagtcactaggttccactggccatttttgtttcatttgtgtgtttatgttgcttttgaaactcaaaagcccttgcttgggtaagaagaactatcagctgggtgtggtggctcatgcctataattccagcactttgggaggccaaggtgggtggatcacctgaggtcaggagtttgagaccagcctggccaacatggtgaaaccccgtctccactaaaaatacaaaaattagctggctgtggtggtgcacacctgtaatcccagctacttgggaggctgaggcaggagaattgcttgaacccgggaggcagaggttgcagtgagctgagattgtgccactgcactccagcctgagcgacaaaagtgaaattctgtgtcaaaaaaaaaaaaaaaagaacaacaatagatcttggactttggggttatttttccccactgacagctagaagccatgggatcaaagtgttttgtaggagatcattgctgttcaggagggtatgtgattcgaggccattttaggagcttgtcattcctttacttttttttttttttttttagacagaaatccaaccctgtttgtctgagctaccttagaaggcagaatcaggaccagtgagtgaaagcttccggggggtaaattctagctctggatcaggaaaatctaatgtttttttgtttgtttttgagacagagtctcgattggtcacccaggctggagtgcagtggcatgaccttggctcactgcaacctccacctcctgggttccagcaattttcctgcctcagcctcctgagcagatgggactacaggtgtgcgccaccacgcccggctaatttttgtattttgtagtagagatggggtttcaccatattggccaggctggtctcgaacccctgaccttgcaattctcccacctttgcctcccaaaatgctgagattacaggtgtaagccaccacacctggcctgttattcctcttcttaaaggtcaccagatatgccacctccatccctggactctgtactcactccactgttcctatctgggtggtatttgacaaatccttccttataccccactgacatctctctggctttggttgaatcctctgaagtcctggggaaaatttgccagtgatcttcttgccatgagtgtgaagcgacaggcccagaatgcatggttatggcaagtgaagggtgcagacgaatgctgtatgaatggggtcccttggcagctgatgggcaggacagttgaacccatgatccaatcatgaccattttctcgctggtggtttgtttatggaagagatactattactatctgaccaatggaattcgcaaagacatgattgcccctgaggagggtgaagtgatggttcggatttcaaagctgatttctaacacgctgctgacgagtcccttcctggagcccctgatggtggtcctcgtgcaggagaaggagaatgactattactgtagcctcatgaaaagcatcggtaaggctggtgggcataaagggggctggggagct

SEQ ID NO: 15487 - DNA, 2300 bp, Homo sapien
gctagagtgcagtggtgcaatctcagctcactgcagcctccactgcctgggctcaagagatcctcctgcctcagcctcccatgtagctgggactacaggcatgtgccactatgcccggctaacttttgtatttttagtagagaagaggtttcgccatgttgcccaggctggtctcgaactcctagactcaagcaatccacccaccttggcctcccaaagtggtgggattataggtgtgagccactgggatctcttttataagggcactaatcccatttaggagggcttcaccttcatgacctaatcacctcccaaaaaccccatgcctaatcccatcacattgggggttaggattttagaggaacagacattcagtccattgcagcaagtaattgggaaagcataggagaggctgcgcgtggatttttttaacccaaccactgcatgttccttgagggccaagtcctgatgctatggagagatgctaggatcccagccctggaggaacacatgatgtgatggaggaagcatctatcacacaaagacaagcaaaactctgctggcccagccaaaaatgccagaggtggaaggaatttgaagattcacagagacgcccctagatggcactcttaaacaaaaatcccagtggaaaccctaactcagctttccaaagcaacttccatttagggaatgatgattggaaggctgtaatctaaggaaacacacacacacacacacacacacacacaatcttttcctgggtggggaacccagcattttgcagctgaacaaagtgcatgacgccagacaagattggctaaaacttaagaatttagggattcttgtctgtcctatccccaccattagctcttctttctgctattgtggaattacagcaggattctgtggtttatcatatcattgtcgtgatcatcatcataaatcatcatcccaagcaaatatttttgagcccctactctgtgcctcaataggtgctaagttctcgacagccacagccacactattgcaccagtcctcactacaaccctgtgattgcttctttttttttttttttttttttgagacagggtctcactctgttgcccaggctggagtgcagtgtcttcactgcaacttctacttcccaggttcaagcgatacttctgcctcagcctcccgagtagctgggattacaggtgcgcaccaccatgcctggctagtttttatatttttagtagagatggggtttcaccatgttggccaggctggtctggaactcctggcctcaagtgatctgcccacctcagcctcccaaagtgctgggattataggtgtgagccaccgcaccctgccagctttttgttatctaaagacttattttccaggttgctatggccacaggcaaagaggagaggtcggtcaacacaggtccctgtctggaaagtggctgagaactgtgcaacagcagaccaatggttgggcttatccctctctctaatttatggttgaagccatggttcagagaggttacttagtcacacagtaagttgccatcatgctctatagcagtggttctcacctcgggacgatggggccttccaggggacatttggcaatattttgagacacaactggaggtgggggggggcggttcttgtaactggcatctaatgggtagaggctaggatattgctaaacattctacaatccacagctcagaaacagaattattccgccccaaatgtcaatagcatactattcagaaaccttactctatagggcagatttggggccaggggaaacaggggctcctgctccgacttggatccatgcaaaccgaggaatttggattgatttatcttgtctctctcagcctggactttttcatgtgtaaaatggacatccaatccatctgaaaggatctcactggcttatgacattcgcatttgagcagtcatggttaaaaacttccagccagggtgatacttcatcacgtgtgtgtcttgagcgccagagacgttccagagcagctggttttaggcatacaggaggggaaaccctgacacccttggaaaactcattctcggctgccagtctgcctgtcttgaaggtggtctgagctttctcactccaagccagtcgtgtgggaagggacactctctgagcctcagtttcctcagctgtcaacctctcagggcttgttctagtggctccgaaagccagtgggagcgagcgcgctttgcaaagccttgggcgccgggccttggcgcgcctttgccggatccttccggccacgggcg

SEQ ID NO: 15488 - DNA, 2300 bp, Homo sapien
ttaaattgtaggtggcttgcacttctctcttcccccctcctcaaatcctgttgcctgaaagatggatacaatggctgatgctcttgcagtcatctcagacaaggagtttgaaggtcacagcatagacatggcagggcggtaagccagaaagattcttgacttacctccaaattccttctactggagaaagaaataactttctatcttgtttatgctagtgttatattgggattttccattatacatagtgattggaaactgacctttgagttattctggaaggagtctatcagcagagacagcttcttctgcagttcctgcaagtcccttgagatactctggggctcctcttttgccattctgaagctcacttcaatctctttagggatgaattatcctaccagtaaattctccagtgcagcccgcggtccaatctctcatgtcgctctgtctcttgctgttaccagaggaaacaaaagccgttagtggtcttcatccatctggttcgacgagagcttctaccatcctcataccttgatggtgggcatgcagacggagggtaacctggcaatattcacaacaatttcagattgcacacacttcaatccaggaatttatattccaggaacatgatggaaataatccaacaggtatctcaaaatgtactaaaaggctgtgcattgcatccctgtttataacatataatgactagcaaaacattggaaagtagctaactgtatttccattaggagaaaattggttaaataatgataaattcagtcattaaaatgatagtgtgactgtttagtgatgtgaaaagatgtgtatgatacttttaaaaaaagatgataaaatgttaatagtattatctctgacagcttatgtttattttttagcttgacaaaatgctgaaaatatacagaaagcaagaaagctgaacacactatttcaaatctcattgccttttattctccctagaaagctttccttgtacaacagtagccttgacctgtttctcttctttattactgtacaggttggctcccaattccatcattccatacatcatcatctacttacttgtgggtaagtctatccctgctaaggagaactgcacctcgggggcagacctcaccacagtaattatactctaactaaactgcctggaattttgaggggtgtcccaatctcatacaatttttacttatttttaataaaggcaattggttaaattagatatattttttaacccttgttgagttttcaaatataaaaaaaaaatcattcttattttatatttcccagaactggctggacacagagatatcttttccatttctccctttaaactgacctgacctacagtacaaatgcttaaaagattgtgtccacgtggccaaaattaattgagagatcctcacatttatttatcatatagggggtaattttatctactactaagctgtacagggtctagtatgcaaattaaagcacattttaatcatcccagctagacatcctctgctacttcccttttgtaaaacaagaaaccctttggaggggaaagttgaggaggggactaatcccaccaccccacattctctctttgaagctgcctctggcgtaggtcttgaacttgggatgttcccagcactcagttcccataatctcatctctgcagcaagcagaaacaagcggagttccccttacaggtctcctttggcctgggagcctcaagtgccacccagaccggtttggggagtccgatgagagagtgcgtggggcgaatgccatcggccacagccttcaaatgcgtctacctggccaccaattcccagaccccctggtcactcactcctcggaggggcctccccaggcacggagctgtctcccgagaagggaaagcgagaacccggcgcggccaaggagtgccccgccttcttcacgcctgggggactgggccaggccaacaccagctaaccctttccccttccaaggctccaaataaatctcctggccctcccacccccgaacctccaggggaaaacggctacctcgaaagttcaagctgggaggaggggtcacatctctggttgggggatgggagctacagggcgcctcgagctcacactggccgcccctccccatccgggcccagcctttcagcgttcaaaagccagggagacccaaggagaggaggaagggagtgaaatgcaggtggagagggggtccgcgtcccagaaggcacagagactgaataatgggaactcagaggggagtcgagtacttagttattaatt

SEQ ID NO: 15489 - DNA, 2300 bp, Homo sapien
ccctccaagtattttccaggttttcctgattataagaatcacctgtggtgctcgttaagtaaatatttcccaggcacatcttctggagagtctaattcagcagcttttgggtgggaccctggaatctgtgatattaatgagagctccatgtgatccttttgatcaaggaagtcagggaaacagttaatctccaatgttatttcagatgcctcaggttacacctcaaaggcaacacatgaatcaatacagtttaggatgatgcaaaaataattgcagtttttgccattaaaattagtggcaaagggccgggcacagtggctcacgcctgtaatcccagcactttgggaggctgacacggttggatcacttgaggccaggagttcgagaccagcctggccaacatggtgaaaccctgtctctaccaaaaatacaaaaattagctgggcttggtggtgggcgcctgtaatcccagctacccgggaggctgaggcaggagaatcgcttgaatccaggaggcagaggttgcagtgagccaagattgcgccactgcactcccacctgggcaacagagcaagactccatctcaaatacatacatacatacataaaagtagcggcaaaaactgcaatcacttttgcaccagcctaataattgcaagtgtcacccaccacttgaatggagtctaagccttatatccacctattttggaacatgggctgcagacatctagttatctcaaagagtgtgagagatgttgaaaaaacacaaccatcaggcctcaggaaatctgagttctccacctggtccctgacattgttggggcaagttgccttgcctcagtttccccactgggaaacttccaagtgctttacaacaatataacattcttattagatcactactcccttttacccagaagttttactttgaggaatttatcttgagggttacccaaggatatgtatcagaatgctcatcatgttactgcttataatgatgaaaaattacaagccaccttatgctcataattaaggaaattatataaacacagatttatctcaaattgaatattatgccaccctaaaatggtaacagagagctttatgtttaatagttataaagtgacagtagcagattacaaaacagtatttaaactttcctcccagtgttttaaaaaaattgtgtgtggtgtttgtagaaacatgtctaaagttactcacctaaatattagcagtggcactattatgagtgacttttgccttttctctgtatccttctgaaattgtatctttgcggtaagcttaagcttttacacttgggggtcaacaaggcttcattcatttttttaaagacacttcctgtgcattatcagggtaacttctgcagtagccagaagactagatgttacttaaaaggttttagggtaggtgcaatggctcacgcctgtaatcccagcactttgggaggccgaggcacgtggatcacctaggtcaggagttcgagaccaccctgaccaacacggtgaaacccaatctttactcaaaatacaaaaattagccaggtgtggtggcgtgcacctgtaatcccagctactcaggaggctgaggcaggagaattgcttgaacccaggaggcagaggttgcagtgagccgagattgcaccagtgcactccagcctgggtgacagagtgaaactgaatctcaaaaaaaaaaaaaaaatgtagtggtgtgaacaagacttgtttttttctcaataaagcccatgattctctttggctctacattgcagttgtaaataatttgcccaaaagatcctaatttcccccatagttatagggaaaacaccaattcactcacctggagctgatttcagcaaactctgatttcatgcctggcccacagggcagctggcagaatacccggcgcaagctgtcaggaatcagaggccacttccttccccaatccttccgtttcagctgggagaatgggacaagattcaggtgcccccaatggggagagggtgtggatgcggctggcttcctgctataaaaacacagagcagcctaccctctacctggttgatctggtagtgtcttctgctatggcgtgcaggcagagaggaggctcttggagtccctcaggctggttcaatgcaggctggaggtgagtaattctggaagtggagggagggggtatggtagctttgtttgttaaagtccattcttccttgactatctccctgtctctttccagcacctacaggtcgatttctctcttcttcgcccttgtgacttcagggaa

SEQ ID NO: 15490 - DNA, 2300 bp, Homo sapien
caatctcttgacctcgtgatctgcaccccctcagcctctcaaagtgctaggattacaggtgtgagccactgtgcccggcccaaatattttatagctataccaatctttagtctgatatagaacattatgatgatgtctgaaatcttcccttatgattgtggttttgtttttttttttctgtttaatttttgctttcccttttttgcagctgtgttatttaatttatacaagtttaaaacgatcatagtttcttgattaattgttcctttcattatcatgtattatctctctttatgcctagtaaatttttttggcttaagctatatttttccttgctaccaatacgggtgctcttcaacttacaatgcaaaaccaccataagttgatataataactcagttgtgagctgagaagcatactaaatacctgtcatttttgtgccatcataaagttgaaaaattaggtcaaactctcataagttgcagaccatctatgtgggtacaccaatgttttgttagtatttgcttgctataacttttccattttttgctttcaatctttctgcaattttatattttagatatgtctattataaacaagacatggctgagtcttccacatcataaatttagtccattttcttttgtttttattacagatctggaaattttttggtcttatattgtactccttatagtcatttttctatactttttctccttcccttgagttattgataatatgtttaagttattgatttgagatcttttttctttctcatatatgcataaaaaactacaaattttgccctaagcttttctttaactgcatcctataaatcttgatatgtggtattttcattttcattctgttccaaatatgtctgatataggacttgtatccagagtatataaataattcttataatttattaataagacaaccacttaaaaattgggcaaaaagatttgaatagaagatgtaagaatggctaatgggcacatgaaaagatgctcaatatcttagtcattaggaaattgaaaattaaagccataataagaccacttcatatccactaggatgaccataaacaaaaagataggcaataataaggctggcaaggttgtggagaaattgaaaccctcatacgttattggtggaaatgtgaagtagtacagccactttggaaaacagtctggcaacttctgaaatttaaatgtaaattgccatgcaacccagcagtttcactccttgatatatacgcaagacacatgaaaatatgtgtccacacagagacttgtacatcagtgctcatagcagcattattcatcattactgaaaaatggaaacaacccaaatattcatcatattcatgaaacattgaatggatgaagaacatgtggtatgttagcacagtggaatattattcagcagtgaaaagaaagaaaccattacatgctacacatgacaaacctcaaaaaagtatgtgaattgaaacaagctatacactaaagactatatattgtaggattccatttgtctgaaatgcccgtaaaaaacaaatctatagagacagaaagcagactgtggtttcctgaggttgggagtggaaatgggattgacagcaaatggcatgagggatctttaagggctgatggaaactggattatgataatgggcatgcaactctataaatgtcctaaaaatcattgaattgtatgcatgaaatgggtaaatttaatgatgttatacctcaataaagctgttctttttggaaaaaacagctagtgaactagagtagctctgcattttattaagaaattatttcttacatcctgtgcctagatggccaatattacactcaagaaactaatggacatagaaaaattgaatgtacctccaaacactcaagatgaatacagcagtcttcaatagtcaacgtcatggccattccagagagaaaaggtccaagttcagtgcctcgaaccttgttgccttccgtgaaaggaagcagttgaaatgagctttgcccctggtgacactcttccttgtcactaattaaccagctctataggaaggttgctccgccaacaccttgctctgcctggagagacatctggccaagttctggtgagcaggaaaaatgtctactcgttaccaccaagctgctagtgatagttacctggaacttctaaaagaggctaccaagcgagatctaaatctttcggatgaagacggcatgactcctactctcttggcagcctaccatgggaacttggaagccctagagataatctgca

SEQ ID NO: 15491 - DNA, 2300 bp, Homo sapien
tcagtaggtggggggcataggattttatttttagttcacattcacaaaaacaaagggccaaaaaagtcttactgtgtcacacaggctggagtgcagtggtgcaatcttggctcattgcagcctccatctcccgggttccagcaattctcctgcctcagcctcctgggtagctgggattacaggcacccgccaccacacccagctaatttttgtatttttagtagagagaagattttaccatgttggccaggctggtctcgaactcctcacctcaggtaatccacccacttgggcctcccaaagtgctaggattacaggcgtgaactatcatgccagggctatatgtctgtgctttctaaacccaataaatgtgatgtaatattaatgctaacagcacacgtgatgggccagaaacatttctataagcccagcggctctgggcataaatttctagggatggtgaaccgaagaaacaaaattgtgtcattgaaatcagcttttcccaaccaccagtgtcttctctctctctctctttctctctcagtgttcacttattacatggctactctgtgccaagcactgttgctaaacacattatgtacaatttctcatttcattggtactgattttgacacttactcatccactgtcttttatcatgatgtgaccatttcctacaaaatgccctatgtagcttccaaccaaaataccacaaagcacaacttcagcagtcctgcctcttgaccttctcccaggctctgctctcgctcatctgttccatcctttgcattggcagaagacccatctttctaaatgcttactctcttggagcatgtaatttctttcctaggaatcaccattctcagctgcctgactccaagaatcgttctcagttttatcttctgatgctcctagacctcagcaccttattccagcctaacacatctggcaactcactgttcccagagctattcaacatgccttccacctcagggctttacttggcctgtaatgccctcttcctctctttctgccaaagtagcttaatgattaggaatataattctgaagtccaaccatgggcaaagccagctcctctgctgacttggtggatgaccttgaactaaatttcttcccttctcagagcctccaatggacagtaaaactaataacaacacctccctaccttagaggttgttgtataattaaatgagataatatacataaagtgcatggtgcagtatctggtacatagtaaagatcaataacctgatgttatcattgttgtcgtcactattattatttcagaccttggtttctccccactctttcatgaagcccttatctaaccactccaggtcaaaatcatctctcttttctttgaattaacttacttttcctatcactgatttgatgactaggatttattgccttaagctttacatcattcctttccgattttatttccccatctcaggtaaaaactcctggaagaaaagatcctgcaatttggctttttgtgagatggaaaagattacaccttgccctgcaaacttcccccctttaaaggcgaaggtttgttaggttagttagcctgtgagaaaactgtgcgttcttagcaatcaaaggccagacatctgggggtacaggggggaggaagactaggataagagactctagacggggacagaattaaaaggaaaaaaaaattaaataagcctccgtctccttttatctcctagcagtaggcagtaatttaataaataaaggagccccgttagcgttttccctgtccattctttcccaggcacggtgacctagacagcagcaaaaagcgagttaatagggaggggttatgtaggaagcaaaagtcaaggaatgtggctacagctgattacaggaactgagaaagtggaccaaacaatattgactcccagcacgccaccgcgatgtccatcttggggaatccgttgctggaagggacccatctcgcccacccttaggggtcgaggtgggcgaagggggaggagagggctggcggggcggggcggggttgctccgcccccggaggctgggctgtgaccagcaggcggctccacagagcagcgggcgcgctcataaagggcacagccgagggtacgtggatcgcggtgcggagactgaggttagaaggcacaggtggcgagatgagccgggtaccagcgttcctgagcgcggccgaggtggaggaacacctccgcagctccagcctcctcatcccgcctctagagacggccctggccaacttctccagcggtcccg

SEQ ID NO: 15492 - DNA, 2300 bp, Homo sapien
ggttttgtgtgtatttgctttaaataattcattaagctcgatgtttgaaatatctcatatttatttgtgtgatcatgaaggcaatacatgctttaagactaacattaagaaaaatcccacactgttacaaacatgtgttttttcaaacatttttaatcccagttaatttcatttgctataatctacaaatatgcaataaaagtgtaaatacaaatgtttattctaaattaggaatagacaccaccctctttcctcctactccaccagtggatcattactcacctgtataagaaactagaacaagtggcctgactttggtgatttatatgtgatttcctgtttcacacgtgaggctattcttactatgattattcttattatgattaatccttattgttattaatcttgttcttattgtgattattcctgttgtcctccccaccaaacacactgtacctgcccacacactgccgggaggaaaacatcctggttcagattctcagcactgcgtttaggaataaagtctcgtagcaacattaggcttttagtttttttttttaattttttttttactttttgaaacagagtctcactctgtcacccaggttggagttgagtggcgtgatctcagctcactgcaacctctgcttcttgggttgaagcgattctcctgtctcagcctcccgagtagcttgcattacaggagtgcaccaccactgctcggctaatttttctatttttagtagagacagggtttcgccatgttggccaggctggtcccaaactcctgacctcaggtgatccgctcgccttggcctcccgaagtgctgggattacaggcgtgagccactgcacctgaccacattagacttttagaaggctcaggtgttttacattgggcaggtgaactggctaatatttgtaccctcaatcattgctatgaactccacataataagactagttcatgaggaataaatctgccgaaaccattaactatatcatggataccaaagagattgggttagcaggtcatattgccttttgtattaacctcctctatccaccccttcaagtatatagttaagtaaatgtagcaatattttggtgatttcaaattaagtgtgtaagattattcaccggtcctattatcctttcttgagtagtgtcttaaaacacaagaaccaagggatccttaactgctacattcccagcaaggactggggaaaggtgatggtagaaatcttgcccttgtaacattgcatgttaagtaagagagcactaatggtggggagtatttgggattcgggcatttggaatgggagcctggcattgttgggaggagcagcagcgttaggttactttccaaacacccctagagtttaattgccttgatttcttcccctaaatccgactattagtccatgtccatcaagagatggcctcctctcactttctcaattctctgttcttccgccttctcacctcacccttctgtgccttttgtcctccaacatacacttgataggagtgggggagtggaggagaggctcatctgagttgggggctgaaggggagattgcaatggtaactgtgtttttattgctgttgttaaaggtgtttggcattttggagcaagctaaagagcaatttgatttagaagactattctgtcagatcacactggaacaagtcttcctgacctttgctaacccagagaaatcatccagtgatgatgaaaacgaggtgccatgagattccctcttaaaaaaaaaaaaaaaacagaaaaagaaaaaaaaaagaaatgccctacacgtgagtcccaataaactcatctactcatcaagctggactggtctgagtcattctttggtctgttggctcctttcccagtttggggcggaggatgttctatacagtcctggatttttccccaaccaggaagagaactccttgtcctgcagtgttcctcttgcgccctctcctgacaaagcttaacttcggagctggagcaagtcgtatccggcattgcagggaagagtgaatttggcctgtgatccaatcagaagctgcgattctaaacaggaagccacactggatgcgagaattggggtggggcgcgccaagaggagcaagcattatagaacgtggggagcatgagaaatacacggaggtggaaacgccggagtggctggcgggtaaaggcagcgggcgcagatgaagcgggctgggcgtcccacgcgcagaaccgtcccggacagaagccgcagggctgcgctggctggaaaaaggaacgcgagta

SEQ ID NO: 15493 - DNA, 2300 bp, Homo sapien
aactccagtagaccctgaggagcagcggctcatgaatcttcttaaacttctgtcatcagcggctgggccagctgaaggtgaccatggcacacgagggagagagaagcccgcgagaggcggagaaatgtggggtcgtccaggagggtcgacaaggcaaagaacctgaagacgacccaaaagggtacctaggtggggccctttcagggacttggggcatagggtagggcgcatgggacgaggtgggtgagcgcaagggacgagatgggtgtgcgcatgggacgaggtgggtgggagcatgagacgaggtgggtggggcggtgggtgaggtctccgcccccagacgggctggcgaggaagcagggaagaagtaacgttgggctggtgaggcaacaggtggggcgcactggagctgcgggataataggtggaacaaactggggactacactcgtgggcgcacgtgcggaagagggactgaggaggttcttgcgtgctcccctcgagcaccgccgacagcttcacccgcacctcctgccttccgcaccgctgactcctaccgctccgcgcactgcgcgcccccagccctagtgcagccagctcccggccgggtccgcgcgagggccaggctgccaacctgcccgcgggcggctggtggttggggagggcgttgggaggaggagtcccgccgggtggacgcgcgcccttcagcggcggaggcggaggcggcagcggcgaggcctgagggtgcgtgctagggagtcctggcgcgtccttcttctgccggcgtccccctgcgcttgcagctgctccccgacgcccgggaggcccacccgctagccgcgatgggcgcgcagagcccaaaagggcgacccccaaacaaaactcacgcatataaatcctccagagacttcctcatccccccgccaacacacacacacccacacacacatacacacaatcaaatcaaatagaagcactgttaggaattttatattggctatgcaaagtgcttgaacgcactgactttggaggcaaatgccttgtccctagtcctgactagtccagaatttatttgctgtgacctatggcaaattgcttggtttctctaagcctccatttcctaaggcttatatctgaaaataactataagaggaaaggatgctattgtatccaactcagagggcagtcctgatacttacattgcgagaacatgttaagtgttccataaatggcagaaggggctgtggaagttcagtgattataggtagtttaatttgtcttagttttcctttgtgaaagcataaattacaccagagaaagtcacatatgtaaggaatactttatgcaaagctgttgtcctagggaagagagaccagaactcagtctaaactaactctgctgaaacaaagtggggcagggtttttaagctctaggatgagagtagaaaggtgctggagggctgtcggaagcatactgagttgtttgctgagtttacaagtgtttcctccgtgattaggccagctgtgtttgctaattggctctcagggaagttaggctcctaccctcccacagaaactgggagatagggggaccgtcttccttgatgattgcatttcaaaggaatggctcccaggtccttgacaaagatgattctggtttgtaaaactagtaagaggctattaaaaagagttacagatatctcaagacagagaaagaatttacagtgaaaagctttctaaagaaaatgctctgtattaatctgttttcacactgctgataaagacatacccaagactgggcaatttacaaaagaaagaggtttattggacttacagttccacgtggctgaggaggcctcacaatcacggcagaaggtgaaaggtatatctcacatagtggcagacaagaaagcttgtgcagggaaactccccatttgaaaaccatcagttcttatgagacttactcactatcatgagaagagcacgggaacaacccatccccatgattcagtcatcactcacagggtccctcccataacacgtgggaattatgggagctacaagatgagatttgggtgtggacacagagtcaaaccatatcatgctctaagaaaagaaagttttgggcctagagtcaggaaaaagccttttcaagtcaagctgagaactttaaggtggtcttggctacctcattttatgcaaagtaggcagaaaatttaaaagaaaagaaacatatttaagtacaattaagaaaattacagtgtttcagttaaagcagttcagtgctttttagaaaaggagct

SEQ ID NO: 15494 - DNA, 2300 bp, Homo sapien
acaataatcttaaactacccagtggtggggatggtatcttgttctcctttgtctctcaaacaccatggagcttagtgcattgtgcattgttttatataaagcacacggccctgcaaatctcaattaatacatgattaatttttttttttttttgagatggagttttgctcttgttgcccaggctggagtgcaatggcgcgatctcgtctcactgcaaccttcacctcccgggttcaagcgattgtcctgcctcagcctcccaagtagctgggattacaggtgcgtgccatcacgcctggctaattttttgtgtttttagtagagatggggtttaaccatgttgttgaggctggtctcaaactcctgacctcaggtgatccaactgccttggcttcccaaagtgctgggattactggcatgaaatacatgacgaatcttaatcaaaatggcagagcaggtgtttggctgatgtggtgatggggtaaaatcaatttgtgattcatacagccttccaacttcacaactatgccattcttaaaggatttttcatggaagggggcttcacatcaggtgcttactccttagtgcagctgatcaatacactcaatacatgtctgcaaactttaaaggaatttatgcagcagatccaagtcttaaaggctatttaaaaaaaaagcaaacaaacctagaaacaaagttcataaagcaaaaccatagcaaaacaaagattcaggcagaaagatgttcatgataacactggaaaacagtaagatcaaatgaaaacagaaagaatgattacataaatcatgccaataccttcaataaaatcctgttcctctgttacaaagaagggatagatatagatacactgtcatgagaggataatatactactaaggtagaaaaagtaaactgcaaaatattatacatgatataaacacattgtttggaaaaatatatatgtagagaaaagaagtacatgtacagaaaagaaaaatggtagaagatctgttgatagtatgtcctcaggaggtggaaaatgggggacttacacattttacaaattgtatgtctatagagtttgaattttatgtaatgtacctgtattgtttttctaattaactcttcaggtgggggaacaggtaaacctgtgaagaaggaatcatctgaaacactctcccactaacttttttctcttgctcttttagtgggtaatgttttggaatattaaccataagttttcaattcagtaccatccctcattcaatcttttattttttggtctcggggaagacagagcaatacttaatacctacaaagacaatggccagttctttcagttgaccctttccagggtaaaacaacggattggaaataatgcacaataaggaaatgccgaagcccggctcctcagcatcatcccatccctttcactattcccaaaatagatttgggggatcttatagcgcaagagtcctgactccaaaacagcctggccaggaataagtacacatcaacatcctggtcctaaatatgaaacaccccccacccttatccctcataacttggatgcaacccttgtaagggaaaaggagggttggaaggagcatgaacctaaaatgcctgaaaattattagggcaacctgccaaactgtagtcgcaaaagaacaaatagttattggaaattaagcaattacatggttcatagccctgaattattagaattaaatttatacttactatttaatttcagctccttttctaaaaagcactgaactgctttaactgaaacactgtaattttcttaattgtacttaaatatgtttcttttcttttaaattttctgcctactttgcataaaatgaggtagccaagaccaccttaaagttctcagcttgacttgaaaaggctttttcctgactctaggcccaaaactttcttttcttagagcatgatatggtttgactctgtgtccacacccaaatctcatcttgtagctcccataattcccacgtgttatgggagggaccctgtgagtgatgactgaatcatggggatgggttgttcccgtgctcttctcatgatagtgagtaagtctcataagaactgatggttttcaaatggggagtttccctgcacaagctttcttgtctgccactatgtgagatatacctttcaccttctgccgtgattgtgaggcctcctcagccacgtggaactgtaagtccaataaacctctttcttttgtaaattgcccagtcttgggtatgtctttatcagcagtgtgaaaacagattaata

SEQ ID NO: 15495 - DNA, 2300 bp, Homo sapien
ctggttccttaagtaacttcctgatcagcaccgcccagatcttcaacagtgaaatttcactgaattcaataagtgggcagtttgtgagtagtgtggcatgttcccttgattttatatcttgccctgtgttccctagtttaggtctcctcttctgctttatctactgctgtggtcacctctctactggtaatgtctcagatcttctgggattgtgcactggggctcttaaaaatacccttaaagttctctgttgcctgtggctccttgttcaattgtatggcaagactctatgtgtccaaaatgggagggcttgggagccaggaggactgacactgacgacacctgtgtactgctcacggtcggagttcggaggctgagaatgtctggacctctagggcattaaccagctttagttaaggaaaacacactcctgtttctttctttcctttttttggagaagaagtctcgcttttttgcctagactggagtgtagtggtgcgatcttggctcactgtaacctctgcctcctgggttcaagcgatactccttgcctcagcctccctagtagctgggtctaccagtgcccgccaccatgcctggttaatttttggtatttttagtagagacggggtttcaccatgttagccaggatggtctcaatctcctgacctcgtgatcctcccacctcggcctcccaaagtgctgggattacaggtgtgagctactgtgtctgacctactccttttttttgaagtgagtttctgtgaagctccttccagcatatcatttacgggtagttcagagttacatactcagtctcaaagttgaagtgaccaacaaggagaagtcagtccagcaggtaagaatcacagttgactttacctggatcaccagccacttccctagctggatgttgggaaaacacattcatttagatgcgtgaaaacgggctcagatttttaaaggattatgattttaggaatcaggtgcagtcagaatgtcagcttgagcatgtggtttgtacgtctactaacattttctgggaaagtatattggaaatgctcctcttctttctttctgtcagttgtattcagtcacttcagtggctaatttttccagtctctcacccaactacaggtcatgtatccctgactttgctttagtgaaattgactttttccttgattaatttagaattcaatgacctggcggggaagttatggcactggggatttttggtttccattgcttaacaggaagtcagagagagcttggaagctggactcgggagacctgcttttaagccctggctggaccatttattggctagatgaccttggacaggccctgtaggcttccttgacacccctaccccaactgccatctagatttgtggggcatttttagcctcctagccttttccaaggataatgtgggctttcaggcctgtaacctaggcaggcattatattattattattattattattattattattattattattattattattattttgaggtggagtctcgctctttcgcccaagctggagtacagtggcgcaatctctgcttaccaagcctctgggttcaagcgactctcctgcctcagcctcccgagtagctgggattacaagcacctgccaccatgcccagctaattttttatatttttagtagagatggggtttcactgtgttggccaggctggtcttgaactcctgacctctagtgatcctcccaccctggcctcccaaagtgctgggattacaggtgtgagccaccgtgcctggccaaggcaggcattatattaaatgccctggttgatgaagccatagaggctctgtaatttctgtctgaaatggtctcttcttgtattaggcaaatcaggcgagccctgttggcaggcttggatttcctgtctgtctcttggggacattgcttgagtggaagtcacccacctgactgctccgttccactttgctgctttataaatacatttacatatcatgtctattttagtactctaaagctgagggtcgggggggaccagcgaggaagttgtaggatgtatgtgttcaatcttctgtttgtaaccagaagctttaaaccagcagagacctcagacaaatcatatccctcctggggtgaccaggtgcagatcttccagggagccgtctaatggaatttcctggttaatggacacagagaaccactgctaagaacgatttccttttctctttcaatctgcagtactttttatgaagactggtcttttgtgatggatgaagagaggtcca

SEQ ID NO: 15496 - DNA, 2300 bp, Homo sapien
cttttcatgcctctcttactgtctcttactgtctgttgacctggtgcaagaaacatgctctggtgatggctgtgagggaggaatgaggatagacatagacactcctgtgtctcaaacatgcttctttattactctgttatgactctgtcttccctggggcaggaccccagcctgcctacatttgcagacagacacagtggcatgtggagacaacagtgtgtcccaatgactttcctttaccctccagctgtcggcagtactcagtggaagggtgatattatgacactgatactgctattttgaaacctggaggatggaaaggtgcaaaaatctatcaccagcaacagaaggtgcagactgtgttggtggcggtaattttgtccatcaaatgaatatgtgtgaaaacattccctcctttggccctacaggtcagaatggcggcagcggagcatcgtcattcttcaggattgccctactggccctacctcacagctgaaactttaaaaaacaggatgggccaccagccacctcctccaactcaacaacattctataactgataactccctgagcctcaagacacctcccgagtgtctgctcactccccttccaccctcagcggatgataatctcaagacacctcccgagtgtgtgctcactccccttccaccctcagcggatgataatctcaagacacctcccgagtgtgtgctcactccccttccaccctcagcggatgataatctcaagacacctcctgagtgtctgctcactccccttccaccctcagcggatgataatctcaagacacctcccgagtgtctactcactccccttccaccctcagctctaccctcagctccaccctcagcggatgataatctcaagacacgtgccgagtgtctgctccatccccttccaccctcagcggatgataatctcaagacaccttccgagcgtcagctcactccccttccaccctcagctccaccctcagcagatgataatatcaagacacctgccgagcgtctgcgggggccgcttccaccctcagcggatgataatctcaagacaccttccgagcgtcagctcactccccttccaccctcagctccaccctcagcagatgataatatcaagacacctgccgagcgtctgcgggggccgcttccaccctcagcggatgataatctcaagacaccttccgagcgtccgtactccccttccaccctcagctccaccctcagcagatgataatatcaagacacctgccgagcgtctgcgggggccgcttccaccctcagcggatgataatctcaagacaccttccgagcgtcatatcatgcccttccaccctcagcagatgataatatcaatacacctgccgagcgtcttcgggggccgcttccaccctcagcggatgataatctcaagacaccttccgagcgtcagctcactccccttccaccctcagctccaccctcaggcagatgataatatcaagacacctgccgagcgtctgcgggggccgcttccaccctcagcggatgataatctcaagacaccttccgagcgtcagctcactccccttccaccctcagctccaccctcagcagatgataatatcaagacacctgccttccaccctcagcggatgatctcaagacaccttccgagcgtcagctcactccccttccaccctcagctccaccctcagcagatgataatatcaagatacctgctgagcgtctgcggattccgcttccaccatcagccgatgataatctcaagacaccttccgagcgtcagctcactccccttccaccctcagctccaccctcagcagatgataatatcaagacacctgctgagcgtctgcgggggccgcttccaccctgagcggatgataatctcaagacaccttccgagcgtcagctcactccccttccaccctcagctccaccctcagcagatgataatatcaagacacctgccgagcgtctgcgggggccgcttccaccctcagcggatgataatctcaagacaccttccgagcgtcagctcactccccttccaccctcagctccaccctcagcagatgataatatcaagacacctgccgagcgtctgcgggggccgcttccaccctcagcagatgataatctcaagacaccttccgagcgtcagctcactccccttccaccctcagctccaccctcagcagatgataatatcaagacacctgccgagcgtctgcgggggccgcttccaccctcagcggatgataatctcaagacacct

SEQ ID NO: 15497 - DNA, 2300 bp, Homo sapien
tgtactgagaatggggaaggaaactatcatctcagaagtcagcaggcagtaagcaagaggaggaatcaatacagcaacagtttggatcagactgtacagtttttttgtttttgtttttgtttttctgagatggagtctcgctgtgtcacccaggctggagtgcaatgacgtgatcttggctcactgcaacctccgcctcccaggttcaagtgattcccctgcctcagcctcccgagtagctgggattacaggtgcctgccaccacgcctggctaattttttgtatttttagtagagaaggggtttcaccatattagccacaatggtctcaatctcctgacctcgtgatccatccgccccgccctcccagagtgctgggattacaggcgtcagccaccgtgaccggctcagactgtactcttctagccatctgaaatacgttttctaggtagagatagattgtgtaagggtacagttgtgaggataacagaaacatggcagattatttaaaatcatcctgaaagtggtgctttatctgatgaaagtgattgtaatccataggaaaatgtttcaacgtgcgcaagagttgcggcggcgagcagaggactaccacaaatgcaaagtaaggagcttcctccctgcagttgcaggatagttcagtgctgatgcagatgatgccacggcccttagactctctcaacattcaatttctcatgtgttggctttttcagatccccccttctgcaagaaaggctctttgcaactgggtaagtttgcttgttttccttgcttttggacatagtctgccaggtcaggacatggatacatttttctccctacagctctgtgctcaagccctgcagagggagatggcagagagaaaggctgcctacaagcatcacagtcccatccctgttggtaaccgtgttgcgcaaaaacaccttcatccccacccagtggggcccctgatctaatattctaagtgtcagaggttccgtatttgtaatagcagatgggccctgactgtaaactagtgaagagtgaatgtaacttattacccacagggacaattccaaatgaaggccttaaatgatgctcagctaagctggttcttgtgtggcctctgtaccttcaaaagctgccgagtcctatgattacacgtgatgggacttgtacacttgaagtgaaacacagttttaaaacttgctttgtttagaattcccacctcatttttccatggacaaaagtattctttatgtcctagtgcacttacaatttggtattacctgggagtgaaaagaaatattacagccatgcctaagtgacttcttgaggtgagattgttctgtcagaaaaccctctcccagttcccctgcagctcttcaggaatccacatctctccagagctctttgttctcatgggtggcacctccagagtgaagaagatcctttgtcaagaagggaaacagaggggaaatgagagggtcctgcaggcagagctggaatcaacttccactctgcctcttgcaagctgtgtgaccctgggcacaatttctccttcctctggaaacctctgttttcttagatttggagcagggtggtcacactgaccttgcagagttctgagaatcagagacagaacataaaaggcctggaaaacattctccaaaaagaagctgcaacatgtgtggacagtgggcttttcatgcctctcttactgtctcttactgtctgttgacctggtgcaagaaacatgctctggtgatggctgtgagggaggaatgaggatagacatagacactcctgtgtctcaaacatgcttctttattactctgttatgactctgtcttccctggggcaggaccccagcctgcctacatttgcagacagacacagtggcatgtggagacaacagtgtgtcccaatgactttcctttaccctccagctgtcggcagtactcagtggaagggtgatattatgacactgatactgctattttgaaacctggaggatggaaaggtgcaaaaatctatcaccagcaacagaaggtgcagactgtgttggtggcggtaattttgtccatcaaatgaatatgtgtgaaaacattccctcctttggccctacaggtcagaatggcggcagcggagcatcgtcattcttcaggattgccctactggccctacctcacagctgaaactttaaaaaacaggatgggccaccagccacctcctccaactcaacaacattctataactgataactccctgagcctcaagacacctcccgagtgtctgctcact

SEQ ID NO: 15498 - DNA, 2300 bp, Homo sapien
cttagaatattagatcaggggccccactgggtggggatgaaggtgtttttgcgcaacacggttaccaacagggatgggactgtgatgcttgtaggcagcctttctctctgccatctccctctgcagggcttgagcacagagctgtagggagaaaaatgtatccatgtcctgacctggcagactatgtccaaaagcaaggaaaacaagcaaacttacccagttgcaaagagcctttcttgcagaaggggggatctgaaaaagccaacacatgagaaattgaatgttgagagagtctaagggccgtggcatcatctgcatcagcactgaactatcctgcaactgcagggaggaagctccttactttgcatttgtggtagtcctctgctcgccgccgcaactcttgcgcacgttgaaacattttcctatggattacaatcactttcatcagataaagcaccactttcaggatgattttaaataatctgccatgtttctgttatcctcacaactgtacccttacacaatctatctctacctagaaaacgtatttcagatggctagaagagtacagtctgagccggtcacggtggctgacgcctgtaatcccagcactctgggagggcggggcggatggatcacgaggtcaggagattgagaccattgtggctaatatggtgaaaccccttctctactaaaaatacaaaaaattagccaggcgtggtggcaggcacctgtaatcccagctactcgggaggctgaggcaggggaatcacttgaacctgggaggcggaggttgcagtgagccaagatcacgtcattgcactccagcctgggtgacacagcgagactccatctcagaaaaacaaaaacaaaaacaaaaaaactgtacagtctgatccaaactgttgctgtattgattcctcctcttgcttactgcctgctgacttctgagatgatagtttccttccccattctcagtacatccctaattcatccttcattgagcatcttttatcataaagctgtattctctttgtattaatatccttaccgtgtttcacagggcagaaacagctgggcttataaacaggcatagtccttttgaaggatgtggttgatcctacaacaacacactttcctaaggatgacaacaactcaccccacccctagaatggctggtatgaaccgagtttccacacagtctagctggcaatggggtcaggagacgttttgctacttcacatcttttggtcactggtaaatattaaggtactttgttttctgttttgtgaactctctctcgctctctctcacgatatgtcttctgaccgtttgtttctatttctgcatttactgggtctaaatactgtacaaaggttaaaaacaacactccaatgggcgtttcccaagagggtggggtacagtttctgaactcacttgtaggtgtgtatttctttcatatccaatttcccattttcctctgcctctgatacctgcctctccttttctgcatgctcacattctttcacgcttagtttcctcagattagaagggagagaaatgcacacacatgatccaccagcccgtgtgggattccctctgcccttctggcatctgaaggctgtgattcaaagatcccccctgcaaccttcccacaaatgaaccaactgattctcacaaccgaagggagaattgacacctcccattgagggacaaaaaaaagtcacactctggcctgctggcaagtcacctgtcatttccagctcatcttcatagttccatagttagtcctattctttagtaaatataaagactattaaaagcttctatgaggtgcactatgtgtgtctctggggtcagtcttgtgcttgacacagcgaaagctcattttagttcagtgtgaaaaaccagacctcaccaattcatcacaactaactccatcggaagcagaggattgctcctcatctgactcctcctgtgtgagacctgattctcagtcagaggctgatgccggaactgagaccatcagccatagagagatccttccagaataaccccgcagttcactactgcactttgccatgattcaggactggaactcttgtcatcgactttaaagatcctggttgagagaaaaggcaatctgaatgctgggcgcatctattgaattagaaatgatcggaatggctcctaagtcagggtgttatgtcctgaaaataggtgacaacggcaaaccatccaccctggtgttgactgactttaacaaggttcagttcacagagattgagggcagaaaaagg

SEQ ID NO: 15499 - DNA, 2300 bp, Homo sapien
caaggtgccagctctggaacgaaggatgcccttgggaggtgatgacactcaggtacacgggtgctcagcagattgcttcctcctatcctcagacggtctttgcatgcatgcagccattggcactcccattgtgtggaaggaaaccagcccagggtcacacagctggtcagcagcaacatagctggtctcaaatctaaggtgcctgaccatgcctccatgagggaccgcctccaagggaggttgatcctggctttggggagcctttcctgggctgcacgaataacctccattgttcgagaccccaaactctgctcacatcttcctttccctatctctgcttgggctatgatcacggtgactctagcagcccttcatggacattatagtactctctgccattcacttttgctctaatctgacttcaacccccacttacttggtctctccttttacaaccaccacaaccgaaatctagggctgcttttttttttttttttttttttgagacagagtctcattccattctgtcacccaggctggagtgcaatggtacgatctcggctcactgcaacctccgcctcccgggtccaagggattgtcctgcctcagcctcctgagtagctgggattacaggcgtgtgccaccatgcctggctaatttttgtatttttagtagagacggggtttcaccatgttggtcaggctggtctcgaactcctaacctcgtgatccgcctgcctcagcctcccaaagtgctgggattacaggcgtgagccaccatgcccagccaaatctagggcaggaacatggctgcagcatataaaaagaattgaattccatacttttgttaaccctgttttttgtttgtttgtagttgttgctgtttttgagacagagtctcgctctgtcgcctaggctggagtgcagtggtgcaatctcggctcactgcagactctgcctcccgggttcaaactattctcctgcctcagcctcccaagtaggtgggactacaggcgcccaccaccacacccggctaatttttgtattttattagagacagggtttcaccatattggccaggctggtctggaactcctgaccttgtgatccgcccacctcggcctcccaaagtgctgggattacaggcgtgagccaccacacccagcccctgttttgtttttgttttgcttgcttcttagggttgtttttctatttatggtaaaggcattggctttccatttgtagcatcaatagaatatttcctgtttacaataaccttatgtcatagtaaatggtaaagggatttaaagcagtggttttcagctgccagaggcctgagagagtttgggcatactctgtgtgatcgggcagaaggcctgtgggaagtttagcagaggacagggccaggaaaggtgatggacagtgggggtctgtcctggtcaccaggcccctgggtcctgcccacctgcttggagctccccacccatcacacatgatgctgccaagccctctgggtattgtgggcaaataccttaggagagaagctgatgaactttgtttcttgaaatgcacagattccttggacgtccctgagagctcagtcatgaaagtcaacttggttttctccccctcatttgggttcagaatttaaagtccacacacacaggcagtaagatgatatagataaggacgtcatcactcggtttcggatgttaaaatgtctaggtgggttagcggtgatttgagatcacacaaccttgtgccacaaagaggaattcccaggccagagggagacattttattgccatgttatgatctcattattgagttgaaaggcaatcttgtttcattttggattctttcttatgtttatgtcttataagggcactttgaatttccaagcaaataataattttgaattagcttttaatcattgacttctagcacagttatatgatcagaaacatgctgtgtgatttgattgctctcaaatatattgagatttgctggaacaaaataagtcaggttaatttttgtaaatgtaccaggcatgcttaaaatgaatgtatctacatttgttcctgagatacaggttgatggacggatggctacatggatgtgatggagatggtttactatcgggaccttccgcaccctgctgatgttttgttgcttaggatatgaatggctgagcggaggctgtaaaacctggcactctgcttgggtatgaggttcttcctgccatcctgccatcatttgttttttatgttttgtcgccataagtgaccttgaggaaccctg

SEQ ID NO: 15500 - DNA, 2300 bp, Homo sapien
aaaaaaatcccaaagttagttttaagccaaaaagacttgatttaggattttgacactggagaaacccatcaaagatgtcaagtttgaaaacacttgatcaaaacagaatcacaggtcactattaaaagagtattaatttaaccagagacttccaaagcaatacagaaacttacatggatataaaaaccctaacccttttaaaggtcagatttgctaagtgatcaaaaggggtacttgaattgaatcgacacaggaagagtgtgtacagggttatgagtgtaggcaggtggttactttggtcatatctccatttgccacctgattacacatgagaatggcatctttactcaccagaaagccagtattataggaggtgtaggaggcattcttggacttgagacaagaacattgttgtgtagaaatttcattgactgtgttaaaattattctccatgggctggagaacacataacatggcctttagaatgagacgggcattgattggatgcaaggtctccacacttactagctgtgtgacattggacagagtgcttcatcattccgagactcagtttttaaaggaaaaacaactaactaccttgcaagcttgctagcaggtttaagtgtaataatgtgtgggaatgactgcaccgtgactaacatgcagtgacagcttaattaatgttaacccttatcattatcatataagaatgtgagttacataagagaggagtcctgtcagttcgttctctgctgtgtccccaagaccatgaatcatggctggcatgtagtaggcatttaataatatatgttcaacaagtatttggcagtcttggagggcagaaaaggaggtggggaagatttttaaataacattttttaaaaagtcacattgtcctacaataccgatttttcttgcatatttaggaaattgagggtttttttctaaaacatgcggacatatgggaaataggatgcaacatttgcactaatgtttcagacacagttagaggtttccaagagattttgcgctggggaggctgcttgctacaagctcccaaagctctgggaggacatagtattcattcctccctcagcagaagcggtgaggcaagaagctctggggagcacccagcgttggacttttagcatagtgtgtcaggtcttcatagtttgggcccagggcacagagaagtcacagctctccggcatcctgtgacctttaccctctttgccaagggaaaatgtggcccaccaaagcaagaaacttgagggcatgggtcaccccagccctggcatctgcccagagcccgagaaggaaggaacaatgatcctccagctacctcacggggctggcacaggtgaccactgccctggcatcacccagctgtgtccggcagcctgaaccccatctgtggggatgcgaggaggaaaatacaaaagtccttaggtgaacactgagaaggcagatgcagcagaaacctccaggccagaactacccagtcttggacctatggtggagatagagcatagctggcgatcatgtgtacttacactctaaggtcacctggttgcactatggcctcatctgtggctctgaaaatgaagatttggaaggagatcatcacagctaatgtttaacaagcccctcctgtgtgccaaatcattcacccctcaccacaaccgaatgagctaaggattctcattatatatagtttatggagagggaagtgcagacataaagaggtgaattatcttacccagatcacacagctgataagtggtggaggcagaatagaatctaaacagtgtggctccggagcccacatgcattgattcgacaagtgtttattgagcacctgccgcggacaaggccttgtgtgattaaatagggttataattagtaatataaaaatgagaaatcactaatgctttttagacttaacattttgtttttttgtaggtttcaggcacagaactgtatatccaataatagtgaaatggatcccactaattatgacagaaatgatgatacatttaaatgacttggatgttttataggtatgatctcgtgaaatcttgagagaaactgaatgacgaatgaaactattgttcctgtttcacacagaagaaaactgaggttaaaaggggtaaagtaattttgcatggcatgaagtagaaattcaaagtacaggaatttgaacttggttctgtccttttctgaagcccttgaccactatagactcaaacatcaccttgtttttccactcattcaacacttttttttttaaattatctaata

SEQ ID NO: 15501 - DNA, 2300 bp, Homo sapien
tttggccagctccttcactgcaacctgttttatcagcaaggtctttatgactggtattttgtgctgaccttctatgtcatcctgtgacttagaatgccttaaccatcagggaatgcagcccagtagtttcagcctcatttttcccggctcctatttaagatggagttgctctggttcacacacctctgacatgatcattgcccactgcggcttccacctcccgggttcaagagatcctcctgcctcaccctcccaaggtgctgggactacaggtgtgtgccaccagctcagctaatttttgtattttttgtagagatggtgtttttccatgttgcccaggctggtctcaaactcctgggctcaagcaatccttctgtctcagcctcccaaagtactgggattacaggcatgtcccaccatgcccagactaatatttacttttaatcagactaagatagggttactacttgagttgctatggctccagctgaaagaaagcccgtgcagtcatatcacgcgtaaacatttgctttatgctaaaaatatggtggacctggcattacagctattacaaatctcctaagatgtctcgggtagtgtattagttacttttcatactgctatgaagaaatactggaaactgggtaatttataaagaaaaagaggtttaatgtactcacagttccacaaggctggagaggcctcagaatcatggtggaaggcaaagaaggagcaaaaaggtatgtcttccatggcagcaggcaagagagcacgtgcagggaaactgccctttataaaaccatcagatttagtgagatgtattcactatcacgagaacagtatgggaaaaacctgcccccatgattcgattacctcctaccgggtccctcccacgacacatggggattatgggaactacaattcaagatgaaatttgggtggggacgcagccaaaccatatcgggtagcaacaacctagggtcagttttgcaggtggtaaagccatttaccaagatagttgtaggtaaagaagggcagatttattagagaaattgtgaaaatatgttgcagtgggcagctcagcagagaaggggctacctgcaaagaggcaagggctggaggaaagttttatagggtcctgctgaagggtgctacgtgtggaatgaggtcattgtgcccgcaggttgtttgtgattagctgtctctaacaattgttcatacaataattgttcattattgttctcaacttggggctctccccaacctggggacccttccttattgttgcttacttatcaggtctccacataaaggtgtggaaacttcattcattcatatcttcaacacaaattgtaggtagcctgttttttaaaacatttattcaacaaatatttagtccaagccactattacttactaccttctctactattgtatggacttttaactatctctgacactattcactattcttccacattctctattatttatacctatggtaaaatttgccagtttgaccatacaactaatactcacagggaatatatagagtctagaagaaaatatacaggtccttaaaggctgccctgccaacaaaaccataacgcaggaacaaacatcacaactatgccaaataatcaatcctacaatgtccaaaattttactttaaaactggaattaccagacttcctttctgcattaaccagtttaactagacagtaacgaaatattcctactttatgctgtgatagtttgtttgtttgtttgtttgtttatttatttatttatttaagacagagtttcgctcttgttgcccaggctggagtgcagtggcacgatctcagctcaccacaacctccgcctcccaggttcaagcgattctcctgcctcagcctcccgagtagctgggattacaggcatgtaccaccacgcccgggtaattttgtatttttagtagagacggggggtttctccatgttggtcaggctggtctagaactccagacctcaggtgatacccctgcctcagcctcccaatgtgctgggattacagctgtgaagccaccgcgcccggctgctgtgatagttgagatgtaaaccaaaaataaaattctaagccacccagtccgactgaatggacccttcctgttgagcaaggacattccaaagtaaactgaaaagaccagcttaggccatgatgggaaggggaggtgtcaacatgcctcattctaccttcctccctctggaatccagacacaactgaccagcattaacattaaaacagagatcttaagctggg

SEQ ID NO: 15502 - DNA, 2300 bp, Homo sapien
ggattacaggcacactccactacacccagctaatttttttgtattatttgtagacatggggtttcgccatgttgcccaggctagtctggaattcctgaggtcaagctgtctgcccatctcagcctcccaaagtgctgggattgcaggagtgcaccaccacacctggcctgaaacccagattttatttatttatttattcattttttgagatggagtcttgctctattgcctaagcttgagtgcagtggcgcgatcttggctcactgcaacctccacctccctggttcaagcgattctcctgcctcagcctcccaaagtgctgggattacaggcatgcaacaccacacccagcctgaaacccagatttttaatatgaaatcaaagtcttcagaccttgtaggtgtcataaaaagcacgctgaggaccactagtttgcaactgccaatctaaaatatcatagacattatatcacttcaaccacgaaaaaaaaagtatgtgaggcagaaaatggaagcaaccatgcctaatttattgttgaatactttttccgtataccaagagcttcctttgcactagcatctgaaactatatccagaatgacactggttttcataaaagtgttgatcctcacacctctttatagtcttgcacctagcacagtggagtgaaacactttaaatagcacttgttccttgagtatatatggaaaaaagtgaagtattgataagtgctcagctaatatgagcagcatctcaggagtctccaattcttgaattaccagggagtatttttaccattttcccccagtgaaaggcctattttgagagacttaccctccaaaatgaatgtattaagtcatgttccttttttttttttttttttttttttgagacagggccttgctctgttgcccaggctggagtgcagtagcatgatagttacaggaaaggggtcccaatctagaccccaagagagggttcttggatcttgtgcaagaaagaattcagggtgatgccacagtgtgaagtgaaagcaagtttattaagaaagtaaaggaggaggggcacggtggctcactcctgtaatcgcagcactttgggaggccgagacaggtggatcacgaggtcaggagatcaagaccatcctggttaacacggtgaaacctcatctctactaaaaatacaaaaaaattagccaagtgtggtggcgggtgcctgtagtcccacctactctggaggctgaggcaggagaatgggatgaacccgggaggcgaagcttgcagtaagccgagatcgcgccactgcactccagcctgggtgacagagggagactccatctcaaaaaaaaaagagagaaagtaaaggaataaaagaatggctaccccatagacggagcagccgtgagggctgctggttgcccatttttatggttatttgttgatgatatgctaaacaaggagtggatttttcatgcctcctctttttagaccatatagggtaacttcttgatgttgccgtggcatttgtaaactgtcatggtgctggtaggagtgtagcagggaggatgatgggaggtcagtcttgtctctattttggttttggtgggttttggccagctccttcactgcaacctgttttatcagcaaggtctttatgactggtattttgtgctgaccttctatgtcatcctgtgacttagaatgccttaaccatcagggaatgcagcccagtagtttcagcctcatttttcccggctcctatttaagatggagttgctctggttcacacacctctgacatgatcattgcccactgcggcttccacctcccgggttcaagagatcctcctgcctcaccctcccaaggtgctgggactacaggtgtgtgccaccagctcagctaatttttgtattttttgtagagatggtgtttttccatgttgcccaggctggtctcaaactcctgggctcaagcaatccttctgtctcagcctcccaaagtactgggattacaggcatgtcccaccatgcccagactaatatttacttttaatcagactaagatagggttactacttgagttgctatggctccagctgaaagaaagcccgtgcagtcatatcacgcgtaaacatttgctttatgctaaaaatatggtggacctggcattacagctattacaaatctcctaagatgtctcgggtagtgtattagttacttttcatactgctatgaagaaatactggaaactgggtaatttataaagaaaaagaggtttaatgtactcacagttccacaaggct

SEQ ID NO: 15503 - DNA, 2300 bp, Homo sapien
catggcagattctaaagcacagcagtccccaacatttttggcaccagggaccggctttgtggaagacaatttttccacaggcggcaagggatggggcgcaggatggtaatggtcttgggatgaaactgttccaccacaaatcatcaggaattagattctcataaggaatatgcaacctggatccctcgtgtgtgcaattcacaacagggttcatgctcctgtaagaatctaatgatgctgctgatctgacaggaggcagagctcaggcagcaatgcaagcaatggggagcagccagaaatacagacgaagcttcaattgttacccaccattcacctcctgctctgtggcccagttcctaacaggccacagaccagtacatgtccatggcccaggggtcaggcacccctgctgtggcacattgcttaatagaggactgtagcagccatgtgccctgacctttccttttttttttttttttttttttttttgagatgccagaaacccagaatttttttttttttttttttttttttttttttttaagacaaggtctggctctgttgcccaggttggagtgtaggagggcgatctcagctcactgtaacatcaacctcccaggctcaagcaatcctctcacttcagcctcccacgttgctgggattacaggcacactccactacacccagctaatttttttgtattatttgtagacatggggtttcgccatgttgcccaggctagtctggaattcctgaggtcaagctgtctgcccatctcagcctcccaaagtgctgggattgcaggagtgcaccaccacacctggcctgaaacccagattttatttatttatttattcattttttgagatggagtcttgctctattgcctaagcttgagtgcagtggcgcgatcttggctcactgcaacctccacctccctggttcaagcgattctcctgcctcagcctcccaaagtgctgggattacaggcatgcaacaccacacccagcctgaaacccagatttttaatatgaaatcaaagtcttcagaccttgtaggtgtcataaaaagcacgctgaggaccactagtttgcaactgccaatctaaaatatcatagacattatatcacttcaaccacgaaaaaaaaagtatgtgaggcagaaaatggaagcaaccatgcctaatttattgttgaatactttttccgtataccaagagcttcctttgcactagcatctgaaactatatccagaatgacactggttttcataaaagtgttgatcctcacacctctttatagtcttgcacctagcacagtggagtgaaacactttaaatagcacttgttccttgagtatatatggaaaaaagtgaagtattgataagtgctcagctaatatgagcagcatctcaggagtctccaattcttgaattaccagggagtatttttaccattttcccccagtgaaaggcctattttgagagacttaccctccaaaatgaatgtattaagtcatgttccttttttttttttttttttttttttgagacagggccttgctctgttgcccaggctggagtgcagtagcatgatagttacaggaaaggggtcccaatctagaccccaagagagggttcttggatcttgtgcaagaaagaattcagggtgatgccacagtgtgaagtgaaagcaagtttattaagaaagtaaaggaggaggggcacggtggctcactcctgtaatcgcagcactttgggaggccgagacaggtggatcacgaggtcaggagatcaagaccatcctggttaacacggtgaaacctcatctctactaaaaatacaaaaaaattagccaagtgtggtggcgggtgcctgtagtcccacctactctggaggctgaggcaggagaatgggatgaacccgggaggcgaagcttgcagtaagccgagatcgcgccactgcactccagcctgggtgacagagggagactccatctcaaaaaaaaaagagagaaagtaaaggaataaaagaatggctaccccatagacggagcagccgtgagggctgctggttgcccatttttatggttatttgttgatgatatgctaaacaaggagtggatttttcatgcctcctctttttagaccatatagggtaacttcttgatgttgccgtggcatttgtaaactgtcatggtgctggtaggagtgtagcagggaggatgatgggaggtcagtcttgtctctattttggttttggtgggttttggccagctccttcactgcaacctgttttatcag

SEQ ID NO: 15504 - DNA, 2300 bp, Homo sapien
ccttaaattcttggtctcaagtaatcctcctgccttgccctcccaaagtgctgggattacaggtgtgagcaatcatgcctggcctcctttaattttttttttttttttttttttttttttttgagacggagtctcgctcttttgcccaggctggagtgcagtggcacaattgtatttttagtagagacggggtttcaccatgttagccaggatggtctcgatctcctgacctcgtgatctgcctgccttggcctcccaaagtgctgggattacaggcgtgagccaccgcgcccggccggcctcctttaatttcttaaccataaatatcctccccccacttttattatggacgttctgaagcacataaaaatagggagcatagtataataaatttgtacatatttaacactcagcttctataattagaaacaaatggcccatctggtttcatctaggcctctttgctatcctttcatctccaactggattattttaaagcaaattctagatgacattctgctgagcatttctgccagaattacacctctctttgctaatgtgaaaaaatgcccatgataactgtaaaatacgtgtgtcctatttaggtgtctaaacactttaatgtcacagtattaaggccttaaaatatagcttagatatatttttctaaattaaaagacttcattttttagatatacagaaaattgagcagaaaacagtgagttcccatataccttcttcatcccaacagtttccccctcattaacatattgtgttagtgtggtacatttattacaaaggagtgaatattgatatattattattaactaattttatagtttactttgtgttatgtattctatggactttaacatgtgtaatgacatgtttcccctattaccagtatcatacaggatagtttcacttccctaaaaatcttttatgttctacccactccttcctcgttccctctccccactcctccctccccccatcttaagcccatggcaacccctgatctttttactgtctccatcgttttgccttttccagaatgccatgtagttggagtcatatagtatgtagccttttcagttggcttctttcacttaccagtgtgcctttaaggtttctccatgtctttttgtaatttgagaagctcattttttaaaaattttattcttttagattgttgaacagataaatacgaaactgccatcatcatttgtagaaaaactgtttataccatcatctaaactactattcttgcgttatcataaagaaaaagaggtaagtaatacactgataatgaattttgacaacttgagtcactgaagagttggacctaatgttgcttaccccaggctatataagtgaaattgagtgaaatgtgaaatgtttgatttagaatatagtgattgtatttgttcttttaaatttatatttcttgataatcatactgaatactttcatgaatggtgtgccagatactcttttcagactatgcatcttttgctgttattaaatttattaaattttcataagggtaaaacaagttgacacatttataaagttataaattaagaagtactgtatatttggtaaacaaaaatgactggcttttcaaccaccccctagtcaaatccaccacagactttcctggtagatttaagaaacccagtcttaaactgctgtttgcatatgtcttttgatgttgattattaaaaaaaaaaaacaaaaacggccattttggaaatttcctattgacagttttcatttatagtactctttatttgtgataaaacttaatagatttgaaatagcatactgatctgtgtcagttttctgattggtttttaaaaaattaaaatattaaatgctacagacagtgaattgatcgatcttaaatttatttgtatcatcagcactaatacagatagtgatttattttccatataattttagaagatttattttccatttatcacttccttgaattttttgtttttcaggttgttgctgtagcccgtgctgtttatcaagcagtgctcagcttgaagaatattcctgttttggagactgcctataagttaatattgggagaaatgacttgtgccctaaacaacctcctgcacagtctgcagcttcctgagtcctgttctgaaataaaacatgaggcttttaagaatcatgtgttcaatgtagacaatgcaaaatttgtagttaaatttgacctcaattgactacaaaatttgtagttaaatttgactacaattggaaatgccaaaaactcactaata

SEQ ID NO: 15505 - DNA, 2300 bp, Homo sapien
tagggtatgctgcttgaaaaccagatactttttaaaagaagcctcttattttttttaatttggattttttggtgttttttctcccccctaccctttcacaatttcttacgcgattccaagggtggttgcagagtttggagccattttgggtagctgatcttgcattttctacgcctctacttggtcagtttctagaagacatggaagcatatgctgaggtgagtatatagaaagctgtttcttaaaattttggttaagaaaaaatcttaaattgtgctagatttattttaaaatggctcagacctcctgacatttaagcagaaattacaagcccattgcaatattttgaaaaattttttctttttgagacggagtctcgctctgtcactcaggctggagtgcaatggcacgatctcagctcactgcaacctccacctcctgggttcaaatgattctcctgcctcagcctcccgagtagctggaattacaggtgcccgccactacgcccagctaatttttgtatttttagtagagacggggtttcaccatgttggccaggctggtctcaaactcctgaccactggtgatccagccgcgtcggcctcccaaagtgctgggattataggcatgagcccccgtgcccagtcagtattttaaacatttatttcagatgtgtttaagttaccaggagaattactggagagactaaaagaaacgttgcaagcttcgtatttcgcaaagctttacatactctcggtagctggtatttttctaaagacatattttgttatttatttttattttttgttcccagtcttcagagtcttaaagcaaattgatgttgtgttataaaaaaacacaaaacaccaaaagctcctaaagattttcctcttacatatgtacaggagatcttgaatcgtactttggaggacaagccttggcttcagccagcttttgtggctgtacgaatatagcataggagctttaagagcgctgctgaagcctctgttactggtacttggcttttctggccccactgtcatggcttaactctgtgccatctcttatctgaatctctttgtgtttctcccctattcagatcaaccagtcaaggctcccataaagattttggcctcatcttgtttttttcatctttgctgcttgtagtcaacaggaattcagtacctttagctgtactgatgtgtttactctttcctagaaaagcaaggaaatgttttgcttctgcgttgttttttctttgcccccacacctagaatgtcttttttcacagcccacgtttaaagctgatctacctctcataagccacacattctagtttgtagagatgcttccccttgttatccttaagatctcattctcttctgttattttggtgcttaattttaggtagatgtatacattggttctggtatcctagtttttgcgaatcttgtccttttcatatatcgtacttcttcagttacacatctgtagaccaggtcttgtaatctccctttgctcttcatgtgcatgctcttggtttggaggacttactgttgagctgagtggctcaaagaatacctagaatgagatttttagccaaaaactaattcaggagtggcaaaagcttccgtcttcatttatacctacatataactagagcatatgtgctagaatttatttttccccaacagctttctgagttgatttaagagattatttccttaatttgttgtctattgggtttaatgttggctttttgaaataattaggtaaaacccatttttatattcagagtcatgaatattctcatgggccacagttctctttctaaaagcctaaaaatctattctaaaatgaattgattgaaatattttagagttttttttttttttgttttgtttttttaaacaatgtactacttattaagaatgctgtgaattcacatctaggacctcagccatgtggcctctggggaatcagtggatgaagacgtccctcctccatcagtgtcattaccaaagctggctgcgcttctccgggtatttagtactgtggtgaggagcactggggaaagcctcagcccaattcgggccctccaattactgaggcatacgtaacagatgtaagtgcttttgggcatttgaagtgtcattcaaaaataaaattgttttacattgtaaatgcttctctttaccaggtgaactgttattaatccttcatttgtttagcatgtatgtatgtatgtatatatgtatatattgtctgactgctttcttaaacaaccagaaaagcaggga

SEQ ID NO: 15506 - DNA, 2300 bp, Homo sapien
gagtgcagtggcgtgatctcagctcactgcagcctcaaccttccccagctcaggtgatccttctacctcagcctccccagcagctgggactacaggtgcaccaccaccacgctgggctagtttttgtattttttgtagagacggggtctccctatgttgcccaggctggtcttgaactcctgggctcaagagattttcccaccttggtctcccaaagggctggcattacaggcgtgagccaccgcgcccagcctccaagtcatctttcacacgcagagcacgcctgagagcagcaacaagactaacgttggggccaaagctaagaagtggggcggagcctccctggtggccggtcgtcagcccagtgcctgaaatgcatgcaaagtctatttttattttgcgtagttgaacctaagcaaaaaatctggccctataatctctaaccttgctcctaactggcacctaccctattgcacaagaagctatctaggggaggactcagtgagcactcggtgagtttgtccagccatggtggtactgtctccttccctctgcaggcacagcgggaagaatagggtggatggagggctctctgcaccttccacagcccgcagcgtggacggcagattacaagttagtatctgtgcgacctccgcactcccctgccggtggctgcctgggctgctgagatttcgcttggttttatcactgcagaggaatgcctgccataccggggggcgagcaaggtccagaatgacaagccgtggcattcctcagccgcctcctccccggggtggggcctggacattcctggctgcagctagaggtcccagcacgacagggattctgaccccccctccaccacggctattgttcagaattctgtggattccagaggcatctgcccagcagactgtcttgctgtgaacacccagctctgcaaccggtgtttgcgtgtttgccctgggaggctgaacgctcacccagaacaaaggcctccccacatgcctgctgtgagcttccaagtactcgttaggacacacgccaaggaaccccgggttggggggataccgaggagcttcctccctgacccacacacaccctttgaacaggtctttggctgctcaccagtctggtcaatctcggggcagtatttatattccttcccgtttccaggcctaggagccttggcatcctgctctcgcctctaactgaaattacctctcaaccctttttagctaagatgcctctcgcattccccaggaataacaagctttaaagccccttcacactgaagcctgcctttgaatttcccagctagatttgggggtgggggtcttatggctcccggtgaacccccggttctgttgattaaattgagctcaggcagagtgctggcttcccaaagcctgtgttattactgcttctcaaagctacgggcaccggatcgccatctttggcaagattcttttgggatacaatgggaattactgggtggcctcggttcggttcttccctcgtctcagttcgcggctcaccagccacattgatgcagcccccaggctggaaggaggctgcaggagcttcccctcaggtcatcttctcatccctcccccgtgccccaggagctggttgtgggggcggttccatcccctcggcccatccgggacaggagcctaggttcccttcggggggtaccccaaaccccatccttggcctcaggccagccctggtgcactgcccgctcccaggcttgacgagaggctgcgggccagtgggtgaaggggctcgccctgactgccaggccccgcccaggcgcacccgggaggacgggctgggatgacgcgggcgccgggggggtaggtcgcgaggccggggtctccatggcgcaggagtacgggggccttcgaggaccacgcgggcctgggaatcgcctgccaggctaggccggacgacgcacgtgctccgagctgggtcgagggggcggggctgagggccgcggccgggccacgggtcggggaggagccgcggacggtgggcggggccagtgggccggggcctaaaaggcggcgcgggcggggttcctgacgcagctgcgggcggcgggcggcgagcggcgcgcacaatcctcgctcggctgcggctcccgggtgtcccaggcccggccggtaagcagagcatggcgggtgcgggcccgaagcggcgcgcgctagcggccccggtggccgaggagaaggaagaggcgcgggagaagatgatggccgccaagcgcgcggacggcgcggcgccggcaggcgagg

SEQ ID NO: 15507 - DNA, 2300 bp, Homo sapien
gccagctgctcagatataaaacaaaatctgctcctttgagctgttaggcttcgtggcagtcaactgaccccaaaatccttctgactacagcagccatctacttgcttgttcatctgataacattttgcagtctctcagctacagctatgtggtctcactctatagctggggcatacctttttgtctcctttgtcttcagaaaggaaatatgccattttatgcactcctgctgctttcacccccactttaaaaagatgaaggcttccttttgtgacagagttgctttgtctgttacactgatcctaagagacaggaaggagaggtgtcatagtaaataaacagttattggacttgctaccatagttcctttttgatgacttgggccaggaccactagaggtttgaactagatttagtaaggcttgggcttttcggggttttggcaggaagcagtcagggagtatattggaaagagagaacacaaaataccgaaccccacccaccctgtgcctttttgtttgttgttacagcctgttacattaggcaacaagatatccttgttagccaaaggtgccaagctgagattcttaaaagctaatgaaagagctgttgggccaggtgcggtggctcacgcctgtaatcccagcactttgggaggccgaggcaggcggatcacgaggtcaagagatggagaccatcctggccaacatggtgaaatcccgtctctacgaaaaacacaaaaattagctgggcatggtggcgcgcacccgtagtcccagctgctcgggaggctgaggcagaagaattgcttgaacccgggaggcggagtttgaagtgagccgagatcgagccactgcactccagcctggagacagagcgagactccactccgtttcaaaaaaaaaaaaaaaaaaaagctgttgggtaaggaatgattttgttccccatctgtggctcaccaccccactgtttcataaatgaaaatctctgatgtgcaacgctgaattaaccaaaaggcttacttcttttgttttgaacttagacacatttacattatttctggtgcagttaaattaaaagcactttccaaacaaacctaggaaagtattaaagttagggactcccacgaaatgttactccttaattgtggcttggataatagcaggaagaactgcagacaggaacacagtgtaactaacccttcagttctgaaatgttgctaggtctcctcgtgttataaatgatcaaataaatatccgggttaaacactgctcccagagctgagttcactcttaagagtgttgggtccaacttccctgtgctaattcaaggaaacaaggcagccaaggagtctaacttgaggtcttcattcttgggcagggccatcaatacatctaaaacattacttgtgggtaccccagctgcggtagcttccccaaaaggcagaattttcactcattctttatagaaacacgtagccagcaacttctcaggcttggggaacggggcaggcgggtcgtggtggtggggagagtagaggagggagtctggcaggtcggttctaaatgtaaactggaaactacgcatccgagcgggcaaccatcactggcaccattcgtctccgggaagaacctgtgtgtgtcaggatgcacgaaaggaatgactcccctctttgcgcccccggggttaactgcacgaccctgtcaaagtcccgccgtggagtgggatgagggtcgagaggtaaccctgtcaaagtcccgccgtggagtgggatgaggcgaggaaagactggaggtccttccagcaccaccttggaggggcagggaggctgcagttaccgccttcggaagtgatctcctcagccctcaaaaaaattaaaaccacctccgccatttactagaggccaaggcagggccgggacacgagaacgcgctccgggcggatgcgcgctccctttgtcccgcctcccagcggcccgctcattggacggagggagggcgccgggggagaaagcgacgcggccgctcgtaagtgctccggatggaaactggtgcagggggcagcggcgttccgcggccggaagggaagggggaggtgccgaggctgcgcgccggctgctcctccccacccccagcctttgccctgaagggggctggatgggcaaggcggccgcgatggctcgagctcgggcggtggcggcggtggccggaggcggcggtgcctcctcctcctcgccccggcgccggcggtgatccgagcgagcggccgcggcccccgatgagactgctggcgggctggctg

SEQ ID NO: 15508 - DNA, 2300 bp, Homo sapien
gggtaatcatgataagtgttataaataccaatagctaagagactcaaccataatcccccatcaatggagataaatcgctttttctcctatccaggaccttatttctatcaactgcttaaaaatgttaaaaatgacatttctaattcattgtctaccccattgttccatatgtgacattctggtaactgtacagtcaacggtacagtacctttgagttgtctctataagaatgaactagtgtaagcaaataatccataggaataaatgtggttttgcaatttaagtttacatacattcctaaccatatcatacaagtgatcaatgatactgatattgcacctaacaaactgcaatggctggaggctttcaaaaaaatttacagaaatttaggattcctttaacaatagaaaaaagcccaatatacatattactaaagactaaatgctacttttctaaattgctctatctccttcttagacaattctctaccctcattaaaacacatgaaatcaacctgggtgtaaattctctgaacacctggcataataaaaaagtaatgtaggaaaatgagaaatatatgaaaatgatgagacacaagatgatatagggaataattaatactctatggaaaagcaaaatgtattataaatgctagctatgacaagccaacactctggcagagttcaaaagcctcttttcaatgaatttaacattaactgcaaactatgttaaggtcatatacgaaatatctcacttaattctacagttaacctgtacacgtttaagtggcgcaagactgagctaatgaaaagcctacctacccggtcacagcgtaacgctcacgatgcataactaaaactccctcccgtcccgttctgttttaaaaacccttcctgtaaaacttgcataatcttcctcctcatcacacacaatctttctagcaggctgactaaatccaagtttaaaggagatctctgctaggtaggaggggaaggttccgtaggatgggagcgacaacctgtcaaacccattttttaagtgcttagggagaaatgtcaccccaatcagcctggagagttcaatggcttgcgatgtacagttacatttcttcacgaccctttgtacgttctgggattcaacgagacaacaagaggggctggcttttcgttttgtttctcggggtaatggatctggccgggtctcttcagtctcaggcctcggtgccaggcgggcgcccccagccacgctctggccccaaagttccccagtcccgctgccgggcgtccgcagtcaccgcccgggacccaggaacaatgcggggctccgggccgctcacgatcgggcccgggaggccatgccccgcctgcgctgcggaacaaaaggcgctcgcggggccgcggccgggtgcccggggctcgcggagtcgacgcccggcggggaaggcgcggggaaaactttccaaggggccgaggcggaggggcgagggccgggccgccccctcgcggagccgtcccgcacaatagccgggcccagcgcgggaaggccgggccgccacgcccccgccccggccccggccccagcccgtacctggtggttctccttcctgccgcccgcggccgccgccggcccacccgggccgctagtcatgttcacgtacagggagcgggtgagcgggctccgcagcgtccacatcctccgcgccagccacacggacgccaggctcaggcacagccagcccgccagcagtctcatcgggggccgcggccgctcgctcggatcaccgccggcgccggggcgaggaggaggaggcaccgccgcctccggccaccgccgccaccgcccgagctcgagccatcgcggccgccttgcccatccagcccccttcagggcaaaggctgggggtggggaggagcagccggcgcgcagcctcggcacctcccccttcccttccggccgcggaacgccgctgccccctgcaccagtttccatccggagcacttacgagcggccgcgtcgctttctcccccggcgccctccctccgtccaatgagcgggccgctgggaggcgggacaaagggagcgcgcatccgcccggagcgcgttctcgtgtcccggccctgccttggcctctagtaaatggcggaggtggttttaatttttttgagggctgaggagatcacttccgaaggcggtaactgcagcctccctgcccctccaaggtggtgctggaaggacctccagtctttcctcgcctcatcccactccacggcgggactttgacagggttacctctcgaccct

SEQ ID NO: 15509 - DNA, 2300 bp, Homo sapien
tagtcggtagcatcacgtttagtggtctctgaggtctttctccaaatttttagcatttctatgggggcagaagatttactgtaaacttggttaaactctcctatggccttaatgggaaaaggaagggggactttgttacatgaactccattatttgtattttttcctaaaactggtcttaccttgggcaccgtgttgcatgcatctttccagtcactgtatagcagcaaacattctgtaccttatgattgtttccagagagcagcagtacagaacaggtttccctgccacttcctggaccagtggtccccaaactgttttctagggtctgaggaggaagtgcctcaggaactgcttcaggctgcagagaaaggcctagaagtgggctggccacagctcctgggctcccaacctcattcgaacagcagcagctctcttaggatcttatgttatctgtgagttccacttcatttaaagaaagggttctgctgcttaaaggagggttgagaatccctgtcctagataaactagaatttcagagctagaaaacaagtcctaaatagggattgcgctttatttcccagagtgatgcttccatgagacttggctggacctatagttgcttttctgagggttctcttcaatctccagttaaactcccctcagtctcttttttcaaaggcatcactatggttttgagtgttttctaggacctttagaaataataggacccagacagttgtaaccatataaactgacataagtacgaatctactttaatgcatattaaccgacatcacaaggaccactcttttccctcttttctctagtgtctcttaaaaatctgttatactaaagctcttttttcctgatccatggtttagttccatatttgaaatcacttttttttcctatttggtttctctgctactgtggtctggctgtgttagcttgtcatctttttcaactgataaacatgttttctgttactccttccacttttccttcctattttgacttaagttcttcacattcatctcttacttatttcttcttccttcccctgtcatcctttccactttccaccttttatttccctcctcccatgcttttttggggcattatttgcaactccaaagacaaatggtatctggaggcattttcttattttattaactttgtcttctaatcatagaaatgacataaaagataatatctttgctgggcacggtggctcatgcctgtaatcccagcactttggaggcagaggcgggtggatcacgagggcaggagatcgagaccatcctggctaacatggtgaaaccccttctctactaaaaatccaaaaaattagtcaggtgtggtggcgggcgcctgtagtcccagctactcaggaggctgaggcaggagaatggcatgaacctgggaggcggagcttgcagtgagcagagatcgtgccactgcactccagtctgggcgacggcagagcgagactctgtctcaaaaaaaaaaagaaaaaaaaaattaggccaggcgcagtggcccatgcctgtaatcccagcactttgggaggccgaggcgggtagatcacctgaggtcaggagttcgagaccaacctggccgacatggtgaaaccctgtctccactaaaaatacaaaaaataagccgggtgtggtggtgcatgcctgtaatcccagctactcaggaggctgggacaggagaatcgcttgaacccaggaggcgaaggttgcagtgagccgagatcatgccactgcactccagcctgagtgacagagtgagaccttgtctaaaaaaaaaaaaaatcttaaccatgtaataagtgattatggttgttggtgctgagtcactatattcactttgtgtgtgtatgtgaggggtgcttaatttgcatagacacttccatttttgtcctttttttctttcaggttgctaggaagaggctcaatgtttgtgttttcaccagatcagtttcagagactgcttaaaattaatccagactggaaaacccacagacttcttgatttaggtgctggagatggagaagtcacaaaaatcatgagccctcattttgaagaaatctatgccactgagctttctgaaactatgatatggcagcttcagaaaaagaaatacaggtataattttcttggttttagatgcatttcttcttgaaagtatattatttaaaggatatgaataaaaaatgatcttccatgattagaaatttaaaaaatcatctcatacataattaactggaaatgtagagaaataatcttctgg

SEQ ID NO: 15510 - DNA, 2300 bp, Homo sapien
ggctgaaaataaaaacaggctcatgaaggattttaatttagaaaagcagatcattggggagtttttctagggaagttgactcattctttgccttttcagaacaatttcataaacattaagctccaggaccagagagagatggaacagtaggatggatacaccgtccagcatttcttggactagagatgaagcctctatcagtcatttccaaacctatgagcaggagatgcctgggggacaaggggactagggaaggtcctcaaattcacatacaaacctggcactgactacagacacacacacagagatgacagtatatttaactttgggggtactttttaggtgctatggtgatacaaaaactacatacatctgttgaagtgttaaaaccagattgaggccgggcgtggtggcacatgcctgtaatcccagcactttgggaggccgaggtgggcggatcacgaggtcaggagatcaagaccatcctgactaacacagtgaaaccccgtctctactaaaaaaaatacaaaaaaattagctgggcatggcaacatgcacctgtagtcccagctacttgggaggctgaggcaggagaatggtgtgaacccgggaggcggagcttgcagcgagccaagatcgtgccactgcactccagcctgggcgacagagcgagactctgtctcaaaaaaaaaaaaaaaaaaaaaaacaaaacagactgagaataactttctgttaatgagaaaatatatcatgagcagatgccaagggcacagacatcatatcatggtggggagatttttcataattttcagtggtgcagatgacgctcttcccatgtctggggaattgcctgcccagagtctgggagagacacaaggcctgggagccgctttcctggcctgccgtgcagctgaggcactggcacgcagcctaagccaggcacacttgcccatgccctggaatggagagccagtgacccagagtagtggggatgtgagcttctccttctctgggggtggagcaatggcagtgagaccaaggggctggggcagtggttgagcgatgctgacaacagggctgatggcacctagtgtttggcagtggcagtagcatcctcttcagacctgtttatggtgtgatttgaggcattcttcctggctgtggaccccacacaagattcactagccctcccagtgactctaggatctaccttcaaatgtttgcataaatttccttttaagtcagcctgagtctgtttctgctgctttacaaagaagacccttactgaatcaccactaagtgctgggggagaggacacagaggacagagggcccacatatttgtttctcaacacattaaaagggggtctttgggccaggcatggtggctcacacctgtaatcctaacactttgggaggccaaggcagggggatcgcttgagggcaggactagcctagacaacacagaatctacaaaaaaaaaaaaaaattagccaggggtggtggtgcatgcctgtagtcccagctactcaggaagctgaggctgcaatgacctgcaatcttgccactgcattccagcctgggtgatagagaccctgtcaaaaaaggggggaaggcaggtgtctttggattcaaaactggagtacaaaaagttaataacagacaatttatttattcgctgcattagaatgtgttgtttactaacttttctcatctctacacaaagccacttctccttctgctgttctttgttcccagcagttactggcccagagtggcacccagagcaggtaccctagacagtgactgaactgttctgaaaaatccaagtacgaattatttgtcaaacaatactccttcctggaaatatgtgctaggtgtaaatcaaaatctcacccagaaacatctaacacctatgacaactgtaaaatccatggaaaaaaaaaagatatgcacatttctaaatgtgctccaggccaaaatctcaatgttaaatggtgaagccatccttgcacaatttcaaaaagttcctgattatggttccttcataagaggttcctctcttcagctcttcttcccttctgaaaaaagaaagccaactttcctttcaaatacacaccccaacccgccccggcatacacagaaatggggactgcgagcagaagcaacatcgctcgccatctgcaaaccaatctcattctattttgtgtcggtaaggttctttttcttctcctccttcattttatttaaatcaactgctatttttcacctaatgcatttatattttaagctccttcagat

SEQ ID NO: 15511 - DNA, 2300 bp, Homo sapien
tttgagatttgttagggcagatctggaataaactttagcctagggctaatttggcctatcatggaggcaattgttctttgatgattgaccctgatgcccaatgtgtttggaggtttttccattgcagcttgcaggagctattctcattcccctgtgaggtccaaggattgttctgcctactggtggttcattctccagcctcaggaggtttcttacatgcaaaggtagataaatattcagccaaagtctcaaaagacccttcttcagatctccagaactttctctctgtgcaacttcctcctctccaagtattcttcttatggattctagctgccttgatttccctgaagttccactccgtctcttctgctcagtgagacctgtaggctctgtttggattctccctccttgtgctgttggatggagactccaggcagtgagcaggagcaattatagagctcagcttgtttgccttccttgctcagggatctcagtcttgtgctacctgctgcccaatgtctgaaaaacctttggatgcacatatttcagccagctttttaattgtttaaggcaggacggtttatccattgccaattactccatcatagctagaataaaattatgatgaatttctttttattgttattactgaatggtatcccactgaatggagatccatgtttaacctttcacctgttattggatatgtgattgtttccaatatctggctactatgaatgaagctatataaatctttgtgtagacatgttttcatttctcttgcttaaatacctaggggtggcatttcttgatcatagggtattgtatatttaactctgtaagacactgtcaaacagtttttccaagcagctgtatcagagttcctgttgttccatatcatcaccaacatttgatagtcagtctttgaaatttttgcccattctagtgactttgtagtggtctcgttgtgagtttaatttgctagttcttgttagctaatgtgataatcatttgtgtgcttattggccatttttacatctgtttttatgaagtttagcttcatatcttttttttttttttttttttgagacggagtcttgctctgtcgcccaggctggagtgcagtggcgtgatctcggctcactgcaagctccgcatccagggttcacgccattcttcttcctcagcctcctgagtagctgggactacaggcgcccgccaccacgcccgtctaatttttttgtatttttattagagacggggtttcaccgtgttagccaggatggtctggatctcctgacctcatgatccgcccacctcagcctcccaaagtgctgggattacaggcgtgagccactgcgcctggccaacttcatatctttttaacattttttccccttggcttgtctatcttcttattgaattataagagtagtttttgtattctggatataaatttcttgcagataaaatagagtctatacttttttttttccagagtctcgctctgttgcccaggctggagtgcagtggcacaatcttggctcactgcaacctctacctcacagattcaggcacttctcctgtcttagcctcccaagtagctgggactacagacatgcaccaccatacccagttaattttttatttttagtagagacagggtttcactatgttggccaggctggtctcgaactcctgacctcaagagatccacccaccttggccatgcaaagtgctgggattacaggtgtgagccaccatgcttggcccagagtctacttttgactatacctttttgctggattgagaggagttgggggtagtggtaagataaacaggccattgtagtcaccaaggagagagatgatagtgtcttagacaagaatgggggtttagatggaggaaagtaggtgagttttaaaattatttttaaaaaagacttcaagggattctgggtgtacttggtttttccttttgtcttctgaatgtccatatatatatatatgtttatatacatgtatatatatgtgtgtgtgtgtatatatatatatattaaaaaaacatgaatcacttctatgcttaaattaactacaggagaatgtctcaggaacctacgacatactcccttttcctattcctttttctgagccatggagtgtcgagttatacagtgccaaattccaggcagggtaagtcctgagggaagaatcaccctttgtggtttccacacagtttagggaatgaggtgggatagatacattaggtacatgatgctgtaagttgtttttgggctgtgt

SEQ ID NO: 15512 - DNA, 2300 bp, Homo sapien
aagttacacaattccctctgcacacattagattggctcacacaccatagtcacatcttactgcaaaggagccatgtacccaactaaaagttgaagggttcaattgataaagagcagtgagagagtggatatttggatatagtgatcagtctttctaccatgggtccaagaaatgtactactgtaatgaaaacaatagcacaagcgtgttgataggtggcaaaggatatttgccttaaggggcaatagggctcgtgcctgtggtggtgactgcggtgaactgcacagcacctgcctgactgttagcctagtgtggcatgttgtgtctttatcatcacactgtggataacacagaaaattggagaaaaattctttcagtattgagaaagttattcagtttagcaaaagaccatttatgtcattaattaatgaataaagttctgacatatgtcttcattgtttccatttttacttatgtttgaatgaaaatggaaacatcaaccaacattgatatcacaaatatactcagagagcttgttgtctgccaggtcccaggacagccactagctggaggtggctgttggccccacatggcatctgcttttcttttcttcttcatcagtcagggaaactgaaagagaagcaatgcttgccacttttctctctagcagtaatggatactcatgagatgtatccactttaatctgatacgtttcttcctgtgtatataccatatttatttattcatttaatatctactgagttaacatctgctttctgccaggcatagctctagacactgaggactcagtagggaacaaggcagtcatgatactacccacaaggacctttcattttaggggtgaggctttaattaagccattattcaccttggtcaagatagagaataatagctggcactattgagcacttactgtgtgctagcaactattgaaaacactttacacactgaatcctcgtaataactctatgtggtaagtccttttattgcctccattttgcagataagaaaactgaggcccagaagaaatgttgctgatttagcaaataaaaatacagatgtgactctgcgtggtggctcatgcctgtaatcccagcactttgagaggcataggtgggaggattgcttgataccaggagttggagacaagccttgccaacatagcgagaccttgtctctacaaaaacaaacaaacaaacaaacaaaaaattagctgagtgtggtggtgtggcctgtagtcccagctacttggaaggctgaggcaggaggattgcttgagcccaggagtttgaggttacggtgagctatgatcataccactgcatttcagcctgggcaacagagcaagaccccgtctctaaaacaaaaacaaaaacaaaaaacagatgtccaatttcgtttgaatttcagataaataatgagtgattttttttttttttgagacagagtcttgctctgttgcccaggctggagtgcagtggtgccacctcagctcaccacaacctcctcctcccaggttcaagcaattctcctgcctcagcctcctgagtagctgggactacaggtgcatgccatcatgcctggctaatttgtgtatttttagtagagatggggtttcactatgttggccaggctggtctcaaactcctgacctcatgatccgcctgtcttggcctcccaaagtgctgggattacaggtgtgggccaccttgcctggcaaacaatgagtgattttttaagttaagtatgtcctatgcaacatttgagacatacttatactaaaaaaaaaaaaatgtgtagtttttcccgaaattcaaatttaactgagcatcctgtattttacccagcaaccctagttaagtaactcgtccaagccacacagctagtaagtgtcaaggtggggatttgcatgtggcttgtctgggtctagagttcaccttttgcccatgacatcacactgggcatgtctgtttaacggagatttagagaacaattccccagacagcagaggaaatctctttcaggagaggctgatggcttctgctccttgccctgtagggggcgccacagagtatgttcatttcgcctgtattttgctcctgcgctggtagcttgggtttgggcacagtgccatctggggttctaaacttcctggacaaaggccagctgctgctgatgggaaactcaatcacctacagggaccaggcaggccatggaatgggggaatcgggctggctgggcctgagagttacttcaacaagcagctgtcccttggcttgcc

SEQ ID NO: 15513 - DNA, 2300 bp, Homo sapien
acggggtttcaccatgttggccaggatggtcttgatctcttgaccttgtgatccgcccgcctcggcctcccaaagtgctgggattagaggcatgaactaccacgccaagcctatttttcttttataatttatttttttaaattgataaataaaaattatatctatggtgtgcaacatgttttgagatatatattcattgtggaatggctaaatcaagctaattaagttatcattacctcacatactttttttgcggtgagaacacttaaaatctactcttagcaatttttgagtatatgatacattgttattaactgtagtcagcatgtacaatagatctccagaacctattttcctatttaactgaaacattgtgtcctttgtccaagtctctccaactcccttcccacctccagcccctggtaccaaccattctaaggctctgcttccatgagtatgacgtttgtttatttgtttttcagattcataatataaatgaggtcatacagtatttgtctttctgtgcctagcttattgcacttagcataagatcctccaagttcatccatggggtcccatatgatagaatttccttctttttcaaagctgaagagcattccattgtgtatccaccaaattaaaaaaaaaatccattcatccactgacgtgttggacacttaggatgattccatgtcttggctgttgtgaatagttattctcaacgtggttattaacgttcagccctcacttcccctgagtcttctttactcgaagttaagcagatctcttttcctcatgagacacactttcaaatcttttccctggacctggcagctctcctgtgggcatgtctgaatatgtcaatatcgctctgagagggtggagccaggctgactgtggtcaactaggtagtcttcattctaactctaagagcattcattaatgaatgagtgcttggtttccaccaggatgtatgcaaatcagttggtataccacttctcatttaactttcacaatcatcctctttctttcactcatgtttattatgatgtgctacgatgaacaaagaaaacctcccatttattagaggctcagagagggagaggcaccctgtctctgtacagtatgggagtacagagtgtgcactgcagaactgtgtatagcggcctcacagagaagttaagtaacttggtggagagcaaacatctcacagagctgggcttcaaactgcagtaggcctgaatcaatgctcttaatgattagaaacattgctctcagttataccagggttccaatctcacttctgcccttccattgttttcctccagtcttttttgttttccttctgaaatctttgcatcatctgggtgggtaccagaaggcatcctagaaacagatctctgcctcagagaatccctcagggtgagatcagctctagaatttagtgattgtaatgtggaaaatggggagttttctgtggctaccggcacctttctttccttattccctttattcatcccaggtggagagatggcataggtggatggatctacatttaagtcccagctccaccgacttgccttggacaaatcaaatctcagtttccccatctgtgaaatggggctaatgagagcacctgccttgtagggttgctgtaatgagataatgcaggtaaacggctcagtgcaagacctgataagtggtagctgctattaatataatcaagaccccattggtttggactggggagggggtgtcgtgtccaccagctctcagcgctctgttatggaaccaaactgggtctgtttgcccatgcgcaatggaaaaccaaacactgaagcactaggtttttgtagagagaaacggttactgtgaatcaactgccaaggagacagaagacagtgctcaaatctgtgtctctgagctggggactggggcaggttttataggcggagggtaatgagacttgatctgattgggtcttgctacaaggtgatgctgggaggtgtgatctgattggatcatgccatgaggtgatgccaggactcattctgattggatcgtggaccatgccatgtggtgtccacttcataattcagcccccattccttggtctcgtctgagcagttaggttccgcctgtggttgcacatttggttcatctgaggatgttcaggttatgtgaccttcaacctgggagtccgtggcaactgaaaaacaactcaccattttattacacaaaattgaaccagaatgggctggttctgcggttacacctccaccaccatccctcctcttctc

SEQ ID NO: 15514 - DNA, 2300 bp, Homo sapien
ttctttcctctcctcctcacttccttcctctcccgagtgccttgttttgttttctagtgctgggcagctggtcaaaggcgtgacctgctcacacattgatgccatgagcactgacttctttctggcccatttccaggattttcagaacaacttcgccctgctttcaccctatcaggtaccgttaaagcattttccagcttctaattctctctccctaccccagtcactgggcctggattggctgtggcatctaaagatctttatgccagaatcattcagacgcaagtgatgacttagggccaaagattgagccaggttttttccagtttctttttaaacagctccaaatacccacatcactacagccaaagaatcaacagattggttattccatactcaaatttaagccttaaaatatattcataagggacagtattttgtgtgttcataattatgttcccgtgggatggaaggtactccttcagctaatattccaacactttccaggagtagctgtgaatgcaaacagtactctgagaacattttctttctcacttaaaacttcattttctaaaaggttatggaggctatttaacctttggggagactagaagcagtaactgatttcttttttttttttttttgagacacagtcttgccctgtcacccaggctggagtacagtggcataatcatggttcattgcagcctcaacctcctgggctcaagagatccttccgtctcaacttcttgagtagctggaactaaaggcacacaccaccatgcctggctaatttatttattttttgcagagatagggtcttgatatgttgcccaggctggtctcaaattcctgggctcaagtgatcctcctgcctcagcctctcaaagtgctgggatgacaggcatgagccacttcacccagccagtgactgatttttcagtgtctaagctagtaaacacaggccttacagcatttgaacttttggtgtgaaccgctggcttacagactcctgtaatggatattaaaaagcaccttctcaactctggccttgtgtttcagaccagaatgaagaatttccaaagagtaaattatctcccagaaaaccaggaagcatagagtgcttggtgtataatccttcaagatcattacaggaatatgcaaagttttaatgaagctctctcattcccttggactgttaattctgttagtgattctcaaagttgagcttgcatcagcattgtgtggaaggctgtaaaaacacaaattgggggccccactcccagagttttacatatagtaggtaaggggtgaggcctaatactttgcatttctaatcagtttgctggtacaaaccactgaactatattaaaagacctgcccaggtgggcaagccaataactgagcaaatggatggaagctagacctgctttgaggaagacctacatgttcgagcaggaagagttgccccagtgaaggtgctttcctaggcttccagctctcagagccttcaaataccagttaattagaaaatttgcctttctcgtttatatttttactaaaacacattattattattattattattattatcattattattattattgagacaggaccttgctctgttgcccaggctggaatgcagtggttcaatctcactgcaacctccgcccctgggttcaagtgattctcctgcctcagtctcctgtctaactgggattctaggtgcgcaccaccacacctggctaatttttgtatttttagtagggacggggtttcatcatgttggccaggctggtcttgaactcctgacctccagtgatccaccagcctcagcctcctaaagtgctgggattacaggcatgagccaccacgcccattctgaaaacacataattattacacacacacacacacacacacacacacacacacacacacacacacaaacaaccaatacagagaaagtaaaatttccccaaattttccccagagcagttgttctcaacagagtactgttttgccctcttaggggacttttggccatgtctgcaaacatttttggttgtcacaaccggagcagagctactggcctctagtgggtagaggccaggggtggagctcaacatcctacaatgcgtaggacagcaccactacacagaggtacctggtcgaaaatgtcaataatactgaggtgagcaactgtgtttcagaggtaactataaagaacagtttgctattacttttgagagttttcttttatatataaaatataggccggtcacaatgactcatgcc

SEQ ID NO: 15515 - DNA, 2300 bp, Homo sapien
tgccaccacgcccagctattttttgcatttttagtagagactgggtttcaccatgttggccaggatggtcttgatctcctgacctcgtaatccacccacctcggcctcccaaagttctgggattacaggcgtgagtcaccgcgcctggccttggcttcagatttgctgtaaagtggaatcaatagtagctgccctaaaaatctcaaagagttgtttcttacacagcttggcatatgaaggggaaatttggaaaaggtggccctttacagatgcaaggtagtggtattattattagtttaaagactattttttttttaaatggggtctcgctctgtcacccaggctggagtgctgtggcacagtaatggctcactgcagcctcaacctccctgggctcaggtgatcctcccacctgagcctcccaagtagctgggaccacaggtgcacatcactgtacccagctaatttttgtatttttttttaagggatggaatttcaccatgttgcctaggtgggtcttgaactcctgggctcaagggattcacccacctaagcctcccacagtgttgggattataggtatgggccaccatgcctgaccctagagactatttttaatactagttttaggttctcagaaaaatggagaagatagagatttcccatatctctctgaccccgtacacgcataagctccccatgatcaatatcccccaccaaagttgtacatttgttagaactgatgaacctatgttgacattatcgtcattggattctcattatcatccatagtccatattttacattaggattcactcttggtgctttacattctatgggttcagacaagtatataataacatgtattcaccattatagtatcatacggagtattttcactgccctaaaaatccttccgggctttgcctgttcattcctctctcactcctaattcctggcaaccactgatacttttgccttttctagaatatcatatatttggaatcatacagtagatagccttttcagatagacttctttcacttagtaatatgcacttaagttttctccaggtctttttttggcttgatagctcatttctttttagtgctgaatcatatttcattgtcttaatgaaccacagtttatttagccattcacctacagaaggacatttggttgcttccaagttttggcaattatggataaagctgctatcaacatccatatacaggttttcatgtagacgtaagttttcaactcctttgtgtaaataccaaagagtgtgtttgctgggttatatggcaaaaacatgtttgcttttgtaagaaaccaacaaaatgtcttccaaagtggctgtatgattttgcattcccaccagctgtcactgctaattgggcagacctcctttagagatgtcgccaaagatagtgtaatgctcttcactgtaggcatttatgatctatacaagaataacagtggattctgggtcagtgcctttattttatcctgccaagttcaagagaaaggttttttcttattctaagagaagactgttatggtaaagtaaaaggaagaaatatataattactcttctattgaggagggagaagaaggacacactgtgatgtaaatggcagaaattcaataatttaattcaaactaaagagaacgggaatgtattgaattcaggaatggaatgtaacgggaaactccactggtggtcttcaggcatggctgaatcccgtgtctcaaatgatatcttcaggaatatgttcctcccatccctcagctctgtgttccttggtgtggtctttactttttccacttggtaatatgaatgtcctccaatatcctcccctactgccagagataccagagaaaggagagcttctctgatagttccatcaaaactcccagggatgactctgattggtcagcctgcatcacatgccaattttcttggtcaaggaagtgggaccatgtgattgacatgagtataagacaatctattcctgaaagaaaagggtgctgggggaaaaggcaacagatgtccaccacagcatgttttttcactttactggttattatctctttttagactccctcagcactggacagccgagaccacgaaggacttgggaccctttctagtacttttctcaggagatgaattaagctctatagccacaaaggtaatgttgtgctccatcttaagaaggctgaaggagtttgaaggggagagaaagtgtggtcagttatacagcattgggtttactgctgtctatggttctggaagct

SEQ ID NO: 15516 - DNA, 2300 bp, Homo sapien
ggtttgcagtatcctcagagtctgaattttgagcggatagtgatgagccagctaaatcccctgaagatttgcctgccctcagtggttaacttttttgctgcaatcacaaagtaagttatttatgctttcttgatgggagttatttaaaatatttttatttatgtttctctagtattgtaagagtctgttaaatttctatgaaattagtaacattataaaaggccaggcgtggtggctgacgcctgtaatctcaacattttgggaggctgaggtgggaggattgcttgaggccaggagttaaaagaccagcttgagcaacatagtgagaccctatctctataaaaaaattttaaaaattagctgggtgtggttgcctgtgcctgtagtcccaactactcaggaggctgaggtaggagaatcacttgaacccaggaggcagaggttgcagtgagctgagatcgtgccattgcactccagcctgggtgacaagggcaagactccatcaaaaaaaaaaaaaaaaaaaaggaatttctgcaatacgctacaacatgaatgattttgtaggacattacgctaagtaaaataagccagtcacagaaaaacaaatactgtatggttctacttaaaggaagcccatagagttgtcaaaattagagagacagaaagtagaatggtggtccccagcggctgcagaaagacagagtggggaaattattgtttaatgggtacagagttttcattttacaggatgaagacttgtggatatggatggtggtgatggttgcacaacaatatcaatttattttataccactgaaccgtgcacttcaaaatggttaagatggtaagttttatgttgtgtattttaccataataaaaaaaattgtagagggaaaaacagtctgcctccacttttgatatgggactgctaacatcttccaccctccctctccccctctgccccacatctgggcaagctaagaaagcctgctgctctctcctctggcaccagctggaaattcatacccaacaagccctagccctcccaccagacccacatttcatccccatccccatcgcatccccatccccatccccatccctaaccaccataaatgctaagggagtttccttgcctggttttctgaaaccatttttggacctgcttgggaatctgccctgctctctcagaaagcttcattatatgagcaataaaccttttcctaccctcttggtgcatgtggtgtatcatcagtcttgacatctaaaacaaattttgggtggtggggtccatgtctttgcagggtgaccacaatagtacctggcacattatgtgtttaataaacagagattactgtcatatttattttattttattttttgagatgaaatttcactcttttttcctaggctggggtgtagtggtgcgatcttggctcactgcaacctccacctcccgggttcaagtgattctcctgcctcagcctcccaaggagctgagattacaggcatgcgccaccacacctggctaattttgtatttttagtagggatggggtttcaccacgttagccagactggtctcgaactcctgacctcagatgatccacccaccttgacctcacttacaggcgtgagccaccgcgccttgtctctgttatatttatttctctatttaaattgatggatatatgcaaacctgatcattatcatacttatgccttgacacaagagaggcaataaactaatctaagtgatgcttgtgatgccaaagatgtcagaacactttctgggccaatggcagatacctcatgtcaccagatgctaagggtccacaataaaaagcgttgaatgaaaattttgaggataaatatctccaggttgaggaagaaggttgcacatatcgggtgctcaataaatatttgtcgaatgaatgaatgagtgaatggccccagtgtgtggggcttgggaagtgattggatataggcagagaaaaggaacaagtcaaaaataattcagaaatcaagaacaagcaagttgccttgatatacttcattcctacacttggcaaactttagtgattaaggaaacaatgttttaaaaaaagttttggtgatgagacattcaggaagatctatcaataaatagcaaacctggtcctttttaagacactgtgtataaaaaaattccaaaaagattaaaatcagtgcagaaaccaaagaaccatttttttctatatcatattgatcatttcaagtggaactgttagctatcttagaaaaattgtggttctcaattggtt

SEQ ID NO: 15517 - DNA, 2300 bp, Homo sapien
ggtaagggttcctgtttgcctcctatgtctatcgatatttgcttttagaatggtagttttcctttttattccttttctagaaagtaaagtcaacatggattgatttaattttttaaaaatagggcaccgtggtttctcatgccaatactggtggaaaaatttccatttgttcgaaaatcagagagaacactggtaagaaatcttttcattgagaacatcatggaaaagttgtttgtatgatttcattttagatgatattaggtctttttctttctttttctgtctttatttttatttttcttttttgagaccgagtctcactctatcgcccaagctggagtgcaatggcgtcatcttggctcactgcaacctctgcctctcgggttcaagcaattctcctgcctcagcctccccattagctgggactgcaggcacctaccaccatgcccagctaatttttgtatttttagtagagacaaggtttcaccatattggccacactgttatcgaacgcctgaccttgtgatctgcctgcctcggcctcccaaagtgctgggattggtgaaccaccgtgcccggctgatgttaggtctttttcttaaaggttactttgtcttctagactttaaactgatgtctaagaatttgactcagattcctttcttataaagcggctattggggattcgcagtgcctttttctgttattactatgtgcaagtcaaggtctgagttcatttccggaatatctgtagtggctttatgctcatacgggcaagaattactagaagataatagttcatgtattactaattgtgaacatgccttattttaacctgaaaacaaagccttccatagaagaattctgcttaagtttttgtacaatgttcagatcatctgtgcagtttttaataattaatagtggttgccttagtagaaaaccgaatctagtagcatacaaaaagaattacgtaccatgaccaagtgcgactgatgttaggaatgcaagattgattttttttttcgggggtggggggacagtctctgtctgtcacccaggctggagtgcagtggcaccatctcagctcactgcagcctctgcctccagggttcaagtgactctcccacctcagcttcccaagtaggtgggactatagacatggggcaccacaccccactaatttttgtgtttttggtagagatggggttttgccatgttggccagactggtcttgaactcctgacctcaagcgatctacccgtctccacctcgcaaagtgttgggattagaggcgtgaaccaccgtgaccggctgagattgagttagtacctgaaaatgaattaataaaatattttgtagcaatagaacaaaggacaaaaaccacataatcatctcagtagatgcagaagtgtgtgacaaacaccaatatccctttatgagaaaaacagaaggaaattttctcaacctgataaagggcatctgaaaaacccacagctaacatcatattcagtggtgaaagaccaaaagttttttcctaagacaaagaacaaaacaaggatttccgctcttgctgcttgtctagccaaggcagttaggcaagaaaaagaattaaaagcatccagatggaaaggaaggcgtaaactctcttttgcatggtgattttatatgtcattctaagaagtttacacacacacaagaaattttagagataataaatgagttcagcatggttacgggacagaagactaacatacactaaccagttgttcaagacaattgaataggggagaatagtcatttcaacaaatgctgctggcagaagtggatatgaacatgcaaaagagtgaagcatatggatatccatatacaaaaatgaactcaataaaagccctacatgaagtgtaaaaactgtaaaactctgagaagaaaacgagtacattttcataatgttggattaggcagtaatttccagatttgatgcctaagcacaagcaaccaaagaaaaaatgcatcaattgtacttcaaaattaaacgttgttatgcttcataggacatcttcaagaagatgaaaagaatccccaaataatgggaggaaatatttctaaattttatgtctggtaatggacttgtatatgtaaagaactcttataattgaataataaaagggcaaatagcccaactgaagagggcaaaggatctgaataggcatttctgcaaaacacatgaaaagaagctcaacatcattagccatcagggaaatgatttcacttaatgcccacaaggatggctataatcagaac

SEQ ID NO: 15518 - DNA, 2300 bp, Homo sapien
agcatttatttttagtttcaagcatgtcgcccttcagttttgttttgatgctcatactctgaacttttcttctttcagatcttcctgcaaattttgacacatatcacagagccttgcaaataatagcaagatatgtaccatcatgagtatacttttccttattttgaatgtttaattctcaagaaaattgtaatcaattagtaaaaattataaaatgttaatagtattaaagcttgagtcttacattgcatttttttttttgtatccacttgaggaaacattacattctacaaaaagtggcatttccattttctatttattctctttaattgtttttcaaagttcgtatgcagattctcccccaattttgtatggtggttggaattttgtttttatcttcaacagatatgctatccaaaatttttcagtgagaaacccctgggtgtgtttgtgtcatgccatatgaataaaaattgcacttctaagaaaagcttttcaggtttgtgggtttcttttggaggggtggatttctagttccctctgtctgttgattatttgttaacttaaaaaaatccaacttgattattttttcttcttttaaaaataatatacatgtgtagtgggaaatgtcagcaaaagtgctgttatgtttctgtgggagagaagctccctctttgatttgctgttgatatcagagttaacagaagcttattttctctaagttgttatagactttctcagaagctatacattgtaagttccagttctggccgggcgcggtggctcacacctgtaatcccagcactttgggaggctgaggcgggcggatcacctgaggtcgggagttcgagactagcctgaccaacatggagaaaccccgtctctactaaaaatacaaaattaggtgggcgtggtggcgcatgcctgtaatcccagctgtttggggggctgaggcaggagaatcgcttgaacccgggaggcagaggttacagtgagccgagattgtgccactgcactccagcctgggcaacaagagcgaaactccgtctcaaaaaacaaaaaaagttccagttctttgaggtaagggttcctgtttgcctcctatgtctatcgatatttgcttttagaatggtagttttcctttttattccttttctagaaagtaaagtcaacatggattgatttaattttttaaaaatagggcaccgtggtttctcatgccaatactggtggaaaaatttccatttgttcgaaaatcagagagaacactggtaagaaatcttttcattgagaacatcatggaaaagttgtttgtatgatttcattttagatgatattaggtctttttctttctttttctgtctttatttttatttttcttttttgagaccgagtctcactctatcgcccaagctggagtgcaatggcgtcatcttggctcactgcaacctctgcctctcgggttcaagcaattctcctgcctcagcctccccattagctgggactgcaggcacctaccaccatgcccagctaatttttgtatttttagtagagacaaggtttcaccatattggccacactgttatcgaacgcctgaccttgtgatctgcctgcctcggcctcccaaagtgctgggattggtgaaccaccgtgcccggctgatgttaggtctttttcttaaaggttactttgtcttctagactttaaactgatgtctaagaatttgactcagattcctttcttataaagcggctattggggattcgcagtgcctttttctgttattactatgtgcaagtcaaggtctgagttcatttccggaatatctgtagtggctttatgctcatacgggcaagaattactagaagataatagttcatgtattactaattgtgaacatgccttattttaacctgaaaacaaagccttccatagaagaattctgcttaagtttttgtacaatgttcagatcatctgtgcagtttttaataattaatagtggttgccttagtagaaaaccgaatctagtagcatacaaaaagaattacgtaccatgaccaagtgcgactgatgttaggaatgcaagattgattttttttttcgggggtggggggacagtctctgtctgtcacccaggctggagtgcagtggcaccatctcagctcactgcagcctctgcctccagggttcaagtgactctcccacctcagcttcccaagtaggtgggactatagacatggggcaccacaccccactaatttttgtgtttttggtagagatggggttttgccatgttggcc

SEQ ID NO: 15519 - DNA, 2300 bp, Homo sapien
gcactttgggatgccaaggtgggtggatcacttgaggtcaagagttcgagaccagcctggccaacatggtgaaaccctgtctctactaaaaatacaaaaattagcagggcatggtggtgcatgcctgtaatcctagctactggggagggtgaggcacaagaatcgcttgaacctgggaatcggaggatgcagtgagccgagatcacgacactgtactccatcctgggtgacggagcgagactgtctcaaaaaaaacacaaaaaacaaaaaaaccaaattgctgtattttattttgtgaaatagggtctagctctgttgtccaggctggagtgcaggggtgcaatcacagctcactgcagccttgacctccagggctcaatcgatcctccctcctcagttttcaagtagctgagactacaggtatgcaccaccatatgctgcccaggctggtcttgaactcctggagagagatacatacacacacacacacacacacacacacacacacacacacacactttttttttttttttgagacacagtttcgctcgtcacccaggctggagtgcaatggcacaatcttggctcattgcaacctctgcctcctgggttcaagctattatcctgcctcggcctcccaagtagctgggattagtaaggcactgccaccatgcctggctaattttgtatttttagtagagacagggttttgtcatgttggccaggctggtctcaaacttctggcctcaggtgatccacttgcctcggcctcccaaagtgttgggataacaggcatgagccactgcgccgggcccatacatatgcattttaaaaaatttatttatttatttcgagacagggtctcactctgttgcccaagcaggagtgcagtggtgctatctcccaggctcaagcaatcctcagcctcccgagtagctgggactacaggtgtgtgccatcacacccagataatttttattatttttattttttaaattttttgtagagatggagtttcaccgtgtcacccaggctggatatttttgtatttttgataggcctgtacagtttccaaagttgcaacctttccccctccctgagagtaggggcagccccggctctccctctacatcctccacagtcccgaggttttggcctctgtttcctctgtttcctatgcttggaacaccagtcgctcttttgttggtctggctgacttctgttcctcttttaaaaatttaagtttggccgggtgcggtggctcacgcttgtaatcccagcactttgggagtccgaggcgggtggatgacctgaggtcatgagttcaagaccagcctggccaacacagtgcaaccccgtctccactaaaaatacgaaaattagccgggtgtggtggcatgcgcctgtaatcccagctacttgggaggctgaggcaagagaattgcttgaactggggaggcggaggttgcagtgagctgagatcacgccactgcactccacctgggcaacagggcaagactcggtctcaaaagaaaataaataaataaataaataaataaataaataaataaataaagtcaagggggtaacacctcttggtaactctcctgttgtttctcatgccagcatcatcacagccttgaggctctggggtaggtcacttcgtcgagctcgtttccatgaggataacgttatcttgggtgtctgtgagaatgctgcactgagtatagagcccaggctcctgggtcagccgggttcgaatcccctttcctccgtgaagatctgggtcagtcacaagtgcttcagtttcttcgatctgactgagggaggctttgactccaaaaaattaacacttgagtgtacctggccacagcttagcacatccagggtgtttccaccctttctttgggatcctcagggctggatggagccgatccttcccgtctctccttacactcgcgcactcacgctggctggaacaagtcctccaagtagaacgaagagcgcgttttagcggcgctctagcccgccgagagcatacgccctccccacacggggcccctgattgtctgaaggttgcgctggcacgcgcaacttccgggacagaggctgtggctggaaggagctgggcatccggcctgaggcgcagcggtcgcgttagttcggcccaatggcggcaccgctgcttcacacgttgtttgtcgggagatgcggccgcttcgtcctctgcagtcaagacgctgggcgcgtcgaggactgggtaagattcaggccgcttccttctgcgcgtctgggaccaa

SEQ ID NO: 15520 - DNA, 2300 bp, Homo sapien
gagcagggtggtcacactgaccttgcagagttctgagaatcagagacagaacataaaaggcctggaaaacattctccaaaaagaagctgcaacatgtgtggacagtgggcttttcatgcctctcttactgtctcttactgtctgttgacctggtgcaagaaacatgctctggtgatggctgtgagggaggaatgaggatagacatagacactcctgtgtctcaaacatgcttctttattactctgttatgactctgtcttccctggggcaggaccccagcctgcctacatttgcagacagacacagtggcatgtggagacaacagtgtgtcccaatgactttcctttaccctccagctgttggcagtactcagtggaagggtgatattatgacactgatacttctattttgaaacctggaggatggaaaggtgcaaaaatctatcaccagcaacagaaggtgcagactgtgttggtggcggtaattttgtccatcaaatgaatatgtgtgaaaacattccctcctttggccctacaggtcagaatggcggcagcggagcatcgtcattcttcaggattgccctactggccctacctcacagctgaaactttaaaaaacaggatgggccaccagccacctcctccaactcaacaacattctataactgataactccctgagcctcaagacacctcccgagtgtctgctcactccccttccaccctcagcggatgataatctcaagacacctcccgagtgtgtgctcactccccttccaccctcagcggatgataatctcaagacacctcccgagtgtgtgctcactccccttccaccctcagcggatgataatctcaagacacctcctgagtgtctcctcactccccttccaccctcagcggatgataaactcaagacacctcccgagtgtctgctcactccccttccaccctcagctctaccctcagctccaccctcagcggatgataatctcaagacacgtgccgagtgtctgctccatccccttccaccctcagcggatgataatctcaagacaccttccgagcgtcagctcactccccttccaccctcagctccaccctcagcagatgataatatcaagacacctgccgagcgtctgcgggggccgcttccaccctcagcggatgataatctcaagacaccttccgagcgtcagctcactccccttccaccctcagctccaccctcagcagatgataatatcaagacacctgctgagcgtctgcgggggccgcttccaccctcagcggatgataatctcaagacaccttccgagcgtcagctcactccccttccaccctcagctccaccctcagcagatgataatatcaagacacctgccgagcgtctgcgggggccgcttccaccctcagcggatgataatctcaagacaccttccgagcgtcagctcactccccttccaccctcagctccaccctcagcagatgataatatcaagacacctgccgagcgtctgcgggggccgcttccaccctcagcggatgataatctcaagacaccttccgagcgtcagctcactccccttccaccctcagctccaccctcagcagatgataatatcaagacacctgccgagcgtctgcgggggccgcttccaccctcagcggatgataatctcaagacaccttccgagcgtcagctcactccccttccaccctcagctccaccctcagcagatgataacatcaagacacctgccttccaccctcagcggatgataatctcaagacaccttccgagcgtcagctcactccccttccaccctcagctccaccctcagcagatgataatatcaagatacctgctgagcgtctgcggattccgcttccaccatcagccgatgataatctcaagacaccttccgagcgtcagctcactccccttccaccctcagctccaccctcagcagatgataatatcaagacacctgccgagcgtctgcgggggccgcttccaccctcagcggatgataatctcaagacaccttccgagcgtcagctcactccccttccaccctcagctccaccctcagcagatgataatatcaagacacctgccgagcgtctgcgggggccgcttccaccctcagcggatgataatctcaagacaccttccgagcgtcagctcactccccttccaccctcagctccaccctcagcagatgataatatcaagacacctgccgagcgtctgcgggggccgcttccaccctcagcggatgataatctcaagacacct

SEQ ID NO: 15521 - DNA, 2300 bp, Homo sapien
tgtactgagaatggggaaggaaactatcatctcagaagtcagcaggcagtaagcaagaggaggaatcaatacagcaacagtttggatcagactgtacagtttttttgtttttgtttttgtttttctgagatggagtctcgctgtgtcacccaggctggagtgcaatgacgtgatcttggctcactgcaacctccgcctcccaggttcaagtgattcccctgcctcagcctcccgagtagctgggattacaggtgcctgccaccacgcctggctaattttttgtatttttagtagagaaggggtttcaccatattagccacaatggtctcaatctcctgacctcgtgatccatccgccccgccctcccagagtgctgggattacaggcgtcagccaccgtgaccggctcagactgtactcttctagccatctgaaatacgttttctaggtagagatagattgtgtaagggtacagttgtgaggataacagaaacatggcagattatttaaaatcatcctgaaagtggtgctttatctgatgaaagtgattgtaatccataggaaaatgtttcaacgtgcgcaagagttgcggcggcgagcagaggactaccacaaatgcaaagtaaggagcttcctccctgcagttgcaggatagttcagtgctgatgcagatgatgccacggcccttagactctctcaacattcaatttctcatgtgttggctttttcagatccccccttctgcaagaaaggctctttgcaactgggtaagtttgcttgttttccttgcttttggacatagtctgccaggtcaggacatggatacatttttctccctacagctctgtgctcaagccctgcagagggagatggcagagagaaaggctgcctacaagcatcacagtcccatccctgttggtaaccgtgttgcgcaaaaacaccttcatccccacccagtggggcccctgatctaatattctaagtgtcagaggttccgtatttgtaatagcagatgggccctgactgtaaactagtgaagagtgaatgtaacttattacccacagggacaattccaaatgaaggccttaaatgatgctcagctaagctggttcttgtgtggcctctgtaccttcaaaagctgccgagtcctatgattacacgtgatgggacttgtacacttgaagtgaaacacagttttaaaacttgctttgtttagaattcccacctcatttttccatggacaaaagtattctttatgtcctagtgcacttacaatttggtattacctgggagtgaaaagaaatattacagccatgcctaagtgacttcttgaggtgagattgttctgtcagaaaaccctctcccagttcccctgcagctcttcaggaatccacatctctccagagctctttgttctcatgggtggcacctccagagtgaagaagatcctttgtcaagaagggaaacagaggggaaatgagagggtcctgcaggcagagctggaatcaacttccactctgcctcttgcaagctgtgtgaccctgggcacaatttctccttcctctggaaacctctgttttcttagatttggagcagggtggtcacactgaccttgcagagttctgagaatcagagacagaacataaaaggcctggaaaacattctccaaaaagaagctgcaacatgtgtggacagtgggcttttcatgcctctcttactgtctcttactgtctgttgacctggtgcaagaaacatgctctggtgatggctgtgagggaggaatgaggatagacatagacactcctgtgtctcaaacatgcttctttattactctgttatgactctgtcttccctggggcaggaccccagcctgcctacatttgcagacagacacagtggcatgtggagacaacagtgtgtcccaatgactttcctttaccctccagctgttggcagtactcagtggaagggtgatattatgacactgatacttctattttgaaacctggaggatggaaaggtgcaaaaatctatcaccagcaacagaaggtgcagactgtgttggtggcggtaattttgtccatcaaatgaatatgtgtgaaaacattccctcctttggccctacaggtcagaatggcggcagcggagcatcgtcattcttcaggattgccctactggccctacctcacagctgaaactttaaaaaacaggatgggccaccagccacctcctccaactcaacaacattctataactgataactccctgagcctcaagacacctcccgagtgtctgctcact

SEQ ID NO: 15522 - DNA, 2300 bp, Homo sapien
ttagaatattagatcaggggccccactgggtggggatgaaggtgtttttgcgcaacacggttaccaacagggatgggactgtgatgcttgtaggcagcctttctctctgccatctccctctgcagggcttgagcacagagctgtagggagaaaaatgtatccatgtcctgacctggcagactatgtccaaaagcaaggaaaacaagcaaacttacccagttgcaaagagcctttcttgcagaaggggggatctgaaaaagccaacacatgagaaattgaatgttgagagagtctaagggccgtggcatcatctgcatcagcactgaactatcctgcaactgcagggaggaagctccttactttgcatttgtggtagtcctctgctcgccgccgcaactcttgcgcacgttgaaacattttcctatggattacaatcactttcatcagataaagcaccactttcaggatgattttaaataatctgccatgtttctgttatcctcacaactgtacccttacacaatctatctctacctagaaaacgtatttcagatggctagaagagtacagtctgagccggtcacggtggctgacgcctgtaatcccagcactctgggagggcggggcggatggatcacgaggtcaggagattgagaccattgtggctaatatggtgaaaccccttctctactaaaaatacaaaaaattagccaggcgtggtggcaggcacctgtaatcccagctactcgggaggctgaggcaggggaatcacttgaacctgggaggcggaggttgcagtgagccaagatcacgtcattgcactccagcctgggtgacacagcgagactccatctcagaaaaacaaaaacaaaaacaaaaaaactgtacagtctgatccaaactgttgctgtattgattcctcctcttgcttactgcctgctgacttctgagatgatagtttccttccccattctcagtacatccctaattcatccttcattgagcatcttttatcataaagctgtattctctttgtattaatatccttaccgtgtttcacagggcagaaacagctgggcttataaacaggcatagtccttttgaaggatgtggttgatcctacaacaacacactttcctaaggatgacaacaactcaccccacccctagaatggctggtatgaaccgagtttccacacagtctagctggcaatggggtcaggagacgttttgctacttcacatcttttggtcactggtaaatattaaggtactttgttttctgttttgtgaactctctctcgctctctctcacgatatgtcttctgaccgtttgtttctatttctgcatttactgggtctaaatactgtacaaaggttaaaaacaacactccaatgggcgtttcccaagagggtggggtacagtttctgaactcacttgtaggtgtgtatttctttcatatccaatttcccattttcctctgcctctgatacctgcctctccttttctgcatgctcacattctttcacgcttagtttcctcagattagaagggagagaaatgcacacacatgatccaccagcccgtgtgggattccctctgcccttctggcatctgaaggctgtgattcaaagattcccccctgcaaccttcccacaaatgaaccaactgattctcacaaccgaagggagaattgacacctcccattgagggacaaaaaaaagtcacactctggcctgctggcaagtcacctgtcatttccagctcatcttcatagttccatagttagtcctattctttagtaaatataaagactattaaaagcttctatgaggtgcactatgtgtgtctctggggtcagtcttgtgcttgacacagcgaaagctcattttagttcagtgtgaaaaaccagacctcaccaattcatcacaactaactccatcggaagcagaggattgctcctcatctgactcctcctgtgtgagacctgattctcagtcagaggctgatgccggaactgagaccatcagccatagagagatccttccagaataaccccgcagttcactactgcactttgccatgattcaggactggaactcttgtcatcaactttaaagatcctggttgagagaaaaggcaatctgaatgctgggcgcatctattgaattagaaatgatcggaatggctcctaagtcagggtgttatgtcctgaaaataggtgacaacggcaaaccatccaccctggtgttgactgactttaacaaggttcagttcacagagattgagggcagaaaaagg

SEQ ID NO: 15523 - DNA, 2300 bp, Homo sapien
tccaaggtgccagctctggaacgaaggatgcccttgggaggtgatgacactcaggtacacgggtgctcaacagattgcttcctcctatcctcagacggtctttgcatgcatgcagccattggcactcccattgtgtggaaggaaaccagcccagggtcacacagctggtcagcagcaacatagctggtctcaaatctaaggtgcctgaccatgcctccatgagggaccgcctccaagggaggttgatcctggctttggggagcctttcctgggctgcacgaataacctccattgttcgagaccccaaactctgctcacatcttcctttccctatctctgcttgggctatgatcacggtgactctagcagcccttcatggacattatagtactctctgccattcacttttgctctaatctgacttcaacccccacttacttggtctctccttttacaaccaccacaaccgaaatctagggctgcttttttttttttttttttttgagacagagtctcattccattctgtcacccaggctggagtgcaatggtacgatctcggctcactgcaacctccgcctcccgggtccaagggattgtcctgcctcagcctcctgagtagctgggattacaggcgtgtgccaccatgcctggctaatttttgtatttttagtagagacggggtttcaccatgttggtcaggctggtctcgaactcctaacctcgtgatccgcctgcctcagcctcccaaagtgctgggattacaggcgtgagccaccatgcccagccaaatctagggcaggaacatggctgcagcatataaaaagaattgaattccatacttttgttaaccctgttttttgtttgtttgtagttgttgctgtttttgagacagagtctcgctctgtcgcctaggctggagtgcagtggtgcaatctcggctcactgcagactctgcctcccgggttcaaactattctcctgcctcagcctcccaagtaggtgggactacaggcgcccaccaccacacccggctaatttttgtattttattagagacagggtttcaccatattggccaggctggtctggaactcctgaccttgtgatccgcccacctcggcctcccaaagtgctgggattacaggcgtgagccaccacacccagcccctgttttgtttttgttttgcttgcttcttagggttgtttttctatttatggtaaaggcattggctttccatttgtagcatcaatagaatatttcctgtttacaataaccttatgtcatagtaaatggtaaagggatttaaagcagtggttttcagctgccagaggcctgagagagtttgggcatactctgtgtgatcgggcagaaggcctgtgggaagtttagcagaggacagggccaggaaaggtgatggacagtgggggtctgtcctggtcaccaggcccctgggtcctgcccacctgcttggagctccccacccatcacacatgatgctgccaagccctctgggtattgtgggcaaataccttaggagagaagctgatgaactttgtttcttgaaatgcacagattccttggacgtccctgagagctcagtcatgaaagtcaacttggttttctccccctcatttgggttcagaatttaaagtccacacacacaggcagtaagatgatatagataaggacgtcatcactcggtttcggatgttaaaatgtctaggtgggttagcggtgatttgagatcacacaaccttgtgccacaaagaggaattcccaggccagagggagacattttattgccatgttatgatctcatcattgagttgaaaggcaatcttgtttcattttggattctttcttatgtttatgtcttataagggcactttgaatttccaagcaaataataattttgaattagcttttaatcattgacttctagcacagttatatgatcagaaacatgctgtgtgatttgattgctctcaaatatattgagatttgctggaacaaaataagtcaggttaatttttgtaaatgtaccaggcatgcttaaaatgaatgtatctacatttgttcccgagatacaggttgatggacggatggctacatggatgtgatggagatggtttactatcgggaccttccgcaccctgctgatgttttgttgcttaggatatgaatggctgagcggaggctgtaaaacctggcactctgcttgggtatgaggttcttcctgccatcctgccatcatttgttttttatgttttgtcgccataagtgaccttgaggaaccctg

SEQ ID NO: 15524 - DNA, 2300 bp, Homo sapien
aaaaaaatcccaaagttagttttaagccaaaaagacttgatttaggattttgacactggagaaacccatcaaagatgtcaagtttgaaaacacttgatcaaaacagaatcacaggtcactattaaaagagtattaatttaaccagagacttccaaagcaatacagaaacttacatggatataaaaaccctaacccttttaaaggtcagatttgctaagtgatcaaaaggggtacttgaattgaatcgacacaggaagagtgtgtacagggttatgagtgtaggcaggtggttactttggtcatatctccatttgccacctgattacacatgagaatggcatctttactcaccagaaagccagtattataggaggtgtaggaggcattcttggacttgagacaagaacattgttgtgtagaaatttcattgactgtgttaaaattattctccatgggctggagaacacataacatggcctttagaatgagacgggcattgattggatgcaaggtctccacacttactagctgtgtgacattggacagagtgcttcatcattccgagactcagtttttaaaggaaaaacaactaactaccttgcaagcttgctagcaggtttaagtgtaataatgtgtgggaatgactgcaccgtgactaacatgcagtgacagcttaattaatgttaacccttatcattatcatataagaatgtgagttacataagagaggagtcctgtcagttcgttctctgctgtgtccccaagaccatgaatcatggctggcatgtagtaggcatttaataatatatgttcaacaagtatttggcagtcttggagggcagaaaaggaggtggggaagatttttaaataacattctttaaaaagtcacattgtcctacaataccgatttttcttgcatatttaggaaattgagggtttttttctaaaacatgcggacatatgggaaataggatgcaacatttgcactaatgtttcagacacagttagaggtttccaagagattttgcgctggggaggctgcttgctacaagctcccaaagctctgggaggacatagtattcattcctccctcagcagaagcggtgaggcaagaagctctggggagcacccagcgttggacttttagcatagtgtgtcaggtcttcatagtttgggcccagggcacagagaagtcacagctctccggcatcctgtgacctttaccctctttgccaagggaaaatgtggcccaccaaagcaagaaacttgagggcatgggtcaccccagccctggcatctgcccagagcccgagaaggaaggaacaatgatcctccagctacctcacggggctggcacaggtgaccactgccctggcatcacccagctgtgtccggcagcctgaaccccatctgtggggatgcgaggaggaaaatacaaaagtccttaggtgaacactgagaaggcagatgcagcagaaacctccaggccagaactacccagtcttggacctatggtggagatagagcatagctggcgatcatgtgtacttacactctaaggtcacctggttgcactatggcctcatctgtggctctgaaaatgaagatttggaaggagatcatcacagctaatgtttaacaagcccctcctgtgtgccaaatcattcacccctcaccacaaccgaatgagctaaggattctcattatatatagtttatggagagggaagtgcagacataaagaggtgaattatcttacccagatcacacagctgataagtggtggaggcagaatagaatctaaacagtgtggctccggagcccacatgcattgattcgacaagtgtttattgagcacctgccgcggacaaggccttgtgtgattaaatagggttataattagtaatataaaaatgagaaatcactaatgctttttagacttaacattttgtttttttgtaggtttcaggcacagaactgtatatccaataatagtgaaatggatcccactaattatgacagaaatgatgatacatttaaatgacttggatgttttataggtatgatctcgtgaaatcttgagagaaactgaatgacgaatgaaactattgttcctgtttcacacagaagaaaactgaggttaaaaggggtaaagtaattttgcatggcatgaagtagaaattcaaagtacaggaatttgaacttggttctgtccttttctgaagcccttgaccactatagactcaaacatcaccttgtttttccactcattcaacacttttttttttaaattatctaata

SEQ ID NO: 15525 - DNA, 2300 bp, Homo sapien
gtttgtttgtttgtttatttatttatttatttatttaagacagagtttcgctcttgttgcccaggctggagtgcagtggcacgatctcagctcaccacaacctccgcctcccaggttcaagcgattctcctgcctcagcctcccgagtagctgggattacaggcatgtaccaccacgcccgggtaattttgtatttttagtagagacggggggtttctccatgttggtcaggctggtctagaactccagacctcaggtgatacccctgcctcagcctcccaatgtgctgggattacagctgtgaagccaccgcgcccggctgctgtgatagttgagatgtaaaccaaaaataaaattctaagccacccaatccgactgaatggacccttcctgttgagcaaggacattccaaagtaaactgaaaagaccagcttaggccatgatgggaaggggaggtgtcaacatgcctcattctaccttcctccctctggaatccagacacaactgaccagcattaacattaaaacagagatcttaagctgggcacagtggctcatgcctgtaatcccagcactttgggaggccaaggtgggatcacctgaggtcagaagttcaagaccagcctggccagtatggtgaagccatgtctctactaaaaatacaaaattagccggacattgtggtgcacgtctgtcatcccagcaaggcaggcgaatcacttgaacccaggaagcagaggttgcagtgagccaggatcatgccattgcactccagcctggtcaacagagcgagactccgcctcattaaaaaaaaaaaaaaaaaaaaattagccgggcgtggtggcgggcacatgtagtcccagctactagggaggctgaggcaggagaatggtgtgaaccagggaggcggagcttgcagtgagccgagattgtgccactgcactccagcctggacagaagtgcatttcataatgcattttaattgcattagcagtgatttaatttttttagatgctaaaacttatgggtgaaagtggattaaatgtagccaaatgcaacatcaaaatcttcaggcacaaaaacccattaactttttcatactctcagaaggtgaacctaatttcaaatgaaagctgcctccagaatatattgttaagcgtattctagatataattcattttggcaaacatactgtagaaattcacataacattttactgtactaaaagtaaattgcccatgtaacaaaaaatatcttttcagagcttgaaatgaattttaaaggatgactgatggtccctggaagagaaacagtaaacaaataaggtttgtagcaatgatgtatgagttagaaattgcagttccagatgatctctttattaaagagacgatctacacttaatttgatcaagtgttatgaacatagttcatgttaagtctccatttaaatacaacctgaaataccaaagttaattttcttttctttctttctttttttttttttttagaaggagtcttgctctgttgcccttcctggagtgcagtgacgtgatcttggctcactgcaacctccacctcctgggcttgagcgatcctactgcgtcagccccccaagtagctgggaggacaggcgcaagccacggcactcagctaatttttgtatttttcgtagagatagggtttcaccatgttgcccaatttggtctcgaactcctgagctcaagtgatccgcccgccttggcctcccaaagtgctgggattacaggcatgagccaccgtgcctggccagaaaattgtaaacacacacaaactctcaagtggcctaattccctctcaccaaaccaatcacaatacagataaaagagaataacttgtgttcatttttgtacaaacaaaaaagatataaattgtgaatgatgcatgatttttaattacaagtaaactgggcaaatgcttctgcattatttaaagctaaaaggtgatcagtggaaactttcctctgttagtactctaatactttttatatttatcggctcactacaacctgtgcctaccaggttcaagcgattctcctgtctcagccacctgagtagccgagaccacaggcacgcactaccatgtccggctaattttgtatttttaatagagacagggtttcaccgtgttggccatgctggtcttgaactcctgacctcaaccgatccgcctgccttggcctcccaaagttctgggattacaagcgtgagccacagcgcccagccttattataattgttactatttaaatctcttttgctctctcc

SEQ ID NO: 15526 - DNA, 2300 bp, Homo sapien
gccagctccttcactgcaacctgttttatcagcaaggtctttatgactggtattttgtgctgaccttctatgtcatcctgtgacttagaatgccttaaccatcagggaatgcagcccagtagtttcagcctcatttttcccggctcctatttaagatggagttgctctggttcacacacctctgacatgatcattgcccactgcggcttccacctcccgggttcaagagatcctcctgcctcaccctcccaaggtgctgggactacaggtgtgtgccaccagctcagctaatttttgtattttttgtagagatggtgtttttccatgttgcccaggctggtctcaaactcctgggctcaagcaatccttctgtctcagcctcccaaagtactgggattacaggcatgtcccaccatgcccagactaatatttacttttaatcagactaagatagggttactacttgagttgctatggctccagctgaaagaaagcccgtgcagtcatatcacgcgtaaacatttgctttatgctaaaaatatggtggacctggcattacagctattacaaatctcctaagatgtctcgggtagtgtattagttacttttcatactgctatgaagaaatactggaaactgggtaatttataaagaaaaagaggtttaatgtactcacagttccacaaggctggagaggcctcagaatcatggtggaaggcaaagaaggagcaaaaaggtatgtcttccatggcagcaggcaagagagcacgtgcagggaaactgccctttataaaaccatcagatttagtgagatgtattcactatcacgagaacagtatgggaaaaacctgcccccatgattcgattacctcctaccgggtccctcccacgacacatggggattatgggaactacaattcaagatgaaatttgggtggggacgcagccaaaccatatcgggtagcaacaacctagggtcagttttgcaggtggtaaagccatttaccaagatagttgtgggtaaagaagggcagatttattagagaaattgtgaaaatatgttgcagtgggcagctcagcagagaaggggctacctgcaaagaggcaagggctggaggaaagttttatagggtcctgctgaagggtgctacgtgtggaatgaggtcattgtgcccgcaggttgtttgtgattagctgtctctaacaattgttcatacaataattgttcattattgttctcaacttggggctctccccaacctggggacccttccttattgttgcttacttatcaggtctccacataaaggtgtggaaacttcattcattcatatcttcaacacaaattgtaggtagcctgttttttaaaacatttattcaacaaatatttagtccaagccactattacttactaccttctctactattgtatggacttttaactatctctgacactattcactattcttccacattctctattatttatacctatggtaaaatttgccagtttgaccatacaactaatactcacagggaatatatagagtctagaagaaaatatacaggtccttaaaggctgccctgccaacaaaaccataacgcaggaacaaacatcacaactatgccaaataatcaatcctacaatgtccaaaattttactttaaaactggaattaccagacttcctttctgcattaaccagtttaactagacagtaacgaaatattcctactttatgctgtgatagtttgtttgtttgtttgtttgtttatttatttatttatttatttaagacagagtttcgctcttgttgcccaggctggagtgcagtggcacgatctcagctcaccacaacctccgcctcccaggttcaagcgattctcctgcctcagcctcccgagtagctgggattacaggcatgtaccaccacgcccgggtaattttgtatttttagtagagacggggggtttctccatgttggtcaggctggtctagaactccagacctcaggtgatacccctgcctcagcctcccaatgtgctgggattacagctgtgaagccaccgcgcccggctgctgtgatagttgagatgtaaaccaaaaataaaattctaagccacccaatccgactgaatggacccttcctgttgagcaaggacattccaaagtaaactgaaaagaccagcttaggccatgatgggaaggggaggtgtcaacatgcctcattctaccttcctccctctggaatccagacacaactgaccagcattaacattaaaacagagatcttaagctggg

SEQ ID NO: 15527 - DNA, 2300 bp, Homo sapien
aggctgcagattcatggcagattctaaagcacagcagtccccaacatttttggcaccagggaccggctttgtggaagacaatttttccacaggcggcaagggatggggcgcaggatggtaatggtcttgggatgaaactgttccaccacaaatcatcaggaattagattctcataaggaatatgcaacctggatccctcgtgtgtgcaattcacaacagggttcatgctcctgtaagaatctaatgatgctgctgatctgacaggaggcagagctcaggcagcaatgcaagcaatggggagcagccagaaatacagacgaagcttcagttgttacccaccattcacctcctgctctgtggcccagttcctaacaggccacagaccagtacatgtccatggcccaggggtcagggacccctgctgtggcacattgcttaatagaggactgtagcagccatgtgccctgacctttccttttttttttttttttttttttttttgagatgccagaaacccagaatttttttttttttttttttttttttttaagacaaggtctggctctgttgcccaggttggagtgtaggagggcgatctcagctcactgtaacatcaacctcccaggctcaagcaatcctctcacttcagcctcccacgttgctgggattacaggcacactccactacacccagctaatttttttgtattatttgtagacatggggtttcgccacgttgcccaggctagtctggaattcctgaggtcaagctgtctgcccatctcagcctcccaaagtgctgggattgcaggagtgcaccaccacacctggcctgaaacccagattttatttatttatttattcattttttgagatggagtcttgctctattgcctaagcttgagtgcagtggcgcgatcttggctcactgcaacctccacctccctggttcaagcgattctcctgcctcagcctcccaaagtgctgggattacaggcatgcaacaccacacccagcctgaaacccagatttttaatatgaaatcaaagtcttcagaccttgtaggtgtcataaaaagcacgctgaggaccactagtttgcaactgccaatctaaaatatcatagacattatatcacttcaaccacgaaaaaaaaagtatgtgaggcagaaaatggaagcaaccatgcctaatttattgttgaatactttttccgtataccaagagcttcctttgcactagcatctgaaactatatccagaatgacactggttttcataaaagtgttgatcctcacacctctttatagtcttgcacctagcacagtggagtgaaacactttaaatagcacttgttccttgagtatatatggaaaaaagtgaagtattgataagtgctcagctaatatgagcagcatctcaggagtctccaattcttgaattaccagggagtatttttaccattttcccccagtgaaaggcctattttgagagacttaccctccaaaatgaatgtattaagtcatgttccttttttttttttttttttgagacagggccttgctctgttgcccaggctggagtgcagtagcatgatagttacaggaaaggggtcccaatctagaccccaagagagggttcttggatcttgtgcaagaaagaattcagggtgatgccacagtgtgaagtgaaagcaagtttattaagaaagtaaaggaggaggggcacggtggctcactcctgtaatcccagcactttgggaggccgagacaggtggatcacgaggtcaggagatcaagaccatcctggttaacacggtgaaacctcatctctactaaaaatacaaaaaaattagccaagtgtggtggcgggtgcctgtagtcccacctactctggaggctgaggcaggagaatgggatgaacccgggaggcgaagcttgcagtaagccgagatcgcgccactgcactccagcctgggtgacagagggagactccatctcaaaaaaaaaagagagaaagtaaaggaataaaagaatggctaccccatagacggagcagccgtgagggctgctggttgcccatttttatggttatttgttgatgatatgctaaacaaggagtggatttttcatgcctcctctttttagaccatatagggtaacttcttgatgttgccgtggcatttgtaaactgtcatggtgctggtaggagtgtagcagggaggatgatgggaggtcagtcttgtctctattttggttttggtgggttttggccagctccttcactgcaacctgttttatcag

SEQ ID NO: 15528 - DNA, 2300 bp, Homo sapien
ctggccttaaattcttggtctcaagtaatcctcctgccttgccctcccaaagtgctgggattacaggtgtgagcaatcatgcctggcctcctttaattttttttttttttttttttttttttgagacggagtctcgctcttttgcccaggctggagtgcagtggcacaattgtatttttagtagagacggggtttcaccatgttagccaggatggtctcgatctcctgacctcgtgatctgcctgccttggcctcccaaagtgctgggattacaggcgtgagccaccgcgcccggccggcctcctttaatttcttaaccataaatatcctccccccacttttattatggacgttctgaagcacataaaaatagggagcatagtataataaatttgtacatatttaacactcagcttctataattagaaacaaatggcccatctggtttcatctaggcctctttgctatcctttcatctccaactagattattttacagcaaattctagatgacattctgctgagcatttctgccagaattacacctctctttgctaatgtgaaaaaatgcccatgataactgtaaaatacgtgtgtcctatttaggtgtctaaacactttaatgtcacagtattaaggccttaaaatatagcttagatatatttttctaaattaaaagacttcattttttagatatacagaaaattgagcagaaaacagtgagttcccatataccttcttcatcccaacagtttccccctcattaacatattgtgttagtgtggtacatttattacaaaggagtgaatattgatatattattattaactaattttatagtttactttgtgttatgtattctatggactttaacatgtgtaatgacatgtttcccctattaccagtatcatacaggatagtttcacttccctaaaaatcttttatgttctacccactccttcctcgttccctctccccactcctccctccccccatcttaagcccatggcaacccctgatctttttactgtctccatcgttttgccttttccagaatgccatgtagttggagtcatatagtatgtagccttttcagttggcttctttcacttaccagtgtgcctttaaggtttctccatgtctttttgtaatttgagaagctcattttttaaaaattttattcttttagattgttgaacagataaatacgaaactgccatcatcatttgtagaaaaactgtttataccatcatctaaactactattcttgcgttatcataaagaaaaagaggtaagtaatacactgataatgaattttgacaacttgagtcactgaagagttggacctaatgttgcttaccccaggctatataagtgaaattgagtgaaatgtgaaatgtttgatttagaatatagtgattgtatttgttcttttaaatttatatttcttgataatcatactgaatactttcatgaatggtgtgccagatactcttttcagactatgcatcttttgctgttattaaatttattaaattttcataagggtaaaacaagttgacacatttataaagttataaattaagaagtactgtatatttggtaaacaaaaatgactggcttttcaaccaccccctagtcaaatccaccacagactttcctggtagatttaagaaacccagtcttaaactgctgtttgcatatgtcttttgatgttgattattaaaaaaaaaaaacaaaaacggccattttggaaatttcctattgacagttttcatttatagtactctttatttgtgataaaacttaatagatttgaaatagcatactgatctgtgtcagttttctgattggtttttaaaaaattaaaatattaaatgctacagacagtgaattgatcgatcttaaatttatttgtatcatcagcactaatacagatagtgatttattttccatataattttagaagatttattttccatttatcacttccttgaattttttgtttttcaggttgttgctgtagcccgtgctgtttatcaagcagtgctcagcttgaagaatattcctgttttggagactgcctataagttaatattgggagaaatgacttgtgccctaaacaacctcctgcacagtctgcaacttcctgagtcctgttctgaaataaaacatgaggcttttaagaatcatgtgttcaatgtagacaatgcaaaatttgtagttaaatttgacctcagtgccctgactacaattggaaatgccaaaaactcactaataggggtgagcctttaattgtaa

SEQ ID NO: 15529 - DNA, 2300 bp, Homo sapien
tagggtatgctgcttgaaaaccagatactttttaaaagaagcctcttatattttttaatttggattttttggtgttttttctcccccctaccctttcacaatttcttacgcgattccaagggtggttgcagagtttggagccattttgggtagctgatcttgcattttctacgcctctacttggtcagtttctagaagacatggaagcatatgctgaggtgagtatatagaaagctgtttcttaaaattttggttaagaaaaaatcttaaattgtgctagatttattttaaaatggctcagacctcctgacatttaagcagaaattacaagcccattgcaatattttgaaaaattttttctttttgagacggagtctcgctctgtcactcaggctggagtgcaatggcacgatctcagctcactgcaacctccacctcctgggttcaaatgattctcctgcctcagcctcccgagtagctggaattacaggtgcccgccactacgcccagctaatttttgtatttttagtagagacggggtttcaccatgttggccaggctggtctcaaactcctgaccactggtgatccagccgcgtcggcctcccaaagtgctgggattataggcatgagcccccgtgcccagtcagtattttaaacatttatttcagatgtgtttaagttaccaggagaattactggagagactaaaagaaacgttgcaagcttcgtatttcgcaaagctttacatactctcggtagctggtatttttctaaagacatattttgttatttatttttattttttgttcccagtcttcagagtcttaaagcaaattgatgttgtgttataaaaaaacacaaaacaccaaaagctcctaaagattttcctcttacatatgtacaggagatcttgaatcgtactttggaggacaagccttggcttcagccagcttttgtggctgtacgaatatagcataggagctttaagagcgctgctgaagcctctgttactggtacttggcttttctggccccactgtcatggcttaactctgtgccatctcttatctgaatctctttgtgtttctcccctattcagatcaaccagtcaaggctcccataaagattttggcctcatcttgtttttttcatctttgctgcttgtagtcaacaggaattcagtacctttagctgtactgatgtgtttactctttcctagaaaagcaaggaaatgttttgcttctgcgttgttttttctttgcccccacacctagaatgtcttttttcacagcccacgtttaaagctgatctacctctcataagccacacattctagtttgtagagatgcttccccttgttatccttaagatctcattctcttctgttattttggtgcttaattttaggtagatgtatacattggttctggtatcctagtttttgcgaatcttgtccttttcatatatcgtacttcttcagttacacatctgtagaccaggtcttgtaatctccctttgctcttcatgtgcatgctcttggtttggaggacttactgttgagctgagtggctcaaagaatacctagaatgagatttttagccaaaaactaattcaggagtggcaaaagcttccgtcttcatttatacctacatataactagagcatatgtgctagaatttatttttccccaacagctttctgagttgatttaagagattatttccttaatttgttgtctattgggtttaatgttggctttttgaaataattaggtaaaacccatttttatattcagagtcatgaatattctcatgggccacagttctctttctaaaagcctaaaaatctattctaaaatgaattgattgaaatattttagagtttttttttgttttgttttgtttttttaaacaatgtactacttattaagaatgctgtgaattcacatctaggacctcagccatgtggcctctggggaatcagtggatgaagacgtccctcctccatcagtgtcattaccaaagctggctgcgcttctccgggtatttagtactgtggtgaggagcactggggaaagcctcagcccaattcgggccctccaattactgaggcatacgtaacagatgtaagtgcttttgggcatttgaagtgtcattcaaaaataaaattgttttacattgtaaatgcttctctttaccaggtgaactgttattaatccttcatttgtttagcatgtatgtatgtatgtatatatgtatatattgtctgactgctttcttaaacaaccagaaaagcaggga

SEQ ID NO: 15530 - DNA, 2300 bp, Homo sapien
ccagggaagctcactctattttttatgtccagcgtttttactggggttccatggttgcatgcccatgtggctaaccttagtctccagccccactggaggccaagctgatccatgtgactcaaagcccccaccataagccacattattagactgtgctgtggcctaaagcccccagatgaacaaggacactttcccccaccgccgcccccccccccctttttttttggagatagtcttgctctgttgcccaggctggagtgcagtggcatgatctcagctcactgaaacctcagcctcctgagtagctgggattattacaggtgcccgtcaccatgcctggctaatttttgtatttttagtagagacaggtttcaccatgctggccaggctggtctcagaatcctgacctcaagcgatctgcccgccttggcctcccaaagtgctgggattacaggtgtgagccactgctcctggccaggaccctcttattaggtatgacatttcaagagtttagagattaccttccagaattcacaggtaaaagccagacctctccttggtgaagatacaattctttacaattttacaatagttaaatatattttatcagtctatattggctgtttagttgacagacagttaaaaattggtgacagtccagatgtggtcactcatgcttctaatcctagcattttgggaggctgaggtgggaggattgcttgagtccaggaatttgagagcagcctgagcaacataatcagacacctgtctccaaaaaacataaaaataaaaaattagctaaatggagtggcatgcacctgtggtcccagctgtttgagaggctgaacccatgaggtcgaggctgcacccatgaggtcgaggctgcagtgagctatggtcatgccagtgcactccagcctgggtgacagagtgagaccctgtctcaaaaaaggaaacaaatcacccataaatggataattaagatttggttattatagacacttaatacttaggtagctaaggtagttttaccaataaattatattaatttaatatttcagtattgcaaaactgatgcatactcatttacaattttgacatggaatggttctgttttgttttattaaatttgaacttaaaagttctctgcaagaagagatttgtataataaattccctgagcctctcaaattaatattttagccatagactcatatttagagcagtgtttctaatgtaatgatacaaggcccagggttattcatagtttcaccgtttctcttattcctcattaaagcatgtttgaatccaggcaagaggcattacaggggaaaaccttgaatttatttttgaagggtaaatcatttccaagtggtattaaccattagtatggaaagcaacatatcctataactgctctgtgacagtgagactatctttgctgctttagagaataagtacattcctacttcattggctttagtgcaaatctcatttcctggtttatatccattacaaattagatctcaccatgagagcaaaatcccttaataaacctaggtaaaagcaatttgaagtaatatgatgcttactccagtgacaccactaggtgtggtgtttgcatcaagtcattttggggtgctttatggaaatgcttcctagtagggaattccctgacttcacactttccagagatgacgctctctctctttttctctctaatacttacaagaatggactgcaaggctacatttagtcaggcgataccatccccagcacatggtggcttgttggtgtgaggtctaaggattccggtcatttgaaacgaatggcctcctagatttgtggcatttttctgtatattgagaataggtaactaaaataagtggtaactgtatttgcatgtgatttgtatgtgatagttaacatttaaattctcttatgtactaaaatttttttggttgccacattaagcctctttatcctgtaaggcacagagtgtctttccacctcaatttttgctttaatgtatgaaccctaatgggaccatagttcaactaaaggcacctaactcatgaatgatatttgctccatgtttgaacaacaaatgttttaacccactgtcttcactaatattgtaactactgtcttacagattgacttgatgcacaacatcacaaaggcgatttttgaggtatgagctttagaaacttacctctcatgtggcatgtacatcaggctttaacttcagtttgatcgttttggggaaatttatgcatttctttttttttctctccatgat

SEQ ID NO: 15531 - DNA, 2300 bp, Homo sapien
agacagggttttgccacgttggccaggctggtcttgaactcctgacctcaggtgatccacccaccttggcctcccatagtgctgggattacaggcatgagccactgtgcctggcccagggaatatttcatcagagataatacctgacagggtaggattctgaaaggaatggggaaggaaatgccaacatcgaaattatgcattggggaagccatgattaatgcctctggccctaagatggcaaggtaatgttgttcccaagtataaacccacatcaccttcctctggtgtgttttactcctactgttgcctgctttctctttacattctcccaccccatactcaccgcgagcgctcaggctaggtagttaggctccatagagtcaaattggaccccacattaacgaaactaacaattcgagctttccagcaatgaactcatctgctcttccatgtctactcttttcctgtctgctggtttcctctcccagggctttcagtgtgttctacgcagaaaccagttcaaggactgggttttcttctgcaataaaatgctggagttgtggcagagacctccacagtgagaacagccacggagttggctaggaggtgacatgatgtggaagtggtggatgtgtccacaagatggcactcctaatttgtagcttaatgcttaataggacattttgcaattgacaaacttgggattttatgatttatgtagctgatatcatgaattatgtttcaaatcctgccacattttgaacagaatttatttttgcccctttctgatattgggtcataacctaagaatgagaggacattataagcaggtgtgggtgtgtgtgtgtgtgtgtgtgtgtgtgcacttgagtgtggagacttttgtgttcctcctacctgacctgaactgttgaatgatgaagttacaatgattggactcaggggtgcagctagctaacttgggaattggggttttgaagtactggagacagctttgtatgccatgttaatgaatttgaattttatcctgaaaaacgtggctgtcgttgaagaattttaagcaggcaggtggcttgatcagagcactgcttcccagatttcactcaatggtacctgtataacacattcatgatttttgctgtatctccgtatcatcaagttacttaacgtttttacaccaacttttattattttataaatgtacttaaagaggaaattcactactagcattgcttgccataatcaaaataaatatattattaaaatggaacagtgctaaataaggtgtacacatggacatagagtgtggaatgacagacaatggagactccgaaaggtggaggggtgggagagaggtgaacgatgagaaagtacttaatgggtaccatgtacattattcgggtgatgggtacactaaaggcccagacttcaccattactgcaatatatccatataacataactgtacttgcgccccttaaatttatacaaatttttaaaaggaaaaaatggaagtgttcatctatgtaccaacttaaaatcatctcacgcaccactagtgttaaatctaccacatgtggggaaactgtgtggtatgaattgggttgagggcgtccccagcaggcacagaaattgggttggtgccaggttcttaatgcccagatcttaattagagagcccaagtccgttgtaggcctggagcaattcagacacaaggcaaaaagaaagtacatttgcctatgccttgtaacgtctacaccaccagcctttctgaaactattgtgcatacgaagtcatcccaggatcttgtaaaaacaccgattcggatccaatatgggacctggagttcatacatttctaatcaactcctaaatgatattgatgctgatactgtcggtttcccaaccaagcaacgtagcaaggtacgaaactctaaagtccctaaagggcagggaccacgcctctcgcgttggcatagtgcctagctcaaggcactttctgggttaacactcgctgaggaccggagtgaacgcccccgccccaagtcgtcacgtgactgactttctccaactgccggtttcggctcacataacacacctactatccaaaacatttctattttcctaacacaaaaactatagctaagtttttatattctatgtagccccagcctaggacgtaaattccacgagaccaaaagccttgtgatgattccccgaggttgctgaccctcccggtgtgtcccgggcctgctctgggggacacagcggcgaatacgttgaacgaggcccctgtttca

SEQ ID NO: 15532 - DNA, 2300 bp, Homo sapien
tggatgtgtccacaagatggcactcctaatttgtagcttaatgcttaataggacattttgcaattgacaaacttgggattttatgatttatgtagctgatatcatgaattatgtttcaaatcctgccacattttgaacagaatttatttttgcccctttctgatattgggtcataacctaagaatgagaggacattataagcaggtgtgggtgtgtgtgtgtgtgtgtgtgtgtgtgcacttgagtgtggagacttttgtgttcctcctacctgacctgaactgttgaatgatgaagttacaatgattggactcaggggtgcagctagctaacttgggaattggggttttgaagtactggagacagctttgtatgccatgttaatgaatttgaattttatcctgaaaaacgtggctgtcgttgaagaattttaagcaggcaggtggcttgatcagagcactgcttcccagatttcactcaatggtacctgtataacacattcatgatttttgctgtatctccgtatcatcaagttacttaacgtttttacaccaacttttattattttataaatgtacttaaagaggaaattcactactagcattgcttgccataatcaaaataaatatattattaaaatggaacagtgctaaataaggtgtacacatggacatagagtgtggaatgacagacaatggagactccgaaaggtggaggggtgggagagaggtgaacgatgagaaagtacttaatgggtaccatgtacattattcgggtgatgggtacactaaaggcccagacttcaccattactgcaatatatccatataacataactgtacttgcgccccttaaatttatacaaatttttaaaaggaaaaaatggaagtgttcatctatgtaccaacttaaaatcatctcacgcaccactagtgttaaatctaccacatgtggggaaactgtgtggtatgaattgggttgagggcgtccccagcaggcacagaaattgggttggtgccaggttcttaatgcccagatcttaattagagagcccaagtccgttgtaggcctggagcaattcagacacaaggcaaaaagaaagtacatttgcctatgccttgtaacgtctacaccaccagcctttctgaaactattgtgcatacgaagtcatcccaggatcttgtaaaaacaccgattcggatccaatatgggacctggagttcatacatttctaatcaactcctaaatgatattgatgctgatactgtcggtttcccaaccaagcaacgtagcaaggtacgaaactctaaagtccctaaagggcagggaccacgcctctcgcgttggcatagtgcctagctcaaggcactttctgggttaacactcgctgaggaccggagtgaacgcccccgccccaagtcgtcacgtgactgactttctccaactgccggtttcggctcacataacacacctactatccaaaacatttctattttcctaacacaaaaactatagctaagtttttatattctatgtagccccagcctaggacgtaaattccacgagaccaaaagccttgtgatgattccccgaggttgctgaccctcccggtgtgtcccgggcctgctctgggggacacagcggcgaatacgttgaacgaggcccctgtttcacggagctaaagatccagtaaggacttcacccagcgagaggcaactacgccgggcttcgatacccaatacctctgcagaaaggtggagtggcaggaatctcctgaagcctccaacgtccaggaacgcggaaacccagggcctccagtgcaggtgtcatcccggagggcgcatgcggagtcccaagagaggcgcgtcccattggacaatgctgagcggaagagcccaagatagcggggggagttgtgacaggctgctgcagacgtacttagaaaaggggtgcatactggatattcaggctaggagaagaacgcaaaaagcagtgacgtacattattctctgcatatatttacttgggaaattgtgcgtctccctattctgagtcttggaggaattggactggtccaaccttataaagagagcagtagagcgcggcagtatagagagtacctcacgaaggggacgtgggaaagtgttagcggggaacgctgggaaactcccggcctccgccaccatcttgctttcctttaatccggcagtgaccgtgtgtcagaacaatcttgaatcatgaagctactaaccagagccggctctttctcggtgagctcaggtggcgggtttgggaaagggc

SEQ ID NO: 15533 - DNA, 2300 bp, Homo sapien
gtcgtttgaagctttgacgccaggcattgacttctctagctacgaatgtcctggacggcatcttccaatgtaaggctgttttgtcagcattgaaaatctgtggtttagtgtagccaccttcatcgatgatcttatgtagatcttctggataacgtgctgcagcttctatattagcatttgctgcttcactgtgtactattatattaagaagatggcttctttccttaaagctcatgaactaaccacggctagcttcagacttttcttctgcatctcacctctctcagccttcatataattgaagagagttagggcattgctctggattaagctttgacttaagggaatacagtttgatctaatccagaccagtaaaactctgtattatcagcaataagtctgtcttgctttcatatcatttatgtgttcagtggagtagcactattagttttcttcaagaactgcactggtgcaagaggcctagcttttgacctgtatccgtttttaacatgccttcctgacttccttagaagcttaatcctttctagcttctgatttaaagtgagagacatgagactcttcctttcacttgtatacttaggggccattgtcgggttattcattagcttaatttcaatattgttgtgtctcaggagtaggaatatccaaagagagggagaaagacttggggagcagctggtcagtggaacactcaggacagaaacagcatttctttttttttaattaatttatattaaagacagggtcttgctctgtttcccaggctggagtggagtggtgcagacataccttattgcagccttgaactcctgggcccaagcgattcttctccctccgcttcccaagtagctaggactataggcacatgactccatgcctggctaattttttattttttgtacaaatggaggtctcactatgttgcccagactggtcttgaactcctggcctcaggtgatcctctcacctcagcccagcatgctgggattgcagatgtgagccactgcacccagcccagattttttatatattgtgttgtcagtggtaaagatgatagagaatgtctcattctgctgataggagtataaattgatacaaccacttaggaaagaatcaaggaatatctggtaatattgaaaaaccccacagtttttaatcacattcacaaaggtattctttataaagactggaaacgatctaagtgtccatctttagggaaatgggtaaagtatgacagagtcatgatgagaccactatacagccattacggaatgaactagatccatacgtcaacatagcacaactgaagggcaaaatagagtgtgaacaagcaagtttcaagatttctttaaggtattttaattttttaagcagaaaaatactatgtagtgcttatgattgtggtttccagagtgggagagagtgagggaattggtcttggaagggtacgaaaagatcttcaactttatttgccattttaaaaaattgtggtcaaatgtatataacataaaatttatatatatatatatatatatatatatatatatatatatatattttagacagtctcgctgtgtcgcccaggctggagtgcagtggcatgatcttggctcactgtaacctccgcctcttgggttcaagcgattctcctgcctcagcctccgtggtagctgggattacaggcgtgcgccaccatgcttggctaatttttgtattttcagtagagaccatggtttcaccctgttggccaggctggtctcaaactcctgacctcaagtgatccgcccacctcggcctcccaaagtgctgggattacaggtgtgagccactgcgcccggcccaaatttatcattttcttaagtgtgcagttaagtggcattcagcaaccatcaccaacattcagctccggaacttttctatcttctcccacctgaaattctgtacctgttaaacaatggctgctcattctcccctcccctcagcctttggcaactgccattctcttttcagtctctacaaatttgactactccaggtacctcataagtagaatcatacaatatttgtccctttgtgactggcttattatccttagcataatgtcctcagggttcatctgtgttgtaacatgtgaccagatttcactccttttaaggttgaattatttgctggtttttaaaaaaattttgaattttagttggttaatatgtggagttttgttatattattgttcgcaccttttatacttcagaaattttctttccaaaggaattggttgat

SEQ ID NO: 15534 - DNA, 2300 bp, Homo sapien
tgaccttggcttacttggcttggtggagtgtagagacctccgctttaaagacactttttagcctggggtggagggaagactaaggggaggccaggcactgatatgctccatcacagaaccatatatgctgatgggctctattcccacaaactcttacccttcccctgctggtaggaagatggaggaaaaagatgtattttatgatagaattaagttggtatctatgtagacccctgccagactgtttggaagaggaaaggtgacctgtcacaagaagtcacccacaggagacttgaggtggagaatagccctttgtactggtctctacgacacaggttttatctaatgagaaatctgtcctggcgctcacgcctgtaatcccagcactttgggaggccaaggcgggtggatcaccctgagctcaggagttggagaccagtctggccaacatggcaaaaccctgtctctactaaaaatacaaaaattagctgggcgtggtgacacaggcttgtggtcccagctactctggtggctgaggtggaaggatcgcttgggcctggaaggcggaggttgcagtgagctgagattttgtcactgcactccagcctgggtgacagaatgagaccccatctcaaaaaaaaaaaaaaaaaaaaggaacctaaagaggaatctgccctggcttattgtctgtgtagagccacagaaacaacagaataagcttggacataaccagatctaccatggaaatctttgcacagtgcctgacacctaataggtggttaatgactgtttgttgaagggatggggcaaggtgcttagcctctcagtttcatcagaccggggataacaccagggcctacctcattaggttttctctttcttctagaatttactaactcatttattcatttttattttttgagacaggatcttgctccatcacccaggctggaaggtggtgactcaatcatagctcactgcagccttgaatcctgggctcaagtgatcctcccatctcagcctcctgagtagctaggactacagatgtgcaccaccatgcccagctaatttttaaattttttttatagagaaagggtctcactatgttgcccaggctgatctcaaactcctgggctcaagcagtcctcctgcctcagtctcctgagtacctaggattacaggtgttagacaccacacctggcctagaatttatttttaataatttatattttcctaaaattgtccacttcatctgttttttaagtacaggtttcaagaggatagagcctgtgtttctgtgtttgtcttgcttactgttgtgtccccagtatcagtaaatgacagaacagctccctgtaaatacttgttgtatgagtgaatgtgtgtgggaggaagaattatcttggaaaaaagaaggaagcattaatagtgcctctcctaatagtgactcatttttttttaggccaccctggggccttttcttattcaaaacattcatgaaaaaaagtgcagttccaaagcattggagctactgatgtaacaatttttttaaaataccattattagaagtgcagcgggggattctctgatcttctaggtattctgtgatctcctgtgatcttctggctgtgatcttcctctgcagaccacctcacatctttgagacaccctcctctgtgccttctccccctccctatttcttaggttcaccaagaatgaatgaagaagccaagcgcggtggctcatgcctgtaatcccagcactttgggaggctgaggcgggcagatcgcttgagcccatagtgcaacagttgtgttgagcctgagcaacatagtgagacccccaccccctgcccgtctcttaaaaaaagaaaaagaaaagaaggaatgaagaaaccaccgtgggtcaggcacggtgctaacctctgcagaagtttccatacagtacaatggtgtgcaatgcccacgccacgttttgcagggtccacgggaagccttgcggcgacctcactgccgcccaatttctgggcagtggcggcgcagcgccccctggcggccatcccgagggcagtgcccgcgggcaaggttcgaaactgttggcattgggactgactccagcctctgctccgggaggccctcccgggctgcctgacctcccgggaccatgcagaaggcctcccacaaaaacaaaaaaggtaactggggagaaggaagcgggtgaagaagccctggggaccaagccttcgtcaatgttcctcctctgtaaaatggcaacggtgcactcttggcctgggagataac

SEQ ID NO: 15535 - DNA, 2300 bp, Homo sapien
gagttagaatatgtgcaaactgttcaaacattcagccctaggattcttctaagctggccagtagagaacatcagtggatattatctgggaatttagtcctgtatagttacagtttcttctatcactgggcaatagaaaaccccaacaagaagccaaatatgactcaattaaatttctccagtacttatttaaaaaaagaagaaaagaaaaaagaaactgaagactattgcagtaatgtgatatgcattatatctggatccttggagtatatgaattatcttgtgtcaatttctgtggcagaggaaaaataaattgtataataacaaaaaaaaaaaacctttcccccaagagaccaatgtttggacagaaaagtcaatatagaccagcaatcaaacccttccttctcccagctatgtagtgacactgatactctgttgcacatttctgcaaggctgttggatttggtggaatttgaaacctcctgaattttgtggacatgtaagcattccaaaaatagagacagatgtcactcttctaggtccttctagagacgacctatgtggcatttaaggagaaaatgagtgtttcatctccatctgctgcacggagtaccattagggagagctggatcaaacgtcagggttagtggtgattcggcccatgagctgtggaagaaaagaaaacctccaccatagcatatgctgacaaattatgcaaatgccttattttcctgtttattcatccaacttaagacgctgcacacacaactcagtaaacgggatcataacacctggttgctcaggtcaaaaacttattcttgagttctctttcaactccttccccattatcagcaggtccttccctctatctacaaaacatccaaatctgtccattcctctccatcttcactactctcaccctagccaaagctacacttctctctcgtggactacttggcctcttaactggcgtccctgttgtcatctttgcctttcccccatacaagctacactatggatcttcacagattaagtaagatcatgggattctgcaaacaccctccattgccttctcattgcactcagaacaaaatccaaggcccccaaagccctacacctagcctctgcctacctcttgtcatactactctcctgccacacaggccattttgcaattccttggacacgctgatctctttctgcccccctcccctaatgatctttgcattggctgttccctctgtctggtcttgcgccaggtcttcaaagtgcagatctttacgatcgtgatggtctcagcggaaatgcatccttccctatcgcaggtatcgctccgactcccatcacactgacctccattgaattcagggatctgcacctgaaattatctttattttacagataggttcttaatgtgtttctgtctcttcccaccagaacgtgagctccccaagagcgggcgccttgcctctgtccactccagcacctctgcacctacaacgtctgacgaagaggggttgtcgaaagctatttgctaaatggggcaatcctgggagctgacggccgcggaacgggcaatgagaatacaaggtgacagggaccgcgcggggcccggagtcgctcggcgggagtcggggcccgcctcctgctggaagacgggcagctccccactctcattccagttttgcttctgaggggctcaggaggggccgcagcctgtgcccagtcatcaacatcaacaatcttattagtgggcagaaagccaagaggtggcgtggcctgccagaagagaccgggacccgggcagggaccggagccgggccggtcgggtccgggtccagaacgtagaggcgggcggtgcggggaggggcccagggcggccggccgagccgggaggacggagctggggcgcggcggctggggagccgggaccggcctcgccaacgccgcggcttcgcttccgggtgaggggcgggcgggccgagcagttccggggcgggcggcggttccgtctgtgcgggccgcgccgcggctgctggtcccgggcgcgcggagggcgcgagcggcgcgcgggggccgagggggcgcgaggcagcggcgcggggactccgggccccggcggcggcccatggggcgggaggcgtgaggccgctgcctgtccggggctcggggggtggggggagcggggcggggagatggataaactgaccatcatctcaggatgtctctttctggccgccgatatcttcgccatcgccagcatcgccaacccggactggatcaacaccggggagtctgcggg

SEQ ID NO: 15536 - DNA, 2300 bp, Homo sapien
gagtgaaacaagttggtgacctttcccctgtccaacagacctcctgagacaattcttttctggagagagggtccagaagcaatcgtagaaacagtgcggctaaagttaaggatattgatgagaaatttaaagagaatctgcttctttatcttttactcacagattcactaatccagatagaaatcactcttcaaggagtgaaataatatcaaagaaggatttagtttctggatttagttgaaatttgggaatgcatatgccttgaataccaaaaacctaaaatatgatttagcaaggtagtgtgagtcgaaacgttatatgctctcatgagctatagattcttatgacccaataaagggaaagaactaggattatctgttttccattccccttaagcagagaatatttaagtatgtgtagttgcccccaaatgcaatgtatttttttctttattttttaaataatttaactttttgaaataatatgtgcatatgatgcataattcaaaatctctgaaagggtaaccatgtgaaatcatatttggccctgtcacccagccatcccattaacccctttcctggaggcaaccatttttaccagtttctggggtttcctactagaggtattcagtgcacagaaacatatctattatgtgtgtgttccatacatacatatttatgtaaaattttttctactgttctgtatcttggtttttaaacgtaatatatctttgagctaatttcatttaagcaagcatagagctcccccatatcccgtgacagccccaccgaggacctcctggggctccctagtcaaacaggttaatgagtctaatggctcaaggcttctgagaacctccctggtgcatgaggaccttgagggtgaggataagggctgccttgcttttagcttccttaaatacattgtttttggtaccagaacgagtggctggggtgacagttctgagagggattgggcgccccctagtgtttccactccacccctgaaaaatgtactttattatgtgtatttctattcccgttaagctatagttttcataataatgtaagggtgatatcttctgatggccgtgcacagtggggaaatatgtctcagagaagagcccccacatgatgggggttccctatgggggcaagagaaaccaagatgagtcgtcctgttcttcaagtttggcccttgttctttcctttgccaccctgatttccaccctcacctaccagtgcacctgatttctgactctcgccaccaagaaatctgtgccatggaggatatgaaattgtgtctttacaaacttatttaggatccaaagctcagccttcaaagtttgatattatcagcattaataatattttaagatctaaagtaacttaatagttcacaatagcttaaaagaaaaactcatccacctgcattaaatctgctcccaggaagtatagagaacctgcttccttggatttaaaactaaggttaaacaggacttcattgttcccttaaaatttaagccttttctaacaaatttggaaaatatttaactcttgaaaatgttaaactctttggttgcagaatgattactccattataaaggatagatcttttttagagtagaaaataggaaatgataggaacaaagttggcatgtcaacataatgaacaaatttaacatctgcatattcctaaagtacttttctaaattacttgtttcttgagattagtcaacattaagaaaaaaattgttttacaacaataattttgccccattgttttttaaattagattgtgtatagttacctaaattgtggtttcattttactcaccagaccatattaagctgtggaaccattagaaattggtgacagacaacactgataagtgggcattggcagcactaatagttatttgttgctgactatgcaacaaaaaagctaaaagctataaaacataatgcctgaatttttcatttgttctatagtagctatctaaaaaaatccaagtttgcttatgtaatattatttggtgtggtcatttgcccaaaatgaaataagctgtaagtttgtataatataaaataatctacctaaatcgtacaagtaagagtgctgttgtttcttaagctgatgtattacttaagcaaatgttttttctcattgtattgctggagttattccttctggaaggggttcctaattgacttttttaaaactctgaaagttttgttgattggttaacacacaaaaaaatgtagagacgagtgtcagctgaaatgtttatccaggactctgt

SEQ ID NO: 15537 - DNA, 2300 bp, Homo sapien
aaacacattcctcacctcccctgctttggcatgtcactttaatcttttcgttagcttaggcttttacaaaagacagaaaaaacagttacttcaggctactgcttctcaacacaacccaaagcacctgctcctggtttgaaatgggggaaagaaagaaaacaaaacaaattaatatctgaaatatatatcccaccatattcctggatgggaccacgctagagctcctaaataaaagaccagagatgagctgaccctgatccatttccaagagcctaaggtaggagaaatgtctgttgtgctctgatgctttccatggatgccatcatgatctgcatcccgaagggagccaagaaagatggtacccacacagctttcctcttgatgagtcatacagtctgaaagccttactctgctttatccacctggcagagatctattgagaatgtgtgttgtgtaggctcaagtacaagaaagcaggaacaaagagtttccagtgttggactttacttctatgcacagtgttgaaaacccatgtatgcaggaagcaaagaaaggtgtgagggtggtagacgacctgcttggggctcccgtgcctaaaaaaaaaaaaatgttgtcaaaattagccagccccttccacccaaaatttccatcaagatgggcacaaggaccctcatctcttgttcaccgagtagccattggttgctcacagccacttatgaccttcttacctctttctgatcttcctcattttctgccttattggtgctggccacataacaaatgctgtggtcttatacatggtgctctcaaccccagtgaccagtggttgataaggagtttctattttgagcacgttggttgtttctgacctggcctataggcatggctgctggggtcaacatctgaagggtgttccctaccatatgatgactaccacaagtggcatatgttctttatttttgagacagggtcttgctctgtagcccaggctggagtgcagtggtgcgatcatagctcgctgtagccttgaactcttgggctcaagcgatcctcccacctcagccttccaagtagctgggactacaagcacaagccactgtacctgactaatttttattttattttatttttgtagagacagagtctcactgtgttgcccaagctgatctcaaattcctggcctcaagcagtcctcccgcctcagcctcccaaagtgctgggattacagacatgagccaccacccaacctcatgttctaactgataaaacttacaagtttataaaacttataaaattctcagaaagtgaaaactgatttgagaaatgacctggatatgaaaaactaagtacagatcctttagcgacttacaagttggttgactttggtgacatcactttgtctctcttgaccactataaaagaagggtttggagagattcccagctatgggccaaggactagttacatcataatcacctggggccattgttaaaaagtcacattcccacaccttttcacagttctgaatcaatctcctgaatgggaatgttttcctagcaaacaatccaggtgattctcatgggcatccgggcttaggaaccactgtggcagatgatctcttctgatgcgaagaggtcactgagcttggctgtgttagccaggtttaggtggggctggaccgggtagggataggggactgtctgacctctcccagggactgtgttcagggaacccaagggaatctgagaaggaagagaaagttaccacctttgacacatgtggcagagttctctggaacctctcctctgttcctaccacaggaaggccacaggcacgcaccagggctgtactggcctaaaccatagttctgtgctgactgagaggttctgaaattagaaaagaggtctaaatcctgcttccaggtttttgtgaggtggagaaaagcagagtgacctgggagaagtggttatcaacaacacagctggtgacttcttccctggggtgaggaaggttttccctttccctgccccgagctgcagtggtgcagtctgttaccttggagaccagctaacacattcccgcagggcaagcttcgctgctgagttgcttggaggagcttggagaaaccagaagtgagatccaggagaagtaaggccctggagtgccaggagcccttctcccaaagatggagaaataaatgaagaaatacaggtgagggtgagcatcacaagggttgacaggggtggtgagagggtgtcggggaggccagatactaagctctggactgagtgagaagatcg

SEQ ID NO: 15538 - DNA, 2300 bp, Homo sapien
tgtggtggcgggtgcctgtaatcccagctactcgggaagctgagacagggagaattgcttgaacctgggaggcagagtttgcagtgagtcgagatcacgccgctgcactccagcctgggtgacagagccagactccatctcaaaaaagaaaacaaacaaacaaaaaaaaactgaggtgcctgataaggcacagaagttacctaaatttctgttgtcatgctggaggcccagacatcccagtccattaggaagaggggcaggtgactgatgaaaaaaattctggcaaacccccatagctctctcactagcagctctctcactctcatctcacacacacacacatgcatacatacacatatgcacatgcacacacatacatatacactcctacacacatgtacacacccatactttttcacctcaaaacccagagtcccttctgaatctgctgcaggagaggggccaaacctgtctgaggagtcccctcccttaggctcctccctacaaaagttcctgattgacaaattgaggtcagggtaactgggatcctgcgtgacacagggaacactcctctgatgggaaagattgcctgttttctagagcattaaagatgaccctgacagagagaagagccccccgctgaaatctctgaaatggcgtccactcagtagcagagttggcatctcaccaggtaaggcaccatcacggtcaggcagggtggagggatgtcacggtcacggctgaggcatgggttaataatgatagtaactagagccacgtgtggaagctcgtgcctataatcccagcacttttggaggctgaggtggaaggatcacttgaggtcaggagttcaagacaagccttgacaacatagcaagactccatctctaccaaacaaaaaaggagccagatgtggtggtgcatgcctgaagtcccccaagtactcagaggctgagttgggaggattgcttgagcccagaagttcgaagctgcagtgagctatcattgcaccactgcactctaacctcagtgacagagcaagaccctgtctctacttttttttttttttttttttgagacagagtctcgctctgtcacccaggctggagtgcagtcgtgtcatctcagctcactgcaacctccacctcctgggttcaagcgattcttgtgcctcagcctcctgaatagctgggactacaggtgtgtgccaccacgcctggctaactttttgtatttttagtagagacggggtttcaccatgttgcccaggctggtctacaactcctgagctcaggcaattcatctgcctcggcctcccaaagtgctgagattacaggcgtgagccaccacgcctggccacatctcttaaaataataatcataatagcaataatgatagtaactaaaacgatcaatgatcctgagtcttgatcatgtgccagcccatctgctaagattgtcccatttaaagcctataatgatcaatcctttgcatctgtattctatcagcttcctattgtactgacaaaggaactgaggctcaggggggtaaggatcatgtgccactagtggtaacaggccttcacaatcttaatgaaagtactcagctcgtagaacctaagaccatgtattttatttctaatgtcaaaggtatggcagagtggctcagagcagagttctggagtcagcaggaccaggtagaatcatgccctgcctcttactggtggattcccacttaccttatctgtaaactgggggactgtgaggatgaagcaaggcagcatactcaaagcacttagcacaatgccagggaaagatctggactcagtaaatggtagctatagctatttctgatccaagcaaagccagagacctggcgggggaggacacagggtgccttgaagccatcttggagccccatttcctggggtggagtatagctgaacttgagtgtctctaagccaagctggacagctgtattgcaagaatgcatgcagctgctccagccaacaagccaaatgttcctcagctgcggcccagccaacgaaagaagggatgatggaactgaggaggaagaccaagtcaagggaagcagagacatctcttttactgttctacacagagaaagggaatgacgtgggtaagttagaggctatacaggtgtctggacagccccctggccctgggggagctgtaagggcagcaggtaccgtgggaaggagacccctcctgctgtcccaggacctaggcactggtgcctctggagcaagccgtactcaactcagttctcccagccctggg

SEQ ID NO: 15539 - DNA, 2300 bp, Homo sapien
agtatagctgaacttgagtgtctctaagccaagctggacagctgtattgcaagaatgcatgcagctgctccagccaacaagccaaatgttcctcagctgcggcccagccaacgaaagaagggatgatggaactgaggaggaagaccaagtcaagggaagcagagacatctcttttactgttctacacagagaaagggaatgacgtgggtaagttagaggctatacaggtgtctggacagccccctggccctgggggagctgtaagggcagcaggtaccgtgggaaggagacccctcctgctgtcccaggacctaggcactggtgcctctggagcaagccgtactcaactcagttctcccagccctgggaaatggacatgcaaagttttgacaacaaccagggaatgagagaagtcaatattgaagatgagacctcctgagattcttgggcactccagctctgtccactaggggcagtttccttagctctaaggcagatggcaagggatggagatgattcccctaggccagcctgattcactgctgtgaaatggtgcagatcccaagaacaattcattgctaggcaggaggtcccaaacagcctttccccatccacccaacagctccctttctacctctcagcaaattgcactaaggacttttacaactgacttgattgacagagaaattgacatgaaaaagggagcagtgggagattcagggggagggaagagaggtacacagggtgaccatcttagttcatttgtgcttggaatacccaaggctaggtgatttatgaagaaaataggtttttttagctcaggcttatgctggctggaagtttgggcatctggtgagagcttcaggctgcttccactcatggtggaaggcgctggggagctggcatgtgcagagatcacatggagagagaggaaacaagaaaatggggaggtgccaggcttttatttaacagccagcccttgcggcaagtaatagagggagaacttactcgctccccaccctctcaccagagagagcattgatctattcatgagggatccgttcccatgacccaaacacctcccattaagccccatctccaacactggggatcacatttcatgaggtttgcaggggctcaaccatccaaactatagcaatgacctcactctgcttcttctaggctcagtgtacaagaagtaccctcaaggaaggggcttgagaaggactagctcttctattgacttacccagaaaggatacagtttgctcaagccaagaggtattaagtcacccatactagcacatgcccattaagcaatagagtagttctgtccaccaaccattacttctaggatgggggggcataatcagaaatgagaacaagccaggcacagtgactcacacctgtaatcccagcactttgggaggctgaggtgggtggatcacttgaggtcaggagttcgagaccacctggccaacatggtgaaaccccatctctactaaaagtacaaaaattagccaggtgcagtggcacgcacctgtactcccagctacttgggaggctacatcatgagaatcacttgaaactgggaggtggaggttgcagtgagccaagattgtgccgctgcactccagcctgggtgacagagcaagactctgtctcaaaaaaaaaaaaaaaaaggacaaacctgataagaacaattgcttactgtggcagatgggataagggttaaatagacctaaattcaaaatctaggtctgccacttcctgcctgggtgaccttgggcaaatcacctagctatactcaatctcactgcctttgtaaaataaggacaattgtgccagtcaaataagattgatgtgaagattctttaaagtgaaatcaacagaaatcccacttcttgtgcataaggggatagttgtcccacagctattcaataaaagcctgagcatggttctgattgtgccgatggcagatgccatccctggctgctttgagcctgcccattcttgtgtccctcattgtgacaaggagactgagattatcctaattggcttagagtctaagctttagaccaatcagggctttccactcaaatattgtaggtggggtgctcacttcagcagcacatatactaaaaaatgttgtaggtggggttgaaatggatgttagggaagtaacagtgtccactagactagggtctgggaggtgcgcgatagattttgttcttcacccccactatttctttctttctttctttctttttttttttttttgagacagagtttcactcttgt

SEQ ID NO: 15540 - DNA, 2300 bp, Homo sapien
ctgggttttttttttttttaatgttttattttagagacaggggtcttgctatgttgcccaggatggttttgaactcctggccccattgatcctcctgccttggcctcccaaagctctgacattacatgtgtgagccaccttgcccggccttgagtaattttattttaccgcagtagacatctccttgaaggcaaatgtttcccccaattcctagcaccatatttggcacacaataggagcttaataaaatttgccataagaattaatgctcagaaactctactattacatcctatctgctcaactccctggaaaagagacattctctttttatggttactataaaaggcccagattagtatttcactggcctaacttggatcacatgctcatccctgaaccaatcaatgaggctgaagggatgaaatatgctaattggccaggtctggtcatgtgtccatttttggagccaggggagtggggagggctattttcctgaactgaaatagggtgaactggttccctgaagactaaccaagacgctaatgcaaagaaggacactcctgctgggcagacaaaaatgacagaggctcagagaagtaaaataacttgcccaagggccatagagctttaagcagtagcgtcttttttttttttccaatcttgctttgggcttggacagactagttcagcatctttgatcttcccttcctgcctgacggccccagggtcagaattccaggtgcaattttgtcttgccaaaagctggagtttactctctttggggtttataaataaggaaaaaagttctttggagagcctgaactttgaaatcagagaagtctggatttactgctggctctgccttttctagctgcctcacctggggcatgtcattatctctataagcctcagttttgttcttttttcttttttatttttttgtttttgtttttttgcgacggagtctcattccttcacccaggctggagtgtagtggcgcgatctcggctcactgcaacctctgcctccagggttcaagcgattctcgtgcctcagcctccagagtagctgggactacaggcgcgcccggctgcttttttgtatttttactaaagacagggttttaccgttttggccaggctggtctcgaactcctgacctcaggtgatctgccggcctcggcctcccaaagtgctgggaagatggaatgagagaaatccctcaaaacatgtcattgttactacttttctatctagaatgtgtgaaatttctaaaatttcactaacaaagtatctggaaggacctaatattaaagtgttcacagtagctattagttttaattcgttttcttttttataccttagccactctaccactcatgccacaggtatttattaagcatctactgtgtgccacccaggccctgtgtcaagagttaggaataactaaaggagatactaattttaaaactacacaaataattgcaatcgtcatacgtgcctgtttttacaaagcagaaatcaggaaaaacaaagtatttccgataaaaaatattttaaggttatggatagagatacatacaaacaagcgatgggcttggatcactaatgattttggaaaggacaggaatacaggaactaagcgagaagcaggcgagaatggcgaggcgcggcgggagaggacggaagttggtcactccctcgaattgccccctcgctgccggatgctaggccagccttgagcaggagaaccggacactgtgtactcagcagggggagccaagacttagcgctaaccattgcacctggggctgggagccagcgccggagccaggaggcccgctaggcggctgcaggcgctgtgatggccacctgggggcggccacgtgagcgccacgccgtgcgcccgccaggccagccccgcccctgcccgcccgcttctgctcaacctagaccagccccagcttcagcctcagctcccctccttcctggatcgagcgcccgcactcccggccctgcagccacccgagtcccgctcgctgtcgcctgcacgcgagtcccccctggcacgcgctcccacatcccgggatcgtcccaacggcccctgcgcccttcctgggatcactccgactgccccgcgcgccctgggatcggtccatctaccccgcgtggccccagctgcttgcccggagcgccagctagcgctccccgctctccgctccccggcactctcggggggcccgcccgccctgcaccctggagctccgggccgcgagcctctgccaactcctctggaccc

SEQ ID NO: 15541 - DNA, 2300 bp, Homo sapien
ggggctgaactcgcccttttataacaaatccactttcctcatactggcagaaatccattcatgagggcagaaccatcaaagcccaatcacctctcaaagatcccaactcctaatacctcacaatggcaagcaaatctcaacatgggttttggaggggacacacgttccaaccagagcaaggagccaggtgcagaaagagttggaggaagaatcttccaaggtgagggaacagcgggtgcaagggccacagagcaggcaggagcaggcatcgttggggaatggatggcagccggtgagcctggtgcaaaggtagacaaacaggagaccgtcctggagggcagcgcctgtcagacagggccgcagagggcactgtggcagcaaggcagggacagcaagtcatcagacctattgcttctggaatgtttcacgagacccacaggccttcttacctgtgtcgctgtatttgctctttcctgatatactataaatagttactcacacggattacacccaaagaaaaagagccctccgccctgtttgctgtgtattctgtggtgcgtgggtttggctggaaactttgtgtgccctggctggtttggccatacatgggctgcagtaggaggagttgagggtcgacgggcagagctggaagtggagactcaactattctggggtgagttctgcattgtgctggaggcaattttacataacaaaattcacagctgtcccgcacagcagagcatacggtgattgccattagtgcagatggctctagaggcctctgcagaggaccccgcccccaatccacttctctacaagtcagagggcagcttagctaggacactcaggcattgctaatgctagctcatggctgcctctgtgtagactgtaaaaatgggccccttcctcaagggggtgtcctagctaagctgccctttactttcatctatgggaaaattgttgtaatatactgattttattaaggaaagcaacttgactcctctttttttttttttttttttaacacagggttatactctattgcccaggctggagtgcagtggcatgatcatagctcactgcagcctctaactcctgggctcaagctatcctcccacctcagcctccggagtagctgggactacaggtgtccatcaccacacccagctttttgtgtgtttattgtattttttaatttttgtgggtacatagtaagtgtgtatatgggttacatgagctattttgatatgggcatggaatgtgtaataatcacatcaggataaatgggatatccatcatctcaagcatttattcattgtggtataaacaatttctttatactcttttagttattttaaaatatacaattacattatttttgactatagtcactgtttttttgttgtgtttttgtttttttgtagagacacggtctctctacgttgcctgggctggtcaactgctctcttaataaatattggccgagcacagtggctcatgcctgtaatctcagcactttgggaggcctaggcatgtggatcactcgaggttaggggttcgagaccagcctggccaacgtggtgaaatgccgtctttactaaaaatacaaaaaattagctgggtgtggtggcgtgcacctgtaatcctagctactcaggaggctgagacaggagaattgcttgaacttgagaggcggaggctgcagtgggccgagattgcaccactgcactccagcctgggcaacagagcaagactctgtctcaaaaatgaatgaatgaatgagtgaatgaatatcacagtatgaaggtgcctcatagatgtattggccttggacaagataggtcgtgaaccataggtggtggccctgctgggatccctgacttgcccctcctgctggaaggccctcctcctgccaccctgttgccatggtaacctccacctttccctctgtatctcctggcaaggtgccaagactggctagaggccctgcactggtacaacactgccctggagatgacggactgtgatgagggcggtgagtacgacggaatgcaggacgagccccggtacatgatgctggccagggaggccgagatgctgttcacaggaggctacgggctggagaaggacccgcagagatcaggtagggcctggcagacctgcccctgggctgcaacagggctgggcagggaggaacctaatttccattccactgggagttatttatgacaagatgacaggctgaatcttcttccagggaggggaatttatggagctagtatgaagatgaacattgttat

SEQ ID NO: 15542 - DNA, 2300 bp, Homo sapien
aaaacatacagataaccattttagatattattcataaattttatagtaaaaatgtaagaaattattggaaagatacacatcaaattcatgacagttatagacaggggagaatgggagggggacttatttctatttgcaatggtctaataatttctatttgtaatagtgtgatctattttttatttatttatttatttatttatttatttatttatttatttatttgagaccgagtttctcactgtcgcccaggctagagtgcagtggtgggatctcggctcgctgcaacctccgcctcccgggttcaagcaactctcccgcctcagcctcccgagtagctgggattacaggcatgtgccaccacgccaggctaatttttgtatttttagtagagacgcttgaacccaggaggcagagattgcagtgagcggagatcgcaccactgcactccagcctagacagcaagagcgagactccacatcaaaaaaaaaaaaaaaaaaaaaaaaaaaaaagaaaagaaaaaagaaaaggaaaaaaatgccacaatactaagtcattaatttaatgccaggtggtggcactatggatgataatttttttctttgtaatttttgtgcatttttgtttttaatatctttgcatatccacacggataggtattttaaaatacagtctggtgaaaaataacagccaattgcagatctatatgaataatgtgacaatatttgtgttcaaatccatacacaataaaaacaaagctatcttctatggctatatctatatatatccatatagatataaacatataaattcacagcaaaagatctagaaagatatatagtgttttagtccattttctgttgcttataacagaatacctgaaactgggtaatttgtaaagaaaaggaagttatttcttacagttatggagtctgagaagtccaaggtcaagagtgtgcatctggtgagggccttcttgctggtgggggacacctgcagagttcccaggcagtacaagccatcatatggagggggtgctgagctgctcccttgctagctaaggtctctctccctcttcttataaagccatcagtccccctcccaagataacccattaatccattaacccattaatccatgaatccatgaagagattaatccattcataagggctccaccctcatgatctaatcacctcttaaagggcccaccacacaatactgccacattggggattaaatttccaacacatgaaatttgggggacacattcaaaccatagttcatattaaacagataataatggttagttacctcggcggaggggcctaggatgcgagtcaaggtcaaagagcatttgtaccttatctgcaaagtttaaatattttgcaataattcgcgtgttatttgtgtaagtaaaaatttaaacataatttttcagagacaactgcccagaccagctccagggtttggccgtcagatcccctggtgcatgtttctgatcagatcaatttcttctcccggagacacccaatccgggtcgtatggattacctgtgggttaaccaggggtctccgggttaaccatccaactcagagtaaagtttctaaaaatgcgttttgctctaatacctattcggaaccaacctgggtctaaagactggagcaagtgtttattttccaaaacacggctttttaaaataattctatagggatcaccttgaacacacgttaagcaaaaaaaaaacctcagcgaaaacgcctcgcaatgtccagattaaatgcaaaagcaaaagcattaagtagctttctggcataaacatattgcagctgggtagcgtggccgagcggtctaaggcgctggattaaggctccagtctcttcgggggcgtgggttcgaatcccaccgctgccagggttgctgtctttttgtccccgctgcatacactcctggctcagttttgcgcgtgccatcagcgccccctgctgcagggcggggctcacggcctgcatgaatggcgcggcggagggggcggagccgcgtgcaccggggcggggcattgtgggtaagaggaaacgctggggccggcccgctcccccccacgtgtccgccggagtttctccaccagcaacatggccgccgcctgagaggagagccgggccgccgccgtctctgcagcccgcgggtaactgggccgttgccgccgtccgcgctcggcccccgcggagaggtgagtcccgtcttggcagtgcccgagctggggcttgagccggaccgcactcacgacgtgggcctgggcta

SEQ ID NO: 15543 - DNA, 2300 bp, Homo sapien
ggtgacactctttgtatcaacccagatgtactatccagaggaaggagctccagctctctagctgacagggcacctcagcctccctgatccctggcagggcagaggccaacagggcatagcaatagccaagaaagaacaattgcgtcttgggaacctcccaggccccagcctctcagttgtccactgcccagctgcagagaaggcaggagcttgacatatctgtggcacttggcagccggtgcagatggggtgaggccttgggctctccgctctacactgccctctgtctgcacagcagacagtcgagatgcactgaaactgtccagatgcgactcctgattttcattccatcctccatctctgggactgttacgatagctgtttccctgaagtttctctttctacccgctccatgtcttcctctgcccgaaatccttctgtagcttcctattaaatagcattcccatggttcatttatttagacaacaaacatgtattgagtgcctgctgtgtactaggcacttggggtaccacaagggacaaaatagaccaaaatctctgccttcacatagcttacagcttagtggcaatagagatgggcacagatgcagagctgtaaactgtcacatggtgatagacacctgctatggagaaaaccagagcagagaagggaattgaggggtgggggaggcagtttgcaatgtgatttggagagggaaggtcttagccacaaggtgacatttgagcaaaaaccggaaagaggtgaaggggggaccatgaggttatcgggggggtagagcagctacaaagccccagaagtgggtttggagcagagaggagggtaggaggcttgtgggagatgaggtctggcaggtcaaggggcaggagattgtttagggtttacatgggatgataaagactttggcttttgtctaggtgtggtggctcatgcctgtaatcccagcactttgggaggccaacacaggtgaatcacttgaggccaggagttcgagaccagcctggccaatatggcaaagccccgtctctactgaaaatacaaaaattagctgagcggatggtgcatgccaattattgcagctacttgggaggctgaggcaggagaatcacttgaacctaagaagcagaggttgcagtgagtcaaaatcacggcagagcacttcaacctgggtgacagagcaagacatgtcttaaaaataaataaatattagatagttcaaatgttaagtagatcagacaaaaatcatgctggtctcagccgggcgcagtggctcacgcctgtaatcccagcactttgggaaaccaaggcgggcagatcacctgaggtcaggaattcaagactaacctggccaacatggcaagtccctgtctctactaaaaatagaaaaattagccgggcctggtggtgcatgcctgtaatcccagctacttgggaggctaaggcaagaatcgcttgaacccgggaggcagaggttgcagtgagccgatcgtaccaccgcactccagcctgggtgacagagcaagactccgtctcaagaaaaaaaaaaaaaaaaattcatgctagtctcacccaagagcagaggtttgggaactgctgaggcctgggggtgcctgagtaccatcctacctatgaccacccctcttctctttgggtatgtgaaggggcagaccagctgaaatactcaacctgccccgtggagacctacagccttccctcttcctggaatttctcctcccctctgttgtcatgacttgcccaaagctctctcttcttccaggcgcacctaacgtgcctcctccccagcagaaaggcctttcccgcctctcaactcccctacctgtacctgtcacctgaggtcagacagcctggatttgaagtccagttcatcatcctgcttgctatgtgactttgggtcaaaatgcacacagtatctctgagttccagtctgttcattataaaacagtgacaatcaccacacctcatagggtcattgtgttgaatacaggacagaagagtgtgtgaagaggtcatttttagaccaaaaacacagaagagtcatctcactcaggattcgagttaaagtcagcttgaaaatcaaatatcagagagctttggactgtctgtcttcctgttcaacttctggctcctctttaaagcgtccccagggccctcagttctccagtgttttaatcatggctgggaccagccaacctctatccttctgtctggcagtgaattctctgtgagcagagaagaaaccattaaagccagtcatttgcct

SEQ ID NO: 15544 - DNA, 2300 bp, Homo sapien
tcagatagctctgtgagcaaggcaaacaatcatctttcctgtaaactgtttgctaaaaggcttctctgctggtactgagtatggcgagaactctaggttttctcactctaggtcccttgtgctttccactctattcagcagtctcctttaaggactgaagggtaaaacttcaggtaacaactccacagtgggaggtcttgtccttggcaagacttctccagagtagcctacagcctatgtgtaaggtaaccctggagtcaagtgctgtttgatacagcatcagcgtgaggttaggttatgctggtttgagcaaagatgggaggcagagagacaccctgaattttattacccacaagaattattcaggatgagtttttccccccttccaaattacccaagtctttttttatacagaaagacaaaaaaagtagcttgagtctataattccttccctacaatttcccttatttttaatgtgcaagtaactaaaaaagcaagatcacagaagggtttataacaaaaagccaaagtccccagcctcaaatcactcctcctcttaggaaaactttttttttttgtttggtttttgagacgcagtttttgcccaggctggagtgcaatggcgcaatctcggctcactgcaacttccacctcccgggtttcaagcaattctcctgcctcagccttccaagtagttgggattacaggcatgcgccaccacgcccagctaattttgtatttttagtagagatggggtttctccatgttggtcaggctggcctcgaactctcgacctcaggtgatccgcccgcctcggcctcccaaaatgctgggattacaggcgtgagccaccgtgtccagcctcggaaaactcttaattgcttcccatttttagttctggcagctctctccatatttgtggaaactattcattggattatcaatgtaaggtattatctgtcgactcacttctaaaatagatcaggatttaacactcctctccacctcttccctctctctgaatttctaacagtttattacctcatgttctagagataatctttcaattgtatacttaaacctcgatttttttttgtttcgttgctcaaagttagttagatattggccctgttgtcttccatcagctgcacctttacctttacgtcaaggttgagaacattgaccttcaggtctgtcatcctgcttaagagtttccgtgctttgtctgcaagatggtgcttaaagctttacctaggagcagtatttgctgggttatgtcggtggaggacagcgtgctctgcctcgctggctactaagtgctggagctgcagcctgtcccctccaggtgcaatgtcacgtccccagatgcttaacttgtggtctaggggtaccttttaaaaatcgttgcaacactgcttacaattttcgccctccaagtggacagcttcgggcatccctcaccgccccagattctcaagggggtctggtgcccaccgttttatgtagcgtgagtttaattcccagggctcagatgtcaaggagacaagagctaccgctcagtgggcgttttctcaacccaaactcccgatcgacctcgagtctccccgccggacccggagcaaatctcagagtcaagatgcgagaaggggtggccgggcggcggacctcaggcttccggcacccttgcgcttcccgccggcacgaaggactcccctggacaaccgcccgcctctcagaggccggagtcctaggccctccggcctgcgttgcctgtccacagacgcgccggcctcgggacacccaccacaggggtaagacgcgcctctgccagctccccagcccgaaacccagaacgccctcctaggagcctcacagcgcagatcaggggacgggctttcggccgcaccccttcactctttccccgccttctttgtttattccggacccaccattggctgcttgccctcgataccgggcgagccgccggtctttggagagaggcgattggacgaagtccctgccgctcggccagcagcccgctcgcgattggttgaggcgccgccgggggtttgaatcgcatccccggccggggagggttctgccaaagtgccacgttgggcccggcggcggcgtgaagactggcggctgcgtgagactccggctccaggcgttcgcaccgtaatgcccggccgttggggccgtcggtaggcgcgaggcgagtcgaggcagccggccggtcggcggccgccggcgggaacggggctgaggcggcgcagcggagtctgggcggcggcgcgtcc

SEQ ID NO: 15545 - DNA, 2300 bp, Homo sapien
aataaaaagttgtgaggaaaataagatggtttaattgacagaaggatggatacattaattaatacatgataaaattaatacagtaggttataaatagttgaatgtagattactgtgtaacttttaaaacttttttgtatatttgaaaatgtttggcccagcatggtggctcacgcctgtagtcccagcactttgggaggccaaggtgggtggatcacctgaggtcatgagttcgagaccagccggaccaacatggagaaaccccgtctctattaaaaatacaaaattagccagatgtggtggcgcatgcctgtaatcccacctactcaggaggctgaggcaggagaattgcttgaacctgggaggcagaggttgcggtgagccgagatcgcgccattgcactccagcctgggcaacaaaagcgaaactcggtctcaaaaaaaaaaaaagaaaagaaaagaaaagaaaagaaaatgttcataaataaaagaatggaggaaaagttgtaagaaaaacttaaaaaaaaaatctggcttggtgcagtggctcacacctgtaatcccagcactttgggaggctgaggtgggcagattacctcatctgaggtcacgagtttgagatcagcctggccaacatggtgaaaccccatctctactaaaaatacaaaaattagctgggtgtggtggcaggcacctgtaattccagctatttgggaggctgaggcaagagaatctcttgaacccgggaggcagaggttgtacagagctgagatcacaccactgcactccaacctgggtgacagtgcaagactctgtctcaaaaacaaacaatatccttttctatgtagaaaacccaaaataataaacaaaaaaaaactttctcctggaactaataagcaattataacaaggttgcaaaatacaagattaacatacaaaggtcaatctatttcttatatgcaagccataaacaagtagattttaaagtaaaaacacaataccatttacattagcaccctccaatgaaatagttcagtataagtctaacaaaataagtacaagatccatataaggaaagctacaaattctaattaaagaaatcagcctgggcatggctcaagcttgtaatcccagtgctttgggaggctcaggtgggaggaacacttgaggccaggagtctgagaccagcctcggcaacatagcaagaccccatctctaaaaaaagtttagctgggcatggtggtgcacacctgtggtcccagctacttgggaggctgagatgggaggatcacttgagcccaggagcttgaggttgcagtaagctatgatcataccagtgcactccagtgtgggcaatagaatgaggccctatctctaaaaatcaatcaatcaatcaaagaaatcaggccaggcgcaatggctcacgcctgtaatcccagcactttgggaggccaaggcgggtggatcatgaggtcaggagttcgaaaccagcctggccaagatggtgaaaccccatctctactaaaaatacaaaaattagccaggtgtggtggcgcatgcctgtagtcccagctacttgggaggctgaggcaggagaattgcttgaacccgggaggcagaggttgcggtgagctgagatcatgccattgcactccggcctgggtgacaagagcgaaactccgtctaaaaaaaaaaaaaaaaaaaaaaaatcaaagaaataaaagaagatcaaaataaatggaaagatagtccatgttcgtagataagaagactcaatattctaatgtatcagctcttctttgatctatatattcaatgcaatccctgtcaaaatccccataagttattttttggatactgacaaatttgttctacagtttatatggagaggcaaaagacccagaatagccaagacaatatggaaagaaaagaacaaagtcagaagactgacacacccaacttcaacacttactataaagctacagtaatcaagaagtgtggtgttgatgaaagaatagaacaataggactatttagttctattgttcaaaatagacccataaaaatatagtcaactgatcttcgacaaaggagcagaggcaatacaattaggaaagatagtctccaacaaagagtgcaggaataatgaatatccacatgccaaaaaaatgaatctagacccaaaccatatacccttcacaaaaattaagtcaaaatggattacagacctaaacataaaatgcaaaactagaaaactcctagaaaataacacaggagaaaatctaggtgaccttggggatgttg

SEQ ID NO: 15546 - DNA, 2300 bp, Homo sapien
ggctaatttttttttttttttttgagacagagtctggctctgtcacccaggctggagtgcagtggcgcaatcttggctcactgcaagctctgcctcccgggttcacgccattctcctgactcagcctcccgagtagctgggactacaggcacctgccgccatgcctggctaattttttttgtatttttagtagagatggggtttcactgtgttaaccaggatggtctcgatctcctgaccttgtgatctgcctgcctcggcctcccaaagtgctgggattgcaggcatgagccactgcacccggccagtcccaggtaattaaaaaaaattttttttgtaggaatggggtcttgctatgttacccagactggtctcaaactcctggcctcaagtgatcctcctgctctggccttccaaagtgctggaagatgagagctacagatgagagccaccacacttgaccatcaccagggttttctactacaatattgcttgaggcttttactgctacttggatttcaagcaatgtccccagttcaggtggaaaacagtcacctcgaaaatggagaagatgagtctgaggaagaattacattctacagaagaaatgcggtccaggacagtccacattcacttccttcattcagatactcatttcttagccacaattacccaattttgagccatgcttctataatgagataccactgagttctgcggttctaactccttaatctctcatgtcagtctcctcttgccttctgtcttccactgctttagggcttggattacatgcgtgagccaccacactggccccatgcacaatattaaccagtggaaccagcattcctcatataaaatcactttgttagccttctaactgttctttgcaatccagctaacatcccttcaaaacacacttcagggtaatcttttattttatttatttattttatttatttatttattttttttttttgagacggagtcttgctctgtcacccaggctggagtgcagtggcacaatctcagctcactgcaagctctgcctcccgggttcacgccattctcctgcctcagcctcccgagctgctgggactacaggcgcccaccaccatgcccggctaactttttgtatttttagtagaagcggggtttcaccatgttagccaggatggtctcgatctcctgacctcgtgatccgcccacctcagcctcccagagtgctgggattacaggcgtgagccaccgcgcccggcctaatgttttatttttacttatttattttttgagacagggtctggctctgtcgtccaggctggagtgcagtggcgcaatcttggctcactacaacctccacctcccgagttcaagcaattattctgcctcagcctcccaagtggctgggacttcaggtgcatgccaccatgcccggctagtgtttgcattttttgtggagatgggtttttaccatgttgcccaggctagtctcgaactcctgagatcaagagatctacccacctcggcctcccaacgtgctgagattacaggcgtgagccatcacgcccagcccagggttatcttttaaaaggcaaatctgatattattacttcttggtttaataattataatgctcctttccttttaggatcaggtctacacttctcaagctctactactaaaccatcagccattcctccaatcatgtcctacaacctcatgcctctctgtgcttgcacagactccctgctactatgaattttcaaaattcattagagagatcatttattttctcctcagtctgaattgtatgctaagccagtgggcactccctcaacagcccacacttacatctgtaatagcacctagcatccaacattaagattctcactataattgactgtgagcttattcagagtgggggctgcatcttttcctctttttcctttgggtttagcacaggacctggtacgtagtaggtgttaatatttgttgaatgaatgctgtatcattttacacatctatgcgttgcacatatgtctatactgtttctcttcactggatacatccaatctccatgcacagtattattattataattattattgagacaggatcctgctctgtcacacaggctggagtgcagtggcacaatcatagctcactacagcctccaactcccaggcccaaacaatcctcccacctcagcctagcaagtagctaggattacagctgtgcaccaccatactcggcaaatttttcaattttttgtagagaggggatcttgctatgttccccagg

SEQ ID NO: 15547 - DNA, 2300 bp, Homo sapien
ttccagcactttggaaggccagagcaggaggatcacttgaggccaggagtttgagaccagtctgggtaacatagcaagaccccattcctacaaaaaaaattttttttaattacctgggactggccgggtgcagtggctcatgcctgcaatcccagcactttgggaggccgaggcaggcagatcacaaggtcaggagatcgagaccatcctggttaacacagtgaaaccccatctctactaaaaatacaaaaaaaattagccaggcatggcggcaggtgcctgtagtcccagctactcgggaggctgagtcaggagaatggcgtgaacccgggaggcagagcttgcagtgagccaagattgcgccactgcactccagcctgggtgacagagccagactctgtctcaaaaaaaaaaaaaaaaattagccgggagtggtggcacatgcccatagtcccagctacttgggaggctgaggtaggagtatcacttgagcccaggaattcgaggctgttgtgagctatgatctcactactgtactccagcctgggcaacagagtgagagcctgtgtcacaatcaatcaatcagtcattaggctgggctctgtgactcatgtctgtaatcccagaactttgggaggctgaggcaggcagatcacctgaggtcaggagtttgagaccaccctggccaacatggtggaaccctgtctctactaaaaatacaaaaattagccgggcgaggtggtgcgtgcctataatcccagctactcagcaggctgaggcaagagaatcattggaacccgggaggcagaagtcacagtgagccaagatcacgccactgcactccagcctgggcaatagagcgagactctgtctcaaataaataaataaataaataaataaataaataaataaaattaaaaccctggtggctaaaagaggacaggaacagaatctggaatagaaaagacccaaagccctgtatttcctgttatagcttatttgctgatagatgtcagagcaatggaggaatggcaagtgtgtttttaacctatctctctgaattttctttgtattctcaaagaacacgaaggccctaaagcaatagttctcaaccttgttgcacattagaatcacttggagcctgaaaaagtcctgatgcccagaccataccctagaccagttaaatcagaatgtctggggcgtgagatccaggcatatgtgtttttttaaaatataaaacaatacttcatttcctttattacctagttgtatcgttaaaataagaacaaatacagtggaatggaatacttcatatgacttcatgtgaaaaatacttcattatacaataaacaaccctcatgcatttcaacattgccaccagtaacactaaagactcccagttctattcatatgtgatcatcactgccctacaccccaaccccagctcctccaagcttcaacaggcatcagtatttttcgtagcccctggcttattccatcatgcagccaatgtgggaatctagagattgacttccttggaaacagaggctctagagactaattcttattggctcagctatagacacgttggcagccagacacgttggcacactagtctcatggtactataagcattttttagaggtataaactcaaacagcacactcaagtgtcatttatctttgagtgataatttaacagttggcatttggtggccccacatagctaatgctaatctgaaagtgtccaactgaagtccacaggttaattgcacacttagcaggatatggtgtgatgatcagagaattctttgagattcaccagtgtaaagaatttagcaaaaatgtggctgggcatggtggctctcgcctgtcattggatcccttgagtccaggagttcaaggccagactgggcaacatggtaagaccctgtctctacaaaaaatacacaaattagccacatgtggtggtgcacacctgtagttccagctactcaggaggctgaggcaagagaatttcttgagaatttcttgagcccatcaacaggttttgaatgttccagtcttttttttttttttttttttttttttttttgagtcaggggtctcattctgtcacccaggctggagtgcagtggtgcgatcatggctcactgcagcctcaacctcctgggcgcaagccatcctcccctctctgcctcctgagtagctgggacaaccatgcccggctaattttttttacaagaccactgttaaaagcccggaagaatcctgcagctcgctgtggtgggctgttttgcg

SEQ ID NO: 15548 - DNA, 2300 bp, Homo sapien
aagactccatctcaggaagacaaaaaaaaaaaaaaaaaaaaagcctacatcaaggaaaacagaaccaaaacaccagggacaaaatggtacataagaggcaaaaaaattttcaccaaaattattcagatgaacaataataaatgtgcctgcatctgaagatgttctaaaccttcatttaagcaagaagcaagatcaagatctgttccgtcagttacctggagtctgtcatctttctgaataggggacagaatcacctcaaatttaactaataaaaatttatgacttggcaaacaccccaggtatttttattgactaacaaatcagctatgacaatcttagcaacaaatcaagttatgctatggggtatgtccacacttccctgttccctctacaacaggagaaaatcaaatttttccaacatcctaacaaactgttactgcctgtaaccaaatgtatcacagtatcgtctaccaaggcgttacatcctgaaactttcctacaaaaagcacagcttcaaagaaaccttgcaagctttcttgtaagctcctcccttcccccatcgcccctccccagagccaagaaataaagcacttgaaagaaacaacatggataatatttattaatagctcatgtacatattccataactacataagccatttggcttcatacctgtcagcaatgaagtcagctggccctagcacgtggctgcgactcttctctatttatttagaactacaaactacaatttacacttttccaaaagctgtaggactatttgggaagggcactttattcttctaaaaggttactaaattctcttatatacttatactgatcacaatactgaaaaataatagaaaatccattgtcattcatttaccacctaatttgttaagatgccagaaaaccaaattttacacatttcaataaaaaggcaaaactaagcatgtcaatcataggaaaaaaatacttaatcaactaattttatttaaagcactcacaaactcttaagtggtacaagacaagtcaacgctgtttatcgaacaatatttttttttacgactaaacatctcaattctagactcaggcactaattattaaagtcatgtagttatatacaccaattctcaacagacacagttttttttggaaaggcatattaaacagactaagatgtgtactacccattagccaaagataattttattgatttttctaacaagtcttcaaatgttacattctaacatcttagcaaattatttccaaatactgctggaattacatgtaactatcaggaaacaaaagggcttctcaacaacttgtgcgttctacattatctggccagtttccggacaattataatacaattgtgctccaaagtaggagagttccatgaatcaattacccctaaaatatatttctgtatatttaaggagttctaagcattgggttaaattccaaacagactctgaatacaagcatttatttagtaagagaggttagaataaatcaatcctaaattaggcacagctgccctccccccattgatcaaaaagacaggaaattacatttatttaaaaagttaatgttcctaatatattcaaatctaactaagccccaaaacggtctgacatcaaatcctccataaaagaggaaattctctagacttctaagtgggtgcccagagttcactcaagtgtccaggtatgaattacgattcaccagagtaaccggccttgcacttagggaaaacttccatcgcccaagaccagagtaggtcgatcccatcaacagtcacacaatctcatctcacgctccactaatgaatgttctgcctaaagtcagagcaatgccttagctggagttttgttttggttttttcaatattaccacgtgggggtcacagaaaggaacagaggttagaagagctctcacgtggcggctgaaagactggggaaccgagaaagtgaatgagtaacagggagggtcctggactctcaggatctcccaactcggggtcagggggaagcggtaagtggaatgccccccgcccccccacccccgcctctttctcacctcctggtcccgaccctaggccagtgccaccgccgggagccccgggtctcggcttcagccccgggctgaacaagcagggaggggagaggcacttaggcctcgcctccccgcggccttcctcccccagccggggcggaggagacccaggaagctgcgcccggctcccgggggtggagggcctaggcctcggcccgcccgaggcggagcccgggaggtcggggc

SEQ ID NO: 15549 - DNA, 2300 bp, Homo sapien
accagggaagctcactctattttttatgtccagcgtttttactggggttccatggttgcatgcccatgtggctaaccttagtctccagccccactggaggccaagctgatccatgtgactcaaagcccccaccataagccacattattagactgtgctgtggcctaaagcccccagatgaacaaggacactttcccccaccgccgcccccccccactttttttttggagatagtcttgctctgttgcccaggctggagtgcagtggcatgatctcagctcactgaaacctcagcctcctgagtagctgggattattacaggtgcccgtcaccatgcctggctaatttttgtatttttagtagagacagttttcaccatgctggccaggctggtctcagaatcctgacctcaagcgatctgcccgccttggcctcccaaagtgctgggattacaggtgtgagccactgctcctggccaggaccctcttattaggtatgacatttcaagagtttagagattaccttccagaattcacaggtagaagccagacctctccttggtgaagatacaattctttacaattttacaatagttaaatatattttatcagtctatattggctgtttagttgacagacagttaaaaattggtgacagtccagatgtggtcactcatgcttctaatcctagcattttgggaggctgaggtgggaggattgcttgagtccaggaatttgagagcagcctgagcaacataatcagacacctgtctccaaaaaacataaaaataaaaaattagctaaatggagtggcatgcacctgtggtcccagctgtttgagaggctgaacccatgaggtcgaggctgcacccatgaggtcgaggctgcagtgagctatggtcatgccagtgcactccagcctgggtgacagagtgagaccctgtctcaaaaaaggaaacaaatcacccataaatggataattaagatttggttattatagacacttaatacttaggtagctaaggtagttttaccaataaattatattaatttaatatttcagtattgcaaaactgatgcatactcatttacaattttgacatggaatggttctgttttgttttattaaatttgaacttaaaagttctctgcaagaagagatttgtataataaattctctgagcctctcaaattaatattttagccatagactcatatttagagcagtgtttctaatgtaatgatacaaggcccagggttattcatagtttcaccgtttctcttattcctcattaaagcatgtttgaatccaggtaagaggcattacaggggaaaaccttgaatttatttttgaagggtaaatcatttccaagtggtattaaccattagtatggaaagcaacatatcctataactgctctgtgacagtgagactatctttgctgctttagagaataagtacattcctacttcattggctttagtgcaaatctcatttcctggtttatatccattacaaattagatctcaccatgagagcaaaatcccttaataaacctaggtaaaagcaatttgaagtaatatgatgcttactccagtgacaccactaggtgtggtgtttgcatcaagtcattttggggtgctttatggaaatgcttcctagtagggaattccctgacttcacactttccagagatgatgctctctctctttttctctctaatacttacaagaatggactgcaaggctacatttagtcaggcgataccatccccagcacatggtggcttgttggtgtgaggtctaaggattccggtcatttgaaacgaatggcctcctagatttgtggcatttttctgtatatggagaataggtaactaaaataagtggtaactgtatttgcatgtgatttgtatgtgatagttaacatttaaattctcttatgtactaaaatttttttggttgccacattaagcctctttatcctgtaaggcacagagtgtctttccacctcaatttttgctttaatgtatgaaccctaatgggaccatagttcaactaaaggcacctaactcatgaatgatatttgctccatgtttgaacaacaaatgttttaacccactgtcttcactaatattgtaactactgtcttacagattgacttgatgcacaacatcacaaaggcgatttttgaggtatgagctttagaaacttacctctcatgtggcatgtacatcaggctttaacttcagtttgatcgttttggggaaatttatgcatttctttttttttctctccatgat

SEQ ID NO: 15550 - DNA, 2300 bp, Homo sapien
tttagggtatgctgcttgaaaaccagatactttttaaaagaagcctcttatattttttaatttggattttttggtgttttttctcccccctaccctttcacaatttcttacgcgattccaagggtggttgcagagtttggagccattttgggtagctgatcttgcattttctacgcctctacttggtcagtttctagaagacatggaagcatatgctgaggtgagtatatagaaagctgtttcttaaaattttggttaagaaaaaatcttaaattgtgctagatttattttaaaatggctcagacctcctgacatttaagcagaaattacaagcccattgcaatattttgaaaaattttttctttttgagacggagtctcgctctgtcactcaggctggagtgcaatggcacgatctcagctcactgcaacctccacctcctgggttcaaatgattctcctgcctcagcctcccgagtagctggaattacaggtgcccgccactacgcccagctaatttttgtatttttagtagagacggggtttcaccatgttggccaggctggtctcaaactcctgaccactggtgatccagccgcgtcggcctcccaaagtgctgggattataggcatgagcccccgtgcccagtcagtattttaaacatttatttcagatgtgtttaagttaccaggagaattactggagagactaaaagaaacgttgcaagcttcgtatttcgcaaagctttacatactctcggtagctggtatttttctaaagacatattttgttatttatttttattttttgttcccagtcttcagagtcttaaagcaaattgatgttgtgttataaaaaaacacaaaacaccaaaagctcctaaagattttcctcttacatatgtacaggagatcttgaatcgtactttggaggacaagccttggcttcagccagcttttgtggctgtacgaatatagcataggagctttaagagcgctgctgaagcctctgttactggtacttggcttttctggccccactgtcatggcttaactctgtgccatctcttatctgaatctctttgtgtttctcccttattcagatcaaccagtcaaggctcccataaagattttggcctcatcttgtttttttcatctttgctgcttgtagtcaacaggaattcagtacctttagctgtactgatgtgtttactctttcctagaaaagcaaggaaatgttttgcttctgcgttgttttttctttgcccccacacctagaatgtcttttttcacagcccacgtttaaagctgatctacctctcataagccacacattctagtttgtagagatgcttccccttgttatccttaagatctcattctcttctgttattttggtgcttaattttaggtagatgtatacattggttctggtatcctagtttttgcgaatcttgtccttttcatatatcgtacttcttcagttacacatctgtagaccaggtcttgtaatctccctttgctcttcatgtgcatgctcttggtttggaggacttactgttgagctgagtggctcaaagaatacctagaatgagatttttagccaaaaactaattcaggagtggcaaaagcttccgtcttcatttatacctacatataactagagcatatgtgctagaatttatttttccccaacagctttctgagttgatttaagagattatttccttaatttgttgtctattgggtttaatgttggctttttgaaataattaggtaaaacccatttttatattcagagtcatgaatattctcatgggccacagttctctttctaaaagcctaaaaatctattctaaaatgaattgattgaaatattttagagtttttttttgttttgttttgtttttttaaacaatgtactacttattaagaatgctgtgaattcacatctaggacctcagccatgtggccgctggggaatcagtggatgaagacgtccctcctccatcagtgtcattaccaaagctggctgcgcttctccgggtatttagtactgtggtgaggagcactggggaaagcctcagcccaattcgggccctccaattactgaggcatacgtaacagatgtaagtgcttttgggcatttgaagtgtcattcaaaaataaaattgttttacattgtaaatgcttctctttaccaggtgaactgttattaatccttcatttgtttagcatgtatgtatgtatgtatatatgtatatattgtctgactgctttcttaaacaaccagaaaagcagg

SEQ ID NO: 15551 - DNA, 2300 bp, Homo sapien
ttaaattcttggtctcaagtaatcctcctgccttgccctcccaaagtgctgggattacaggtgtgagcaatcatgcctggcctcctttaattttttttttttttttttttttttttttttttgagacggagtctcgctcttttgcccaggctggagtgcagtggcacaattgtatttttagtagagacggggtttcaccatgttagccaggatggtctcgatctcctgacctcgtgatctgcctgccttggcctcccaaagtgctgggattacaggcgtgagccaccgcgcccggccggcctcctttaatttcttaaccataaatatcctccccccacttttattatggacgttctgaagcacataaaaatagggagcatagtataataaatttgtacatatttaacactcagcttctataattagaaacaaatggcccatctggtttcatctaggcctctttgctatcctttcatctccaactggattattttaaagcaaattctagatgacattctgctgagcatttctgccagaattacacctctctttgctaatgtgaaaaaatgcccatgataactgtaaaatacgtgtgtcctatttaggtgtctaaacactttaatgtcacagtattaaggccttaaaatatagcttagatatatttttctaaattaaaagacttcattttttagatatacagaaaattgagcagaaaacagtgagttcccatataccttcttcatcccaacagtttccccctcattaacatattgtgttagtgtggtacatttattacaaaggagtgaatattgatatattattattaactaattttatagtttactttgtgttatgtattctatggactttaacatgtgtaatgacatgtttcccctattaccagtatcatacaggatagtttcacttccctaaaaatcttttatgttctacccactccttcctcgttccctctccccactcctccctccccccatcttaagcccatggcaacccctgatctttttactgtctccatcgttttgccttttccagaatgccatgtagttggagtcatatagtatgtagccttttcagttggcttctttcacttaccagtgtgccttgaaggtttctccatgtctttttgtaatttgagaagctcattttttaaaaattttattcttttagattgttgaacagataaatacgaaactgccatcatcatttgtagaaaaactgtttataccatcatctaaactactattcttgcgttatcataaagaaaaagaggtaagtaatacactgataatgaattttgacaacttgagtcactgaagagttggacctaatgttgcttaccccaggctatataagtgaaattgagtgaaatgtgaaatgtttgatttagaatatagtgattgtatttgttcttttaaatttatatttcttgataatcatactgaatactttcatgaatggtgtgccagatactcttttcagactatgcatcttttgctgttattaaatttattaaattttcataagggtaaaacaagttgacacatttataaagttataaattaagaagtactgtatatttggtaaacaaaaatgactggcttttcaaccaccccctagtcaaatccaccacagactttcctggtagatttaagaaacccagtcttaaactgctgtttgcatatgtcttttgatgttgattattaaaaaaaaaaaacaaaaacggccattttggaaatttcctattgacagttttcatttatagtactctttatttgtgataaaacttaatagatttgaaatagcatactgatctgtgtcagttttctgattggtttttaaaaaattaaaatattaaatgctacagacagtgaattgatcgatcttaaatttatttgtatcatcagcactaatacagatagtgatttattttccatataattttagaagatttattttccatttatcacttccttgaattttttgtttttcaggttgttgctgtagcccgtgctgtttatcaagcagtgctcagcttgaagaatattcctgttttggagactgcctataagttaatattgggagaaatgacttgtgccctaaacaacctcctgcacagtctgcagcttcctgagtcctgttctgaaataaaacatgaggcttttaagaatcatgtgttcaatgtagacaatgcaaaatttgtagttaaatttgacctcagtgccctgactacaattggaaatgccaaaaactcactaataggggtgagtctttaattgtaa

SEQ ID NO: 15552 - DNA, 2300 bp, Homo sapien
atggcagattctaaagcacagcagtccccaacatttttggcaccagggaccggctttgtggaagacaatttttccacaggcggcaagggatggggcgcaggatggtaatggtcttgggatgaaactgttccaccacaaatcatcaggaattagattctcataaggaatatgcaacctggatccctcgtgtgtgcaattcacaacagggttcatgctcctgtaagaatctaatgatgctgctgatctgacaggaggcagagctcaggcagcaatgcaagcaatggggagcagccagaaatacagacgaagcttcaattgttacccaccattcacctcctgctctgtggcccagttcctaacaggccacagaccagtacatgtccatggcccaggggtcaggcacccctgctgtggcacattgcttaatagaggactgtagcagccatgtgccctgacctttcctttttttttttttttttttttttttttgagatgccagaaacccagaatttttttttttttttttttttttttttttttttaagacaaggtctggctctgttgcccaggttggagtgtaggagggcgatctcagctcactgtaacatcaacctcccaggctcaagcaatcctctcacttcagcctcccacgttgctgggattacaggcacactccactacacccagctaatttttttgtattatttgtagacatggggtttcgccatgttgcccaggctagtctggaattcctgaggtcaagctgtctgcccatctcagcctcccaaagtgctgggattgcaggagtgcaccaccacacctggcctgaaacccagattttatttatttatttattcattttttgagatggagtcttgctctattgcctaagcttgagtgcagtggcgcgatcttggctcactgcaacctccacctccctggttcaagcgattctcctgcctcagcctcccaaagtgctgggattacaggcatgcaacaccacacccagcctgaaacccagatttttaatatgaaatcaaagtcttcagaccttgtaggtgtcataaaaagcacgctgaggaccactagtttgcaactgccaatctaaaatatcatagacattatatcacttcaaccacgaaaaaaaaagtatgtgaggcagaaaatggaagcaaccatgcctaatttattgttgaatactttttccgtataccaagagcttcctttgcactagcatctgaaactatatccagaatgacactggttttcataaaagtgttgatcctcacacctctttatagtcttgcacctagcacagtggagtgaaacactttaaatagcacttgttccttgagtatatatggaaaaaagtgaagtattgataagtgctcagctaatatgagcagcatctcaggagtctccaattcttgaattaccagggagtatttttaccattttcccccagtgaaaggcctattttgagagacttaccctccaaaatgaatgtattaagtcatgttccttttttttttttttttttttttttgagacagggccttgctctgttgcccaggctggagtgcagtagcatgatagttacaggaaaggggtcccaatctagaccccaagagagggttcttggatcttgtgcaagaaagaattcagggtgatgccacagtgtgaagtgaaagcaagtttattaagaaagtaaaggaggaggggcacggtggctcactcctgtaatcgcagcactttgggaggccgagacaggtggatcacgaggtcaggagatcaagaccatcctggttaacacggtgaaacctcatctctactaaaaatacaaaaaaattagccaagtgtggtggcgggtgcctgtagtcccacctactctggaggctgaggcaggagaatgggatgaacccgggaggcgaagcttgcagtaagccgagatcgcgccactgcactccagcctgggtgacagagggagactccatctcaaaaaaaaaagagagaaagtaaaggaataaaagaatggctaccccatagacggagcagccgtgagggctgctggttgcccatttttatggttatttgttgatgatatgctaaacaaggagtggatttttcatgcctcctctttttagaccatatagggtaacttcttgatgttgccgtggcatttgtaaactgtcatggtgctggtaggagtgtagcagggaggatgatgggaggtcagtcttgtctctattttggttttggtgggttttggccagctccttcactgcaacctgttttatcag

SEQ ID NO: 15553 - DNA, 2300 bp, Homo sapien; identical to SEQ ID NO: 15502

SEQ ID NO: 15554 - DNA, 2300 bp, Homo sapien; identical to SEQ ID NO: 15501

SEQ ID NO: 15555 - DNA, 2300 bp, Homo sapien; identical to SEQ ID NO: 15500

SEQ ID NO: 15556 - DNA, 2300 bp, Homo sapien
cttccaaggtgccagctctggaacgaaggatgcccttgggaggtgatgacactcaggtacacgggtgctcaacagattgcttcctcctatcctcagacggtctttgcatgcatgcagccattggcactcccattgtgtggaaggaaaccagcccagggtcacacagctggtcagcagcaacatagctggtctcaaatctaaggtgcctgaccatgcctccatgagggaccgcctccaagggaggttgatcctggctttggggagcctttcctgggctgcacgaataacctccattgttcgagaccccaaactctgctcacatcttcctttccctatctctgcttgggctatgatcacggtgactctagcagcccttcatggacattatagtactctctgccattcacttttgctctaatctgacttcaacccccacttacttggtctctccttttacaaccaccacaaccgaaatctagggctgcttttttttttttttttttttttgagacagagtctcattccattctgtcacccaggctggagtgcaatggtacgatctcggctcactgcaacctccgcctcccgggtccaagggattgtcctgcctcagcctcctgagtagctgggattacaggcgtgtgccaccatgcctggctaatttttgtatttttagtagagacggggtttcaccatgttggtcaggctggtctcgaactcctaacctcgtgatccgcctgcctcagcctcccaaagtgctgggattacaggcgtgagccaccatgcccagccaaatctagggcaggaacatggctgcagcatataaaaagaattgaattccatacttttgttaaccctgttttttgtttgtagttgttgctgtttttgagacagagtctcgctctgtcgcctaggctggagtgcagtggtgcaatctcggctcactgcagactctgcctcccgggttcaaactattctcctgcctcagcctcccaagtaggtgggactacaggcgcccaccaccacacccggctaatttttgtattttattagagacagggtttcaccatattggccaggctggtctggaactcctgaccttgtgatccgcccacctcggcctcccaaagtgctgggattacaggcgtgagccaccacacccagcccctgttttgtttttgttttgcttgcttcttagggttgtttttctatttatggtaaaggcattggctttccatttgtagcatcaatagaatatttcctgtttacaataaccttatgtcatagtaaatggtaaagggatttaaagcagtggttttcagctgccagaggcctgagagagtttgggcatactctgtgtgatcgggcagaaggcctgtgggaagtttagcagaggacagggccaggaaaggtgatggacagtgggggtctgtcctggtcaccaggcccctgggtcctgcccacctgcttggagctccccacccatcacacatgatgctgccaagccctctgggtattgtgggcaaataccttaggagagaagctgatgaactttgtttcttgaaatgcacagattccttggacgtccctgagagctcagtcatgaaagtcaacttggttttctccccctcatttgggttcagaatttaaagtccacacacacaggcagtaagatgatatagataaggacgtcatcactcggtttcggatgttaaaatgtctaggtgggttagcggtgatttgagatcacacaaccttgtgccacaaagaggaattcccaggccagagggagacattttattgccatgttatgatctcatcattgagttgaaaggcaatcttgtttcattttggattctttcttatgtttatgtcttataagggcactttgaatttccaagcaaataataattttgaattagcttttaatcattgacttctagcacagttatatgatcagaaacatgctgtgtgatttgattgctctcaaatatattgagatttgctggaacaaaataagtcaggttaatttttgtaaatgtaccaggcatgcttaaaatgaatgtatctacatttgttcctgagatacaggttgatggacggatggctacatggatgtgatggagatggtttactatcgggaccttccgcaccctgctgatgttttgttgcttaggatatgaatggctgagcggaggctgtaaaacctggcactctgcttgggtatgaggttcttcctgccatcctgccatcatttgttttttatgttttgtcgccataagtgaccttgaggaaccctg

SEQ ID NO: 15557 - DNA, 2300 bp, Homo sapien; identical to SEQ ID NO: 15498

SEQ ID NO: 15558 - DNA, 2300 bp, Homo sapien
tgtactgagaatggggaaggaaactatcatctcagaagtcagcaggcagtaagcaagaggaggaatcaatacagcaacagtttggatcagactgtacagtttttttgtttttgtttttgtttttctgagatggagtctcgctgtgtcacccaggctggagtgcaatgacgtgatcttggctcactgcaacctccgcctcccaggttcaagtgattcccctgcctcagcctcccgagtagctgggattacaggtgcctgccaccacgcctggctaattttttgtatttttagtagagaaggggtttcaccatattagccacaatggtctcaatctcctgacctcgtgatccatccgccccgccctcccagagtgctgggattacaggcgtcagccaccgtgaccggctcagactgtactcttctagccatctgaaatacgttttctaggtagagatagattgtgtaagggtacagttgtgaggataacagaaacatggcagattatttaaaatcatcctgaaagtggtgctttatctgatgaaagtgattgtaatccataggaaaatgtttcaacgtgcgcaagagttgcggcggcgagcagaggactaccacaaatgcaaagtaaggagcttcctccctgcagttgcaggatagttcagtgctgatgcagatgatgccacggcccttagactctctcaacattcaatttctcatgtgttggctttttcagatccccccttctgcaagaaaggctctttgcaactgggtaagtttgcttgttttccttgcttttggacatagtctgccaggtcaggacatggatacatttttctccctacagctctgtgctcaagccctgcagagggagatggcagagagaaaggctgcctacaagcatcacagtcccatccctgttggtaaccgtgttgcgcaaaaacaccttcatccccacccagtggggcccctgatctaatattctaagtgtcagaggttccgtatttgtaatagcagatgggccctgactgtaaactagtgaagagtgaatgtaacttattacccacagggacaattccaaatgaaggccttaaatgatgctcagctaagctggttcttgtgtggcctctgtaccttcaaaagctgccgagtcctatgattacacgtgatgggacttgtacacttgaagtgaaacacagttttaaaacttgctttgtttagaattcccacctcatttttccatggacaaaagtattctttatgtcctagtgcacttacaatttggtattacctgggagtgaaaagaaatattacagccatgcctaagtgacttcttgaggtgagattgttctgtcagaaaaccctctcccagttcccctgcagctcttcaggaatccacatctctccagagctctttgttctcatgggtggcacctccagagtgaagaagatcctttgtcaagaagggaaacagaagggaaatgagagggtcctgcaggcagagctggaatcaacttccactctgcctcttgcaagctgtgtgaccctgggcacaatttctccttcctctggaaacctctgttttcttagatttggagcagggtggtcacactgaccttgcagagttctgagaatcagagacagaacataaaaggcctggaaaacattctccaaaaagaagctgcaacatgtgtggacagtgggcttttcatgcctctcttactgtctcttactgtctgttgacctggtgcaagaaacatgctctggtgatggctgtgagggaggaatgaggatagacatagacactcctgtgtctcaaacatgcttctttattactctgttatgactctgtcttccctggggcaggaccccagcctgcctacatttgcagacagacacagtggcatgtggagacaacagtgtgtcccaatgactttcctttaccctccagctgtcggcagtactcagtggaagggtgatattatgacactgatactgctattttgaaacctggaggatggaaaggtgcaaaaatctatcaccagcaacagaaggtgcagactgtgttggtggcggtaattttgtccatcaaatgaatatgtgtgaaaacattccctcctttggccctacaggtcagaatggcggcagcggagcatcgtcattcttcaggattgccctactggccctacctcacagctgaaactttaaaaaacaggatgggccaccagccacctcctccaactcaacaacattctataactgataactccctgagcctcaagacacctcccgagtgtctgctcact

SEQ ID NO: 15559 - DNA, 2300 bp, Homo sapien
ggggtggtgactcctttttattttattttttttgagatggaatctagctctgtcgcccagcctgaagtgcagtcgtgtgtttcatgcgcgtcggtgtgaagagaccaccaaacaggctttgtgtgagcaacatggctgtttatttcacctgggtgcaggcgggctgagtccgaaaagagagtcagcaaagggtggtggattatcattagttcttacaggttttgggatagggggtgaagagccatgttttgcgggcaggggtggatctcacaaagtacattctcaagggtggggagaattacaaagaaccttcttaagggttggggagattacaaagtaccttcttaagggtgggggagattacaaagtacattgaagagttagggtggggcagaaactaatcacaatggtggaatgtcatcagttaaggctatttttacttcttgtgtggatcttcagttacttcaggccatctggatgtatacgtgcaagtcacaggggatgcagtggcttggcttgggctcagaggcctgacagtgtgatcttggctcactgcaaactctgcctcctgggttcaagcaatttttgtgcctcagcttcccaagtagctgggattacaggtgcccgccaccatgcccagctaatttttgtatttttagtagagacagagtttcaccagattggccaggctggtctcgaactcctgtctcacatgtctgtgtgaagagaccaccaaacatgctttgtgtgagcaacatggctgtttatttcacctgggtgcaggcgggctgagtccgaaaaaggagtcagcaaagggtggtgtgattatcactggttcttataggtttggggataagcggtggagttaagagcagtgttttgggggcaggaggtggatctcataaagtacattctcaagggtgaggagaattacaaagaaacttcttaagggtgggggagattataaagaaccttcttaagagtggggcagattacaaagtacattgatcaggaagcaaagtctatagggagctatataatagaggctgcagattcatggcagattctaaagcacagcagtccccaacatttttggcaccagggaccggctttgtggaagacaatttttccacaggcggcatgggatggggcgcaggatggtaatggtcttgggatgaaactgttccaccacaaatcatcaggaattagattctcataaggaatatgcaacctggatccctcgtgtgtgcaattcacaacagggttcatgctcctgtaagaatctaatgatgctgctgatctgacaggaggcagagctcaggcagcaatgcaagcaatggggagcagccagaaatacagacgaagcttcaattgttacccaccattcaccttctgctctgtggcccagttcctaacaggccacagaccagtacatgtccatggcccaggggtcagggacccctgctgtggcacattgcttaatagaggactgtagcagccatgtgccctgacctttcctttttttttttttttttttgagatgccagaaacccagaatttttttttttttttttttttttaaagtcaaggtctggctctgttgcccaggttggagtgtaggagggcgatctcagctcactgcagcctcaacctccctgggctcaggtgatcctcccacctcagcctcccaagtagctgggaccacaggtgcacatcactgtacccagctaatttttgtatttttttttaagggatggaatttcaccatgttgccttggtgggtcttgaactcctgggctcaagggattcacccacctaagcctcccacagtgttgggattataggtatgggccaccatgcctgaccctagagactatttttaatactagttttaggttctcagaaaaatggagaagatagagatttcccatatccctctgaccccatacatgcataagctccccatgatcaatatccccccccaaagttgtacatttgttagaactgatgaacctatgttgacattatcgtcattggattctcattatcatccaaagtccatattttacattagggttcactcttggtgctttacattctatgggttcagacaagtatataataacatgtattcaccattatagtatcatatggagtattttcactgccctaaaaatccttccgggctttgcctgttcattcctctcttactcctaattcctggcaaccactgatacttttgccttttctagaatatcatatatttagaatcatacagtagatagccttttcagatagac

SEQ ID NO: 15560 - DNA, 2300 bp, Homo sapien
tcatgctcctgtaagaatctaatgatgctgctgatctgacaggaggcagagctcaggcagcaatgcaagcaatggggagcagccagaaatacagacgaagcttcaattgttacccaccattcaccttctgctctgtggcccagttcctaacaggccacagaccagtacatgtccatggcccaggggtcagggacccctgctgtggcacattgcttaatagaggactgtagcagccatgtgccctgacctttcctttttttttttttttttttgagatgccagaaacccagaatttttttttttttttttttttttaaagtcaaggtctggctctgttgcccaggttggagtgtaggagggcgatctcagctcactgcagcctcaacctccctgggctcaggtgatcctcccacctcagcctcccaagtagctgggaccacaggtgcacatcactgtacccagctaatttttgtatttttttttaagggatggaatttcaccatgttgccttggtgggtcttgaactcctgggctcaagggattcacccacctaagcctcccacagtgttgggattataggtatgggccaccatgcctgaccctagagactatttttaatactagttttaggttctcagaaaaatggagaagatagagatttcccatatccctctgaccccatacatgcataagctccccatgatcaatatccccccccaaagttgtacatttgttagaactgatgaacctatgttgacattatcgtcattggattctcattatcatccaaagtccatattttacattagggttcactcttggtgctttacattctatgggttcagacaagtatataataacatgtattcaccattatagtatcatatggagtattttcactgccctaaaaatccttccgggctttgcctgttcattcctctcttactcctaattcctggcaaccactgatacttttgccttttctagaatatcatatatttagaatcatacagtagatagccttttcagatagacttctttcacttagtaatatgcacttaagttttctccaggtctttttttggcttgatagctcatttctttttagtgctgaatcatatttcattatcttaatgaaccacagtttatttagccattcacctacagaaggacatttggttgcttccaagttttggcaattatggataaagctgctatcaacatccatatacaggttttcatgtagacgtaagttttcaactcctttgtgtaaataccaaagagtgtgtttgctgggttatatggcaaaaacatgtttgcttttgtaagaaaccaacaaaatgtcttccaaagtggctgtatgattttgcattcccaccagctgtcactgctaattgggcagacctcctttagagatgccgccaaagatagtgtaatgctcttcactgtaggcatttatgatctatacaagaataacagtggattctgggtcagtgcctttattttatcctgccaagttcaagagaaaggttttttcttattctaagagaagactgttatggtaaagtaaaaggaagaaatatataattactcttctattgaggagggagaagaaggacacactgtgatgtaaatggcagaaattcaataatttaattcaaactaaagagaacgggaatgtattgaattcaggaatggaatgtaacgggaaactccactggtggtcttcaggcatggctgaatcccgtgtctccaatgatatcttcaggaatatgttcctcccatccctcagctctgtgttccttggtgtggtctttactttttccacttggtaatatgaatgtcctccaatatcctcccctactgccagagataccaagaaaggagagcttctctgatagttccatcaaaactcccagggatgactctgattggtcagcctgcatcacatgccaattttctcggtcaaggaagtgggaccatgtgattgacatgagtataagacaatctgttcctgaaagaaaagggtgctgggggaaaaggcaacagatgtccaccacagcatgttttttcactttactggttattatctctttttagactccctcagcactggacagctgagaccacgaaggacttgggaccctttctagtacttttctcaggagatgaattaagctctatagccacaaaggtaatgttgtgctccatcttaagaaggctgaaggagtttgaaggggagagaaagtgtggtcagttatacagcattgggtttactgctgtctatggttctggaagct

SEQ ID NO: 15561 - DNA, 2300 bp, Homo sapien
gcgggcagatcacttgaggtcaggagttcaagaccaggctggccaacgtggtgaagccccatatctactaaaaatataaaaattagctgggcatagtggcaggggcctgtaatcccagctactcgggaggctgaggcaggagaatcacttgaacccaggaagcagaggttgcagtgagccgagattgcatcactacactccagcctgggcaacagagggagactccatcgcaaaataaaataaaataataaaataaaaataaacatgtgtgcatcaactgcttataactatatattcagacatccagaatatgattttactgtgactggacttcagaatgtgtgctgcgtgtgatcctaggtgaagttgtgtgtgttcaggccctgctgagcatgtgtgaccatgtgtaccttgtgcctgcaagtgcaggtatgagagtgtgtggatgtgctttgtgggggatctgattgtcattcagcaaacattcactcctttcctgccctccacctccatggaaggagactccttcctgccccattaaagttggtcttggtcatgtaacttactttggccattggagtgtggcagaagtgatagtgtgccaatttccaacctaggacttaaggagaattgtacttatcccttcccttttttggtagtttcacaccttcatggtgagaaaaacaagttctagagcagggctgccccagtgacccacaaatcaggcagcaagaaacatatgcgaattgttctatgcccttgagattgtgtggctttgttatgcagcacaaatgactaactcatgcttattttgcaggacccttggcctagactgtctaacttctggggccttactcctagaaaagtgtcatgcccaaatgtaatgatgaataaagacttgttattggattaaatgtgcttgcacatgtgattgcatacactggacatacatgtgcatgtgcatagggcaccagccagtgtgagagccagaacaggcatgcgtgtgagatgtacactaatagcagagtggtagctaagtaatatctgtctgcacacatctgcctggggggccacacaaaagggcctgagttcatttagctgtggactcactcccttttccagaaccttgcacatcctggaatggagctggaaacatcttagcccttggaggcagggaggaagcttccagaaccatagacagcagtaaacccaatgctgtataactgaccacactttctctccccttcaaactccttcagccttcttaagatggagcacaacattacctttgtggctatagagcttaattcatctcctgagaaaagtactagaaagggtcccaagtccttcgtggtctcagctgtccagtgctgagggagtctaaaaagagataataaccagtaaagtgaaaaaacatgctgtggtggacatctgttgccttttcccccagcacccttttctttcaggaacagattgtcttatactcatgtcaatcacatggtcccacttccttgaccgagaaaattggcatgtgatgcaggctgaccaatcagagtcatccctgggagttttgatggaactatcagagaagctctcctttcttggtatctctggcagtaggggaggatattggaggacattcatattaccaagtggaaaaagtaaagaccacaccaaggaacacagagctgagggatgggaggaacatattcctgaagatatcattggagacacgggattcagccatgcctgaagaccaccagtggagtttcccgttacattccattcctgaattcaatacattcccgttctctttagtttgaattaaattattgaatttctgccatttacatcacagtgtgtccttcttctccctcctcaatagaagagtaattatatatttcttccttttactttaccataacagtcttctcttagaataagaaaaaacctttctcttgaacttggcaggataaaataaaggcactgacccagaatccactgttattcttgtatagatcataaatgcctacagtgaagagcattacactatctttggcggcatctctaaaggaggtctgcccaattagcagtgacagctggtgggaatgcaaaatcatacagccactttggaagacattttgttggtttcttacaaaagcaaacatgtttttgccatataacccagcaaacacactctttggtatttacacaaaggagttgaaaacttacgtctacatgaaaacctgtatatggatgttgatagcagctttatccataattgccaaaacttggaagca

SEQ ID NO: 15562 - DNA, 2300 bp, Homo sapien
agtcaaatctataaggacctacacattgggtccaaaaaggcccactgtacaagcacagtatggggtagctgtgccttaatcagcagcacttgtaagaaacatttagagatgttacttggctgcaagtttgagatgtcagcagtgtgatatagccacaagaaaaagataatggagtcttaggtggcattactagaaatagaacttacaaaagagaggtgagagtcctgttgaacttttcaatccatatctgaaattcctcgcgcagtcccaggtgtgagattttagaagagacatagacaaattagcttacatccaggagaggagcctaggatggaattatatgaataatggtcaaaggaagttaggaagctgcaaagtgctgtaactaagagcttgaatcttggagtcaagactgcccgggtttaatcccagctctgccagttactgtgtatatgtttgttaaatcttcttatcactgcctgtagattagaaattacaataatacctatctccaaagataaatgaggtagtgcatgtcaagtgattagcgcataactcccataaaacaagcactcaataaatgctagctactattagaattaagacagcaaagtgatgccagggtaatggtaacaacttcataggttgtgaatatttaatcagttaacccatgccaggtgcttgatacaaagttggcagctattattattatctgccgtagaattggtttaaggtttctagggatgggactagtttggggacaaaatattttctggtttgggctaagatccacagaacctaatgatcagtttacagcctgaggaaggaagtcagttataccctgatcagggtgggggtcatggtggtcatctagacattctatggctgggtggtggtggagggcactcaccttgtgaacactcggacatggtgaattggcattggcattgctgttgaaggacaactcagccgtgttcttagccatggccatttaggcctgttctgatgcagggttctgatccaaggtaccagtgtggtccctcagggaagtactggggatcgtcacttatgcctgttctggacatggtcaccgagaactgtcctgtaggcattcacttaggaatcattcgaagtggaattgctcctggatacgttctccttgtactctgtttcctcctcctagtgtctctgtgtgaagaagccctcctcactcagccctcggcgaccctctggtaccctggacagctccccggggagcagtctaccgctaggcggcggctgctaagagaggaaccctcctgacgcggagtctgccgctccggggctcgctctccggcaggcccggggagaggtggggtgacaatgggttggggtgcgcgcgtgcctcataggtgcgagacagagcgagccgccggggtgtgagtcagcgcgctgggggctaagaagctgggtgaatagtcacggaatctcactcacgctcggctcctccacccatcccgtctacagcgcgtgtcccagtccagggcgtgcgtgcgctcggtgtccgattccgggctgtgtgtgtccatttggcgagatgtcgagagcggggggagtgtccttgtcggtgtatctgggcccaggttaggggacttctcctccccacccccgcgtgggtgtgggggtgtgtccgggctagggcgcgtgtgcttctgtgcctgtgcgtgcgtgtgcgggtcagggtggtgggaccgcgcatcagggcagggtgcctgcgtctgcgtctgggtctgtctggtctgcatgtcggcgcgatctcgacctggattcgtgtccctggatgtcgagaggccagcgtggtgggggtgtccagcctcccggaggagtactatgccttgacaccttcgtttcaccgccccaaagctggcctggggctccgtagggagtggcctgcatggggagggcccgcgtgctgtgtttctgggaggggtaagagagtgggggcgcagggggcgggccaggtccctgggcgcggcgcgggctcgggggacccgcgcggctgacgtcaggccactccttaaatagagccggcagcgcgctccgctcggcatttcccgaagagccagatcgcggccggcgccagcgccaccgtccggtccacccgccagcccgcacagccgcgccgccgccgagcgtttcgtgagcggcgctccgaggatcaggaatggggcttcgggcgctgggcgcgctccgaacccggcgcacgtaagagcctgggagcgcccgagccgcccggctgcccggagccccatcgcctagga

SEQ ID NO: 15563 - DNA, 2300 bp, Homo sapien
ctccctgagggaagcagggcaggatagggcttcaagtgcaagccaaggacttgataagcctgaaatgagctgggctcctgcctttcaccagctgcacgaccttgggcaagcagattaatctttttcaacctctggaaattgggagtaataagagaacaaatctgaggattaaatgagatgcttggcacataataagtgttacatattatatttatctgctatcatatcattatattgttatttctattcatattatttgctatttctaatagacactaaaatgttgcaacacactgaactcagggtttcttcaccctggcaccattttggtcggacagttttgtcttgcagggggctgtcctgtgcattatagaatgtttagcagcatccgtggcctctacccactagatgccagtagcacctctcccttgagttgtgacaatcaaaaacatctccattcattgccaaatcccactccccccgccacagacacagttccctggttgagacccattggtttaaataagtatgtgttttctaagatgaactggaactgcatctacttggaatggtttggaatttctcaagatattttgctcgagtgtgatacagaatttagaatttttttttaatctctttctgtgttgctatacgcagccttaaaacgttcttgagttaattagatgagccaaagagatggtgtctgtgggtcgcatgaagtggctggtgcagcctcccctggtgctgatggcgggctctctttggcagcgtactgtaagaactctgtggacggcctctggtactgcttcgatgacagcgatgtgcagcagctgtcagaagatgaggtctgcacgcagacagcatacatcctcttctaccagaggcggacagccatcccgtcatggtcagccaacagctcggtggcaggtgaggtccactcttgttcttgggcagttttttccagagcaaaagattgtaatgaatggtctagaggacctctctggaggctctcatgactctgtcagtttgatcagatgaatccttacgtttccatttaatctggaaactaaaatgactgcagtcaaggaagttggggaggaatgtgacagcacctgtggcccagtggagttcactggggacagtgggttggacctggcgcaaagaaagctcatgatgtgttcttgtggataaatgcatgggtgagctgaaaagcagcgtggcatactacccgctgtcctggggttatcctggagcctgtcccatctgggccacatagcaatcatctataatacaggtgtaataataatgcctacctcatggggtcatcgtaagcatccagttagataaatgtgtgttaaaacattttgtaaagggtaaaggaccattagaaatagtctgcttttccagtgagaagattggactattctgttaggagaaggattgatggctgtgataatattaggtggcttgggtttagccggatgacatccagcctgttgtgtttaataaatgcagggaccagtacccacacacaatatgaatgcagccacacataatccaaacaagtggacacacgtttctgaatgcagagtttgacttcaagagagcgtgacagaggattggaatgtggtgatgtgcaatcaggttaggggctatgaatccttgcttctcttgaagcttgcagggggtgagttcaaagcagtgaaaacaaggcatctctcaagcagaatgacgccctgctgggggccaagcccacccagtgtacagccactcactcagttaacacagcgggaactccagtgctcttccaccagtctcagatgtgctcagaaatgacaccttcttgaggtctacttgagacagtcatgctgcttcatgtactctgtttcaagagcaatttctcttgccctaataaatatttaagggcgtccctggaacagacagggcagattgacatatagctgtgtgtgtgtattattaatattatgaaaatggtgacaaatttccttaaaacaggctgagagaaaaagagtatactgccgcatcctctcttctctttgtgtaagaaatattactgcaattgcttagaacagtgcctggcatgtagatgcttcataaatatttgtagaatgaatgtatgagtgcttgtctattccattctcttgccaattctttagactcagacttacattataaagtattcatccctatccttgcattttattactacaaatttcatgcgtcaggaagtctgccttacatcttttcatcttaactggggatattcggacaggcacgac

SEQ ID NO: 15564 - DNA, 2300 bp, Homo sapien
cagtcatgtctgtgttctttggtactgagtgatggaattctatacttgtggactggtagaatggaaagggatgtggaggtcatttaacttcacaactcacccggtgttgtaacacctttgccagcatccttgattggcgttcaccagctcagctttggtaaagaatgtgttttccatttataacactatttctcaagaaaatatggactggcttgttacatagtttctgggaagaaattgttgggaagaataagacagggctagactttagcatcgtgttgctctttatatatagaatagatcttggaaaatgcctggaaacctccaactaccttagaggcagtacagtttggtggaaggagcttgggttagaagccagacacatctttctagctctgtgtcctggggcaggtagctgttcactaatttggctaccatgttagtgagccaggaagaggtcatgctgacctcaaggaacccattacccaggatgtgctcagatgttttctgtattatttcccctttctcatgctgagaccctaccaccacttttctagtatatgagatgtttagagtcttagtttagagaacattttaaatattcttcgcattgttgaatgaaagatactctgtttttaagttttttcttttttttttttttttaacatcaacttttaagttcaggtgtacgtgttcaggatgtgcaggttggttacttaggtaaacatgtgccatgatggtttgccgcacagatcatcccatcacctaggtattaagcccagcatgcattaagctattcttcctgatgctctctcacccctcatccccatttttaagttttcatttggaatgtttattttatgttttgagacagggtctcactttgtcacccaggctggagtgcagtgtgtgatcgtggctcactgcagccccagcctcccgggctcaagatcctcctacctcagcttcccaagtagctgggactacaggtgtgcgccaccacacttgcctaatttttaaatttttttgtagagtcagggcctatactatgttgtccagactggtctcgaactccatatctcaagcagtcctctgcctcagcctcacaaagtgttgggattgtaggcataagccaccatggccggcctggaatgtttattttgatgtaatctttattttgcactgtttctagctataatcgatggtataatgatataatcgattgtgtaaggattctagaacagtgcctctcacaccatctgtgatgaagaacttggttttttctactttaaaatttccaatcctttatcaactagtgcatttgtaagaatacaataaaaatatcacggcagtatcagattgctataaaagttttttaaatgcttttctcctttttggtgcttctctcgtgtgggctcgtgtcagtccgtgagccataattctagtagcactggcctagagaatacttcagaaagtagttctaggaagaaaagcaagtagaattattttgtaattaatgagtttgctgtgctgtctcagtttccacactgtgactgagaagaggccattctgaagaggagcaggctgaaaggaggcaaggctgttctgtctccttctcttgggcatgtccctcacagctctgctcccactcaccactccagaagagcagctactccccagctgggtcatgtgtgcatcaagcctgacctgacgccactggccaattgctgtttccttagagctccatttgctgcttacattttaagttctttcccttctggttccggcaagttctcagctgcaaataacttccctgcctccgttcataggtccttattctgctctcattttgggggacttgtctggtgtagccctttctcacccgcgtctcttttatcccttaagtctccatacttgcggaaatggttatggcccattgaaggagtcactcctggtgcctctcaggaccttatctgccccatccctggggccatcctgagtctgttccagcattcagctaaatattctagcactcgtttattctcaccccaaataaatgcatatttttagaaaatgtgatcataatgtacttttctggatcaagcttataacaccctttgatatatccttgcaggatgactgggtttgtgaactcttaagttttcgtctgtttttgctgctacttgaatgttctttatttctagctcaggcttagaatttggactgaaagaagtcctcctgcgttcatgagctcatgtgttctcagtctgccagggaacttccatggagcctggtttgtg

SEQ ID NO: 15565 - DNA, 2300 bp, Homo sapien
acacacacacacacacacacacacacacacgacattgtttaggtataaagttgccaaataatcaacctgttatataatggctaccttactgggtaccgaataatgagtaagatgggtctctactgggttgaagcccacatattagtgaaggtgatgattgtaaactgaattgcaatatggtcaagtcagtgtcatgaatgagaggtgccaagagggcctgtggaagggacatctcctggagggggtgatatctaaggtgggactttaaggatgaggggaagttagctaagtagaaaggttctaagttagctaaggaaaggttcaagggagagggaacggctccagcaaaggccctcgagtctagatcaaactgcccagaagttgagggccattgcattcacattttagtgtgaataatcagatggctttcttcctggtgtccagataagaattttgactaagaggagagtggagccgattagggacagtgcagagcaccctggagatgtcatcatagagccctacttacattggggagggaggtcaaaggtaaaaaccatttactttgaaacgtggtgtaaggtggccttcatgttttaaaaaggaggaagggctctcccttctctgatttctctcttctgcctcaggactcagactagcccttttagcagaggggagcctatagagaggaggtcatatactagttgattttggactaaaggcatcccaaagatgtactattttttgctccctgcactattttttttttaatggaaccaacgtttaaaaataggatttctgccttctcttaaaacatcagatgatctggtaacgctgagctcctgttctcacatgggaacaactggctggagctgagtggcagccacctctttagaaagatgttaatttgaagtctgctatagtccccatcattccttatatttcccccaacactgagacccaagtcacttgaaagtcaatatgatgattcaaacaccaggattcttcactcatttgtgggtttgtgacctgtgatatttgtggattcgtgacctttggtttagaggtcaagtataggggttgtaaataaaacttgggtttgaatcagataagaactgtaccaatctcaaagacggtgaattaaagattaaagaaaatattgcatgcttggcataatgtgtggaacacaacagctattgtaaacacccagtaggaatgtaagctgcaagagggcaggtagaaaccgtgctaatttaatccgctggggatatgacatttgattctaatttaataggtttaattctttgcaatatccccagtaactgctgaatgaatgagtgagtgaatgaatgaatggaatgatgaatgatgggagagcccggaggagttttaaaggctggaatgaaaaggaaagtagttatgataacagcgtttcgctgggactccaaggtgcagccaggaagaaaagcccgctgggacgtgccagggtctgtgactgcgctccgctggcacccagagggtaggtatctgcaacgtcccttgggagccagacagggctgacttgcccaggacctgtcagggccatgtccaccagctcttgcacggtctggtaactgacagcatcctgattcctgcacgttcccgcctctgccatctgaccagcaaagacagagacccaccccggggatccaccatccaacgggagcccagccttttcctccaagccgggacggcgcccacactagacatggcctccctcgggcttcacgcagcaggaccgcgcccgcagcctccaggcatcgcgtccggctggagaggcagctaccgtcccacagtgaacatggcggccgaggcggcttcagcgccgggcgggcggcgccgggaggcacgtcacgtgagcggctcagctgggcggaccgcgcgcgcgcccgctggccccgccggccgccgctcgctcgctggctcggctgcgctttgaggtgtgtggggcgtcgagcccccgggcccggtgaggcgcggcgctgcgggatgcggcggcggccgtggcggggccgcgggccgggcgggcgggcgcggtgatgagtgtctgcggccgccgccatgtccaaggtaacggcgcctgggtccgggccgccggcggcggcgagcgggaaggagaagcgctccttcagcaagcggctgtttcggagcggccgcgctggcggcggcggcgcggggggccccggggcgtccgggccggccgcgccttcctcgccctcctcgccctcctctgcacgctcggtgggcagcttcatgagccg

SEQ ID NO: 15566 - DNA, 2300 bp, Homo sapien
aattagttgggtatcggtggcatgcacctggggtcccagctacttgggaggctgaggtgggaggatccttggagccacaggaagttgagactgcagtaagccatgatcatgccactacattccagcctgggtgacagagcaagaccctgtctcaaaataaataaataaataaataatttaaaagacaaaaagaagaaaaagctggctttattttgcagtgagaatataactgtgtattgtcattcaaaacaaacatagaatttgaacagtgtgtgtttcaaaatcccattatatatgtatgtgtatatatataaaactaatatgtgtgtgtggacacacacacatacacacacaccaaataataaccaaactgttagccatgcttatttggggaggggggggcacagtttattgttttaattctttgcaatgagcatatattgttagaagaagcagctgagattttttagaggattttctttaaatttctctccaataatgctggacctgtttccatccacctgggcaaaccgcccttggaccagcaaccaaggcatctcctaggaatttggaaattcggactcttaagacccactccacccctatcgagtcagaatctgcattttaacaacatccataggtgattgtaaccacattcaaatctgagaagctctaggtaagaacagatcctttcctctctctgggcttcagtttctccccggcacaaaggggctgtgtctctatggtccctcccaattgcagttttctaatctcgtttcttgtagttatctgagtccctataaaaaggcagctgaagctaggaaaggtggcttacctctgtaattccagctatttgagacgctgaagtgggaggctcgcttgagcccagtagttggcagctacagtgagctatgattgcagcactgcactccagccaaggtgacagaggcagaccctgttaaaaaaagaaagagagaaatagaggaaagaaagaaagaaaaagaaagaaagaaagaaagaaaggaagaaagaaaaaggagggagggagggaggaaggaaggaagggagagagagaaagaagaaagagggaggaaggaaggaaggaaggcaagcaagcaagaaagagaaaggaaggaaggaaggaaggaaggaaggaaggaaggaaggaaggaaggaaggaaggtgggcgggcgggaaggcaggcaggcaggcaaggaaggaaggaggaaagaaaggaaagaaagagagaaagagaaagaaggacaggccaggcgcggtggctcacacctgtaatcccagcactttgggaggccaagacgcgtggatcacctgaggtcagtagtttgagaccagcctggccaacatggtgaaaccgcgtctctactaaaaacacaaaaattaatccgggcatggtggcgcgcgcctgtaaccccagctacttgggaggctgaggcaggagaattgcttgaacccgggaggcggaggttgtagtgagctgagatagcgtcattgcactccagactgggcgacagagcgagactccgtcaaaaaaaaaaaaaaagaaggaaagaggaaaagaaagaagaaggaaggaggaaataacgaaagaaagagaaagaagcagctgaaaaggtcaaaggatgagtggcctggctgaacagcccctgctgcctacagccggacgctggtgggcactgaagctgcaggtctggagggagtccgaggagcgaggctgcgtgggattactgctggtgctagggcaggcacctgccatctggacgggagtggaaggaagtcgcggggcagtaatagggggcagcaggcgctttgaggcgccttggggtaagtgccgcagagacccagcgggaatgcaggatggcagggcggcctcggggcggcagcaggcactgcgcggtggcccaggaagacgcagcgcggccgggctggggcgcagggcggcttcggggcgccagggggcgttgtgaagtcgtggcccgctccgggcggtctcaggtgcctggcggcctggggaaagcacctgggcaggtgggggcggggcctggggaggcgggtccctagggggcggggcctggccggcccacaagagcccgcggtggcgctgccaggggatgctagcccgagagcgagcagaggagcagcgcacccgcacgagccttggaccctttggaaccgaaaggtgagttcagccgggttgggtcggaccagctcgggggttctgggcactggagcggatgccgggcgccagggcgtcggacgccgtcagcgcggtgggtggccga

SEQ ID NO: 15567 - DNA, 2300 bp, Homo sapien
aagatcagttcccttccttcacttgggggctcctctgacattgtcgactgatccattggggtcaaggtcggttctggggaaggggctgatggggcagaggtacccctgagagctggggataggagcttccagaatcacagcttctgttgaacattcacagaggagggctgcagttttatttgacaagcaattgaacctggacctagattttaaaaacaaactctcgctaatttttttctttctttccttcttctttatttcattttttatttttttggattgtagtgagggaggaggtaaggataggcaatattttaagtgataaaaaaataaattatattcctcttgcccagaggctactagcatcattttgatggtgttcttcatcccagcaaaatcatatcaatctatggagggtttagagcagtttgtctgctctggacatctcacctccatgcccagcactccatttcctttccatctgaggccttaaacccactagcatcataagcttggaagcctcctagctttgccccagcttccaattttagcccatatttcatgggttcagggtgggaaaaaaagacataactctgcaggttccgaatactgcctaaaaatcttgatggggcacatcgaagtcacagacatgggtcctctctggtcctggggaccaccctgtatgccctaggatatgtcctaatttgcctttgtcactgtagaaggcataggacgacacagttttcatatatcccccacccccaatactagtgctcacaagtcttgggaagtggtcatgtgcactgttcagagtttggaaattaaatagctgtgttccttctctttcctcctacctttagttcttggtattgttaattaactccctgcacccagcgtactaccaggcccctcaaaggcgtatgccatagcggtgaaggctgcagggttccatccagctcctccactaaccagctgcatcatcttacacaagatattcaacctctctgagcccatttttctcctctgtaacatggatataataatagcatgcctacttcatggaattattgaaacacaaaaggaaatatatgtaggctatgtgtatatttatagagagagacaaatttacttatgagactaatgagactatatattataaacatgaaatgagtttttatgtagtatattagttcatttctaaaattatttctcattgtaaagtttgtatagttgagatgcatcgtgcacattgatgaatgtgataatttgccttccaatactggtactctcccccaaagctgttattaaatcaagggcattctctaaattaatggtatcttagaatcaaggaaatatggcacaatgcctggcaaacactaagtggccaatagttgcaggttattgttacatcaggtgatctagaaacattaagagcttgactgtaaagagaagaaacaaaagagaaatcgtttcacttataataaagcctcagagaaaaggctggggaaaatgcagccaggaacatgatctaaggtggctgccgggaaattttcttggcagatttcatctgtcagttacaatctgccgagcactgctctgtgccagacactgtgctaggaaccagggggcataatgagataggaatgctgcccttgaggaaggcgggctactggaggtgataaggcacgggtacccctgcctgataagagagctgatggggctgcttccagagttcctgcccaggaacccggggaaaggtcctgcagcctgtccagccagcgcttcgcaggttgcacctcacccagcccccgcacggctaggcctgggggccgtaagagaagtaggcagcttctctggcagctgtggtggccaaaaacaaacgtcccgtggaaaaggggccaaggattcagaatgcaaagtgcctaagccacagaggaacagaggaaggaggtctctaagggcgcatggactggtgtttcccagactgtggtctccagggacacactagccggctagtgcctgccagctcacctgcttctcttctttgcccctccagcacgcccgtcctcagagtcccgtcctcaaagtcccatcctcgccatggcacccggagagaagatcaaagccaaaatcaagaagaatctgcccgtgacgggccctcaggcgccgaccattaaagagctgatgcggtggtactgcctcaacaccaacacccatggctgtcgccgcatcgtggtgtcccgcggccgtctgcgccgcctcctctggatcgggttcacactgactgccgtggccctcat

SEQ ID NO: 15568 - DNA, 2300 bp, Homo sapien
cggagagcattaggagaaatacctaatgtagatgatgggttgatgggtgcagcaaaccaccatggcacgtgtatacctgtgtaacaaacctgcacgttctgcacatgtatcccagaacttaaagtataataataataaataaaaaagactgaaaaaaaaagcaatggtgggtcaagttatatgaagctgaatttacttcatttacttcaactaaaacaacagattgcagccgactgaatacgagaatccagctgtctcttattaagccaagcattaaagagatttgcaaaaatgctaaacagtgcccttcccactgattttttttttttgaaaaatatttttcagccaggcatgatggctcacacctgttatctcagctctttgggaggctgaagtgggaagattgcttgaggccaggtatttgagaccagcttgggtaacacagcaagactttgtctccagaaaaataaactttttttaattagccggaagcagtggcacacacaccttgtagtcccagctaaggcaggaagatggcttgagcccaagagtttgaggctgcaggggtcacaccactgcgctctagcctgggcaacaaattgagaccctgtctctctttaccaaaaaaagaaaaaaattgtaaaaaagccttttatttatgtcaacaagtagtgggtttattatagtgtaatgcattaataaatatttttaggtatcagttttagtttctcatatggaaagtatcattatataaacaaaataacatatatgtgttaaaaacacgtgtgtgtgtgtgtgtgtgtgtgtgtgtattccacataaacaaaaagtctcaggtattctgtaatttttaaaagtacagaagattcctggctgggcatggtggctcacacctgtaatcccaacactttgggagcccgaggcgggtggatcacttgagtccaggagttccagaccagcctggccaatatgaagaaaacccatctctacaaaaaacacaaattagccgggcatggtggtgcatgcctgtaatcccagctactagggaggctgaggcaggagaattgcttgattccgggaagtggaggttacagtgagctgagatgacaccactgcactccagcctgggcaacagagtgagactctgtcaaaaaaaaaagaaagaaagaaagaagaaagagagaggtagggagggagggaggtggagagagagagagagaaagaaaggaaagagaaagaaagaaaagaaaagaaaaatacaaaagattcctaagaccaaaaattttgagaatgactgcattaagacaatctatggagaaatatacaggaaactaagtgttaaggatattggcaagaaagtggctgaaatgatagtcctgaaaccttgacttgatgagaagagaaaagaaaaggaagggaagattcgaggaaatgcgcaaggcccgccagtgccctgaggctagagcacaggtgtagtgggcactccagagggggccagagttcccaatctcggggtgggctgtttgaatttctaatgcaaagataggacctatcggggatgactgagatctgggaggtctccaccttggtggaggtggaagaggcggagggaagaacgttcctgggaaaagtggctgcatatgtccccctaaagtcaccaacttgcccagaggacactgtgtctgcaggggtgtggatgtgatgggggcgcgcctgtactggtgagcgcgatgcttcgcctaggtgaacgggacaggtacacgcgtggggtgggatggagtgttcatatatgtggcttgtgatatgtactgaggggacgtggggtacactcggatgaggggtctgtggacatattcgtggcgcatgtgggtatcgctggtgtcccgaggtggggagggagaatgcggagcgcgtgcgtgcggggggcgtccagtgtccctgaacctggcgtgtgggggctggagcttattgggaggcgagggaggtggccaggggagccgggaccgtgcgtgtggccaggccggtagcgcccagtaagctccacccgcgggcgctccccgtgcttccccgcccctgaacctgctccctcccagtcggtctcgccgcgctcgccgggtgtcccagtgtcaccaacactcggccgccgccgccagcttggcgcgcaccgccgcctccgccaccgccgacagcgcgcatcctccgtgtccccgctccgccgcccgagcaggtatgacggcgaaccctggctcgcacccggtctcccgcgcgctgcccggagtccctgcgcgcgcgccttctcc

SEQ ID NO: 15569 - DNA, 2300 bp, Homo sapien
ttgcccagaggacactgtgtctgcaggggtgtggatgtgatgggggcgcgcctgtactggtgagcgcgatgcttcgcctaggtgaacgggacaggtacacgcgtggggtgggatggagtgttcatatatgtggcttgtgatatgtactgaggggacgtggggtacactcggatgaggggtctgtggacatattcgtggcgcatgtgggtatcgctggtgtcccgaggtggggagggagaatgcggagcgcgtgcgtgcggggggcgtccagtgtccctgaacctggcgtgtgggggctggagcttattgggaggcgagggaggtggccaggggagccgggaccgtgcgtgtggccaggccggtagcgcccagtaagctccacccgcgggcgctccccgtgcttccccgcccctgaacctgctccctcccagtcggtctcgccgcgctcgccgggtgtcccagtgtcaccaacactcggccgccgccgccagcttggcgcgcaccgccgcctccgccaccgccgacagcgcgcatcctccgtgtccccgctccgccgcccgagcaggtatgacggcgaaccctggctcgcacccggtctcccgcgcgctgcccggagtccctgcgcgcgcgccttctcctgcccaaccccggcccgcgagctcctgtcccggcctcagtttcccacgggagggcgcttgggtgcctgtctgaggcgcctgggacccggcctggggactgaacgggttgggggcggaggggagagctggaggctgggaaaagcccccagggtgcagaaggcagacggggccagggtccccggcgtgtctgggacctcagagacggcggcaaagtcctggcatagagtgggcggggcaagaagttgttcaagaggtgacaacaatgaaactcgagagcgctttctacgtgctgggcacagctcagcagagcgccttgctcaaacgacctaacttcgctcacagggcatccctgtggggtggttctcttgctgtccccattttgcagaggtgcaaactgagggtcagagggtggggaagcttccctacgtcccaggaacaagttgctgagctcagatttgaacccaggcagtccgaccctggagcctacctcgtgggctgtcagtggcgtccggggaacgtgggtttcatttggggtgatgtggtggaggaggccagatccgaacgccctgcagttgtctgcgctgaggattctcaagtgctaagttgatgtctggacaatgtcatatgacttaggtgtgctgtggagggaaagggtctgggatatagtacagggacattctcactctagcgtggagggggaaaatgaggcacagagtttagggaggaagcagcagagacctccagtccacaaaaggcacatcttcccactcacctccaccagggagtaggggcagaacaaccaagactggctttggtccctggcagcccagctctcacaaagccgggtggatgggtctgaaagctcccagagacctgagcacccctgtctcagatcccagcatccgtgagtgacccaacctgcctacccattgagctgtgtaattccatgcagaacacagggatccattcttcttcctctgtaatcttccacccctgccctcccagctccccaaaggtaaacaccttcataatttggagtgtttccttctagaccctttcccccacctacacagtcatatatacagagccatagaaaatatgtaaaatacttagtaatgtagtaatgttgtaggtggatatttaatagaaatgatgcaacccttgggaggctgaggagggcggatcacttgaggtcaggagtttgagaccagcccagcctacatggtgaaaccccatttctacaaaaaaaaaaaaaaaaattagccgggcatagtggtatgtgcctgtaatcccagctactcaggaggctgacgcaggtggatcgcttgaacccaggaggtggaggttgcagtgagctgagatggcaccattgcactctagcctgagtgaaagagcaagactctgtttcagaaaaatagaactagaagtagaaatggtacaacccacctatgtcattctgcaacttgagccctctcatcaccagttatccatgctgctgcatataaacccagcttatttatttaaactgctgcatggattcccgccgtggataatgcctaccgatgggaatttaggtgacaaaaattttcaggttggtttttatttcagcatcttctataaattgttatctctgggttaagttcaatttatttttctttatcc

SEQ ID NO: 15570 - DNA, 2300 bp, Homo sapien
cagtggcacaatcttggctcactacaacctctgctgcctgggttcaagtgatcctcctgcctcagcttctcgagtagctgggactataggcgcctgccaccactccaggctaatttttgtattttttggtagagacggggtttcgtcaggttgcccaggctggtcttgaactccagacctccagtgattcacccacctcggcctcccaaagtgctgggattacaggcatgagccaccaagcctggtcgagattttttttttttctccacgaaagatactcattccccagaagctctctccaaggttatgaaaaaaagattatgagtatgaagagattggagttgccattgctttttgttaatcctgtttccattgcagacagatactgatacatatgatccattgaaaaacgaaaggattagctttctttgtctctctcctgtcccctccctcacctgcagattgggttgtttgtattatttttattttgtcaaagctgacggtactgaccttctgttctgaaacctcagtgcttcccagcttagttctacatttaaacaggggtggtgcttcccccgtccttttccctctacttctgcattccagagttcattattgatggtggagttcctgggtgcttggccctaccttctcattccggcttcaccacagcaccgtggccccttgggaatgggcgcaggtggctttggagattaggaggagcactccgagggtgccagcacacaataccaaggcaaacactctggccttaaggatttgaaaattaaaccctggtcatcaaatgtttgttttcagcatttgctggtaaattctattgcccttttatattccgagactacaaaccaacgctatatttgatttcaaaatggattattgaagtttacctattttacctggtgacagatggatagaaaagcccatttgaaggacactttaaataaattttgaacaattaaaaaatgacctgcagcatttccctattgccctcaagtgacattctctgctgttttccccccccccttttttttttgagacaaagtctcactctgttgcccaggctggagtgcagtggtgtgatctccactcactgcaacctccgcctcctgggttcaaacacttctcatgcctcagcctcccaagtatctgggactacaggcaagcgtcaccacacccggctaatttttgtatttttagtagaaatggggtttcaccatgtaggccaggctggtctcaaactcctgggctcaagtgatccgcccgcctcagcctctcaaagtgctgggattagaggcatgagccaccgcagccagccatctgctgctttttaagcaccctcctatttcaagccactctgtcttgcgcttcttccaaacttctttcccactccagctgttctttccctctctcctctgcctgttcatgttttgaggctgctcctcctgcctcccctttgaggcctttcctggggcctccaggctgcagtccctgggatggatggcagcagtgcttgtcttcgccctgcacattgttacctgctcttggtctcctggaagccgttgcttctccccacactctgcttcccagcctgtcaccatctgggctcccttgctgcacccctctttgccgacaaaccaccaaggattgctgtcccttccttttctctgtgtcccacacctgtttccacaggggattctcatcatctctgagctgtttttgagcttttcatctgccccccaccccaattttctgcagagctgctgtattcaccttcacaaagcattgttttggttttatctctcctcattcaaaaccctccccagggctagtctgattgtctgtttttagcaacttcttatggaccttttcacgcatacacagaagtagggagaagagtataaggaactccatatactcatcacctgctccaaccatgatccactcctagccatcctgtttcatacataccccctcatctgaaatagaaggactctaaaaataatcacagtaccatagtcaaccctaaaaaagaaaaagaaaaggaattcctaatgtcatcagtgttcaaatttccagttgttttataaatggcataatttattttaaccctttgagtcaggatctaggatccaggatcctgcacgtagagatttattgggatgtcttttttgtcatttttgaatggtaagtttcctctctctttctttttcccttgcaatttacttgttcaaggtaaaggctttacttagcctggtgtttaaagctgtgccttctccctccag

SEQ ID NO: 15571 - DNA, 2300 bp, Homo sapien
aggagtttgagaccagcctgggcaaaataatgagacccccgtctctacaaaaaaattaaaaaattagccaggtgtggtgctgcacatttgtagttccagctactcaggaggctgaggtgggaggatctcttgagcccaggagttgaaggctacagtaaactatgatcataccactatgctgagggacagagcaagaccctgtctcaaaaaaaaaaaaaaaaagaagaagaaaagaaaaaccagcacaggcagagaaggttgggggtaaatggacgagagggtggaacatggggaaaggggagccttatataccttggggacttggtgggttattgaccccttctgaggctgcaaagtgtggaaaatagtaacattttccacctgggatgtaaggatgaagtaagatgatgtcttatgaagaactcttactcaattgtaaagcaaaatgaatgatttatcagtcagtttttttaaaaagttacaaatgcacatgggaacaaatttattacacaggaataaactgcaaaaaataagtttttttcctaaccctgacccccaccttagtcctctaatttttctttttttttttttcttttgaaacggagtctcattctgaagcccaggctggagtacagtggcatgatacctccacttcctgggttcaagtgattatcctgtctcagcctcccgagtacctgggattataggcgcgcactaccatacccggctaatttttgtatttttagtagagatgggatttcaccatgttggccaggctggtcttgaactactgacctcaggtgatctgccctcctcggcctcccaaagtgcagggattacaggcgtgagtcaccatgcccggccgggggctaatttttcttgtgcggacaagccctgttatcaactttatgcccatccttccagatatgcacatacatatttatgttccctgcccctttttttcctcacaaagctcattgtgaacactgcttttcactttattttttcactcaacaatctatcttttatttatttatttattgagacagagtcttgctctgttgcccaggccggagtccagtggcatgatctcggctcactgcaaacctctgcctcctgggttcaagcgattctcctgcctcagcctcccgagtagctgggattacaggtggacgccaccatgcctggctaatttttgtatttttagtagagatggtttcaccatgttggccaggctggttgcaaactcctgacctcaggtgatccttcagccttggcctcccaaagtgctgggattacaggggcgtgagccacccttcccggctgcctgaccaatttcttaaaatgttttgtaaagacaaggtcttgctatattggtcaggctggtcttgaactcctggcctcatgcaatcctcctgcctcagcctctgaaaatgctgagatttataggtataagccattgtgcccagcctggatgtgaatatttttaaaactcttagcacatattgctaaattgccttccagaaagacagtataaatttaaatttatgataccagattgtcttttttctttgtaccctcaccaacaatagctattataatttttcaaacacttttccaatttgttaggaggaaaatgacactttattgttttaatttaatttgcatttatttgagtacaggttttttgttttttttttgagacggggtctttctctgttgcccaggctggagtgcagtggtgtgatcttggctaactgcagtctccaccttccaggctcaagtgatcctcctgccttagcttcctgggtagctgggactacaggtgcgcatgaccacactcagctaatttttactgtttgtagagactggatcttgccatgttaaccaggctggtcttgaactcctggcttcaagggatcctcctgcctcaatctccgaaagtgctgggattacaggcatgaaccaccacgatgcccagccccattttcatacttgatgagttgccttttcatgtattttatctattcccaattgaggcagtagggatcatttaaaataaatattctctattctggtcttttctaggacatagctgtgatttctgccaagctaacaggtatgcagaacagcttaatgatgcttgttgatacaccagactactcagaaaagtgtgtgcacttggaggcactgaagaacaggctggaggccctagccagtccacagattgtagcggcattcacctctcaggctgtaggtgagtgctagctgcttctcatctctgtgtatatctctctata

SEQ ID NO: 15572 - DNA, 2300 bp, Homo sapien
taatttaattttatttttttgagatggagtctcgctctgtcgcccaggctggagggcagtggcgtgatctcgacgcactgcaagctctgcctccagggtttacaccattctcctgcctcagcctcccgagtagctgggactacaggcgcccgccaccacgcctggctaattttttgtatttttagtagagacggggtttcaccttgttagccagaatggtctcgatctcctgaccttgtgatccactcgcctcggcctcccaaagtgctgggattataggcgtgagccactgcgcctggctgtgggagcttttttagttgttgcattaaaggggtgacattcagtggcattcagacataagacattcagtgggaggacccagtgatgcttaatgtcctgcagtgcttggtacagtcctgcacagtgaagaattgtcctggcctaaatgtgaatagtacctgcttttgggcatggttatctaatttaaacctgacagttatccttagaggtaggcacagttattatgtccactgtagacttgtagaaactgaggttgagagaagttaagtaacttgctcggcatcatgttcctaatgaatggagagcctggactgaacccagacagttggctccagagcccaggcccttaaccattatatttcactacttccttggtattaaagagagagagagagtaacatatgcacaggagtgtggctataagaaggcgtagtccagggaaaggtgagaagttcaaacagagctgcatgaataatatcaataaacagtctgggtgtgatctcagtgctttgggaagctgaagtgggaggattgctcgaggccaggagttccagaccagcagttccagaccagcctagacaacatagcaagaccctatctctacaaaaaattaaaaaactagccagcatggtggttcatgcttgtagtccagctactcggaaggattgcttgagcctagaagttcgaggcagcagtgagctaggattgcaccacagcactccaatgtgggggacagagtgagacaagataattagtagtgttattattagagaatcacacttttgtaggggaaatgtaactgaagatgaggcagataaatagatcgggatcagcctgcgaaagacctttctggccagccttgggagtttggcttttatcccttaggcagtaggtagccttcataggtttaaagcttcatttatttttatgcaagatgagacaagggcccaagtctgcgatgaggaagggtgattgtagccgttcaagcacatgttgaggaccccaaattggaggaccaatttctccatttagtcagtcaacaaatatttattgggcacaaactcttttctaggttctaaaaatacactgttgaacaagacccagtgttggattggagaggtccacaggggccacgttatgcagggattttatttttatttttatttatttatttatttatttttgagatggagtctcactctgttgccaggctggagtgcagtggtgtaatctcaactcactgcaacctccgcctcccaggttcaagtgattctcctgcctcagcctcccgagtagctggggctacaggcacacaccaccacacccagctaatttttgtatttttagtagagacagggtttcaccacgttggccaggctggtcttgatctcttgacctcgtgatctgcctgcctcagcctcccaaagtgctgggattacaggcatgagccaccacgcctggccagggattttattttatttctttatttttaagaaacagggtcttgctctgtcacccaggttagagtgctatgcagggatttcagtgtcacattaaagagtttgattttaaggccaggtgcggtggcttatgcctgtaatcccagcactttgggaggctgaggtgggtggatcacctgagaccaggagtttgagactagcctgacctacacagcaaaaccccgtctctactaaaaatataaaaattagccgggcatggtggtgcacaactgtaatcccagctacttgggaggctgaggcaggagatcacttgaacctaggaggcagaggttccagtgagctgagattgtgccactgcactccagtctgggtgacagagggagactctgtctcaataaataaataaatagagtgtgaatttaatttaaaaataaggcattgtaagatttttaagcagcagagtaacatggttcaggaggctattgctgaggtccagaaaagagatgatagtggcttcaactggggtgatggcagtgaaga

SEQ ID NO: 15573 - DNA, 2300 bp, Homo sapien
ttgctcctaatgggtagcggccagggatgctgcgaaatatcttacaatgcataggacagcccccataactaaaaattatctgggctcagtagtgccaaggctgaaaaattcccatctaaataaatgaagaggcgtttcatgctatggattggaacagtcaatattgtcatgatggcaattctcctaaaattaatccaacaattcaacagttcaacataatccctgtcaaaatcccagcaggattttttttttttttgggggggatggagtctcggtctgttgcccaggctggagtgcagtggcggatctcggttcactgcaacctctgcctcctaggttcaagcgattctcctgcctctgcctcctgagtggctgggattacaggcgcgtgccaccatgcccagctaatttttttattattagtagagatggggtttgaccatgttggtcaggctggtctcaaactcctgacctcatcatctgcctgcctcggcctcccaaagtgctgggattacaggcgtgagccactgtgtcctgcctaaatttttaacaagagcaaagtaagaggacttacactatcagattgctcccctcgtctcccctccctgcattgctcccctcctctctccttccctcctctcccctccccccaaataactgggactcctagcagaagggttaccccagttaaaacctactcaacccagaagaatgagacaaaccaagggagatgccaatgaaaaacgagtgactatcaggcctggagatggcagccagccactcataccccaatggcaggccaacctggaaaactgtcccctgtagggtttccaaggatgacatcttgtcctcccccttgggttggtcccactcttgaaacaacataaaaacttagaacctaaagaataccctcataccttcccctaccttttcttcttttcttttcgagacagggtctcgctctgtcacccaggctggagtgcagtggcgtgatcacagctcactgcagcctcgacctcctgggctcaggcaatcctctcaccccagcctctcgagtagctgagactacaggtgtgcgccaccacactcagctaatttttaatttttttgcagagacggggtcttcctatgttgcccaggctgagaaattgtttgtgattatgggttatgcacagatttctcagccgcaacaccaaaagcatgatccataaaaaaaggtgataaggaacttaacaaactttaaaaggtctgcacctcaaaacacatcattaagaaaataattagttaggccaggcgcggtgactcacgcctgtgatcccaacactttgggaggccgaggcaggcggatcacctgaggttgggagtttgaggccagcctggccagcgtggtgaaaccccatctctactaataatacaaaaagtagccgggcgtggtggcacgcgcctgtaatcccagctactcgggaggctgaggcaagacactcgcttgaacctgggaggcggaggttgcagtgagccgagatcgcgtcacttcgctccaacctgggcgacagagcaagactccgtctcagaaaaaaataaagaaagaaagaaaaagaaagaaatagccgggcgtgttgtcgcgcgcctgtagtcccagctactctggaggctgaggtgggaggatcgctggagcccagaaatttgaggctgcagtgagctgagatcgttcaattgcccaggaatttgaggctgtagtgagcagagatcgttcaattgcactccattgctgcccactgcgctccactgttgcccaggctgtcctagaactcctggcctcaagcgattctcccgcgtcagcttcctaaagagctgggattacaggcgcgagccaccgcgtaaatgcgctaatgtatgtcagggctttatagtaagcatatagtttagtcctcggcaaatgttagcagacatgggatatttgtcggtgccgggagctctcagtccggggcgttttcccacacccacctctgctcagcgctccggacgcctgcagtcactatggtaacggccaacgacttccggaagaagaacggcgggcggcgagggtcattcccagccgcaaactgagtgcgctgagcggggaagcgcaaaggggcaagttacccgtcctggcgtttctggggttcgcctcggaggctagcctcggtgctctcgcaggctcgctcgcttctgcatccccgttgccgcccggagccaactcttaagttctggacgccaggcctgaggcagttccgccatggacttctccaagttcctggcag

SEQ ID NO: 15574 - DNA, 2300 bp, Homo sapien
agcagttttcccatttcagcctcctgagtagctgggattacaggcatgagacaccatacccagctctaagctatattttagtaatgtatattttgatattaaggttttttttttagctgattaaccagtctgagtgccattcattgagccagccctgatttttgaaggatatgttatgttacagtctcatttagatctgttccacacgttttgtttatgtcactttacttgaattgtaattttatctgagtatttgctatagccctgcccccctttttaaatttattggtcagtcttacatagttttcccccctcaaataaacattagagtcactccttagctaaattaaaagtctctttagaatttccattggaatgttattaaacttattaatttgaggtgatttggtatctacagttttgtacaattaaatataaggtggtatattgtgtgtgtgtgagcatatgtgtgtgtttgtactcatataaaagagaccagaaggaagtaagtgcttatttctgggtagaattaagaatgcattggccgggtgcagtggctcacgcctgtaatcccagcactttgggaggtcaaggtgggcggatcacctgaggtcgggagtttgaggcctgacctcccccagcctgaccaacatggagaaatcccatctctactaaaaacacaaaaattagccaggcgtggtggtgcatgcctgtaatcccagctactagggaggctgaggtgggagaatcgtttgaatccgggaggcagaggttgcggtgagccaagatcatgccattgcattccagcctgggcaacaaaagcgaaagtctgtccaaaaaaaaaaaaaaaaaaaaaagcatttatttcattttttaatgataatcctgtttttgtgtgtgtgtggctttttgttttttgtttgtttgtttgtttgagacagagtctcgctctgtcacttaggctggagtgcagttcattgcaacctccgcctcccgagttcaagtgattttcgtgcctcagcctctcaaatggctgggattacaggtgtgtaccaccatgcccagctaatttttgtatttttagtagagatggggttttgccatgttgtccaggctggtcttgaactcttaacctcaagtgatccacccgccttggcctcctaaagtgctgggattacaggcgtgagcccccacgcctggctgataattctctattttctatagtgttcatgcattattttaataatgatcgtatcttcctcaaaaatgtgatttttaataactggtggtgtgtgtatgatggttggatggtggggaaaggtcagtttggagggtcataggagtccagctagagtcatgaggacttggattatggtagtgcagaggaattcagtcctggacatgttctgcatggagaagcaacagcatctggggataacatgtacatctctttccagcctggctgtccggggggtttgtagtggtgttaaaccttctgcttgtgccctttataccaggcagcctgccgcctctcattgtgtatgaccggaatggattcagaattctgctccacttctcccagacgggagcccctgggcacccagaggtacaggtgctgctcttgaccatgatgagcacggctccccagcctgtctgggatatcatgtttcaagtggctgtgccaaaggtgagtcatctgttggggatttctcagtaatggctgtcgtttttgagtgccaggttcttttctgggacttacctgtcgagtgtcaaggaaagaatcttcactcaaactaactgaagataaagtgggaatgtaatggcttacctgactggggattcctgaatatctgacttcagatatgagtgaatccaaataggttcttaaacaatgccttaagaatctgtatctcttgactctgcttttctttggcaccattctgacagtttctccacaaacaggaaagtggctacccacagctccagggttgcatggtccttaaccctctttatctcagaaactctcaccgggcatgaagcacatatattgattacccaggaaagggctctgattgggcttgttggtgttacttccataccttggaccaggaacttgtatcctgggatatgagacacttggccaatgtgagataacatccatcccttttcaagggaagtggggccctactgattaacaggcaccccacagtcacaggggaaggggcctgtcctgaaaggaaaagattcgagacagacaaaaatatgacctgcagtctctacttcttacggtagtcctatgg

SEQ ID NO: 15575 - DNA, 2300 bp, Homo sapien
gctgcaacctccgtctcctgggtttaagcaattctcccacctcagcctcccgaatagctgggattacaggcacctgccacggctgattttttgtatttttagtagaaactgggtttcaccattttgaccaggatagtctcgaactcctgacctcaggtgatccacccgcctcggcctcccaaaatgctgggattataggcatgagccactgcacagagccagcagcttcagattctgagttaaagttaaaagtttgttattgaaagggccttaatttgagtgcttactgctggccattactctggacagtacaggtgtagaaggtgaacagatttgcttccttctgcattgagaactactaacatgttaggactcaggttaactgactaggcctgatagggtccgatgacacaacctggaggcaggaggtgtggataaactgaacatagtctagccatatgaaggctgttttatggaaaagcttagaaaagactgagattgttggttgccaaaccagggggttctgagtcttccctcattcttcagcggaaattctccaggcaaatgacctcctcacccaaggagttctgctgtacaaacaggtgatggagggccgggtcacctttggaaacagagtgaccagctcattgggagacatccctgtctccagaggtatgtttgaaagcttctccttgccttctctgccttggggcagcctgtaattcccagaaaagaaatgggtcctaaacatattctgggttaaggaatagaaatgagagaactcgccctttgttccccttcctgtgaaagtggatatgttgccacacccagccataggaattgtcatgagctggttgccgggctggaccccagctttgactacacacaaaagcagatggctaagctgtgcctgcgtttgaattctcataaatgcttgcatacaggagctagagacaaaagaaatgatcttccttagtggttcctagtgccaggtcagctgtatcagaatcacctggagcactggttgaaatgcggtccctggcttggaccttctgaatcaagactgcttggagctgggcctggaggtgtgcgtctttcaagcactgtgggtgattctaatcagctgtggtcagaagcctcagaatggcctgagctggagaaggccgaatctgctttcctccagagtgatgggatctttgcaggagggcctatgatccctggggtaggaaggcaggccttggctccctcttgtcttggatgccagctgagcttgtgtgtcaggacactcagctgagtggaaggttcttggaagggcagggagggcgttaccatttgattaggaggtggtctgagggaagctgataggatttatgtggagactttgctctcatgtccaactgacttctcttcctaaccctgggctttctagtctttcagaatccagcaggctgcatgaagacctgccccctgattgacttggaggtggacaatggacctgcgcagatggggactgtggtgccatctttgcttcatcaggacctggcagccttgggtgagggcaggtgcttgtggggagcaggcacaggatgggtgcgagtaggggagtgagctggttcccttcgcggagcacatgcctgctgctgagggagtcgagatggttgtgaataggaagagtgagctggttccctctgggagcacgtgcttgctgctgagggagtcaggatgggtgtgagtaggggagtgagctggtccccttgggaagcacgtgtctgctgctgagcaagtcagggagagtgtgagtaggggagtgagctggaccctcggagaacacgtgtctgctgctgagggagcacatacctgctgctgagggaatcagggtggttgtgagtaggagagtgagctggaccctcagggagcacatgcctgctgctgagggaatcgggatgggtgtgagtaggggagtgagctggttccctctgggagcaagtgcctgctgctgagagaatcagcagggttctgagtaggggagtgagctggtctcctcaggaagcacatgcctgctgctgagggaatcagggtggttttgagtaggggagtgagctggtcccctcaggaagcacatacctgctgctgaggcaatcagggtggttgtgagtaggagagtgagctggttcccttggggagcacatacctgctgccaagggaatcaggtgttctgggcagttcagagggtcccccttgcatattagtcacagattggccatggacgagtcacatgaccttcagtaagttgcttattt

SEQ ID NO: 15576 - DNA, 2300 bp, Homo sapien
ggcagaactggtttttccacaagaagtctgtgtgttcccagaacagtattcatttgcttgtgtgtggacaagaatcatcacccattgctattcagttatctacaaggaagaatttgtgcttctgtatggcatacgtacctatggtctaagaagaatgtgtgttctgagttccaagctacagaatcacagagtggccagcccagaggttcactctttatctaagaggaacatctgaacccttggccccatcctgtggaacgcaggccatacgggggatcaaggccctttggggttaaattgaggttgccagatggaggttgctaggggaagggtgctagttgaaaatactatataaactgatgctctttacaaatggtagtggtcctcctgtccagcccactgccactagaccaccccgtaagtcccctcagtaaacctgcctcattcagtggctctgggtctcttcttccgcctttcaaacatggtgccatccctactgaagttaataggggtacggcacaacagcttcaatggaaaattatgtgttgtctagacagcacaaccttccaggttctagcctttctttgtctttgagaagtctcataactctgttaagttgataccaatgcaaaataattcttgcctataaataggtaaattccgctcactggagggacagctctcaccccggtcgaaaagccagttttgcctccatttgcacattcgtcttatcttcctttttttccagataaatttgcccttctttgacttcacttttggattgattataacatctgcttggttccctcatgtaattaaataaaatatttaacacgtattcatttcataattatgataatcatgacatacttttttgggaaaattatcttttaacagaataagcaagtaaataatacatcgatggtgtactgtgtgatgcagaaaataaagcagagtattgaggaatgcaggacatgttagtttagaagtgttccaggaaaccagggaggtggaggttgcaatgagccgagatagcaccactgcactccagcctgggcgacagagcgagactccatctgaaaaaaaaaaaaagtgttccaggaaaacccttctgtgaataaaaatgcaagcacataggccgggcgtggtggctcacccctgtaatcccagcactttgggagggcgaagcgggcagatcacgaggtcaggagttcgagaccagcctggccaacatagtgaaccctcgtttctactaaaaatacaaaaaaaaaaaaaatagctgggtgtggtggcatgcacctgtagtcccagctactcgggacgctgaggcaggagaatcgcttgaacccaggaagtggaggttgcagtgagccgagatggcacccctgcactccagcctaggcgacagagtgagactccgtctcaaaaaaagaaaaaaagaaaaataaaaaataaatgcaagcactttgggaagtcgaggtaagaggatcttgtagcccaggagttcgagaccacccgggcaacatggtgaaacccagtctctaacacacacacacacacacacacacacacacacacggtgaaacccagtctctaacaccaggagttcgagaccacccgggcaacatggtgaaacccagtctctaacacacacacacacacacacacacacacacacacacacacacggtgaaacccagtctctaacacacacacacacacacgccaggcgtggtggtgccctcccctagtcccagctcctccggagactgaagcgggaggatcgcttgagcctaggaggtggaggctgcagtgagccgtgatcgcgccattggactccagcctgagtgacagagcaagaccccgtctcttaaaaaataaaaatgctaaaagaattattcgtgttcttctgaaaatcaaatttaactgggcgtcttgtattttatctggcaaccgtacggtgagtggtcttagaagaccagcgctgggtggagggatctggactaagaaatgttccggccggtcccgcgtggagggggggcctggggtgggcgtggcgccagcggccccgccccgtcacgtgtccaccgctcctgccgcgcagtcagcagaggagagcgccaggacgctacagcggctgaagaggcagtggcgcccgcggccgcagcgtcggggctggagcgatggcggcgaccgcggtggcggcggctgtggcgggaaccgagtcggcccagggtcccccgggcccggcagcgtcgctggagctgtggctcagtgagtagcctggcaggccttcggcg

SEQ ID NO: 15577 - DNA, 2300 bp, Homo sapien
ggcagatctcaaactcaggccaagcacaatggctcacgcttgtaatcccagcactttgggaagccaaggcagatggatcacttgaggtcaggagttcgagatcagcctgaccaccatggcaaaatcctatctttactaaaaatacaaaaattggccaggtgtgatggctcttgcctgtgatcccagcacttgggaggccgaggctggggggatcacttgaggccaggagttcaagaccagccttgccaacatggcgaatgcctgtctctaccaaaaatacaaacatgtagctggacgtggtggcacacacctgtaatcccagctactcgggaggctgggcatgagaattgcttaaacacaagaggcagaggttgcagtgagccaagactgtgccactgcactccagcttgggtgacagagtgagactcttgtcttaaaaaacctacaggaacctcctgggctcaagtgatccccccggccttggcctcccaaagtggtaggattacaggcgtgagccaatgtgtcctgctggtcttttaaatttattgcaacattctgtcacagtagtgcttacttgccccttgctgaggcctattagcttatcttccctgtcttatctgagctgttctcttctccaggcttcttgcacctgggtggcctccgcactgccttgtacaactacatctttgctaagaagtaccaggggagcttcatcctgaggctagaggacacagatcagactcgcgttgtgcctggggcagcggagaatattgaggacatgctggagtgggcaggtaagcctggcagagaaaggatctttctgcagggaaggaacaggaagcaggaaaaggagcctgtgggtcttctcatggagttctgagtggaaaatggggagttcctggagaagtggctacatttgtactgccctgcccggggtggcagatgacacctgaaaaaatgccgaagctctctgaaacacagctccaagactggtttctttatttttatttatttattgtttttgagacagagtcttgctctgttgcccaggctggagtgcagtggtgcgatctcggctcactgcaagctccgccttccgggttcacgccattcttctgcctcagcctccaagtagctggaactacaggcgcccgccaccacgcccggctaagtttttttgtatttttagtagagacggggtttcactgtgttagcaaggatgatcttgacctcctgacctcgtgatccacctgcctcgacctcccaaagtgctgggattataggcatgagccaccgcgcccaacttggtttctttattttttaattttttagagtcagggtctcattttgttacccaggctagagttccatggcacaatcataacttactgtagcctcgacctgggctcaagtgatcctccaccttagcctcccaagtagttgggactacaggcacgcaccaccacgcctggctaatttttaatttttttgtagagatgagatctcactgtgttgcccaagctattctcaaactcctgggctcaagcaatcctcctgctacagcctcccaaagagctgggattacaggtgtgagccactgccaaggctgttttgagattcctgttttcacctcagaatctcaagttcattccctacaggggccaggcaggaaacacagggccaagtgggaactggaggagctgggccagtgctgagctgtgaaaaccacacctcatccagagttgggagtgcctctgagctccagctccttgtgcccatgcgggaatgctggcccagcttgtccaatcctctgagttgcaagaggagccagaaatccagtttttctggatgaatacttaaccattattaaatctgggctcagattttttttaaccatgttgtataagccacacaaaacacgtacagcttctgaagttgatcttgtgggaagttttatcctgaggacagctaaggtcagggagaacaaagaggagtgtgtttccttttcatgggtcgacagttgtctacctgtatggacgggtgtgactaggaaaggggagattcccaaggaaaaataccaagactctgctagtctagagattgaaaaaaaaagaaagaaaaaccccaagactattttgagatgtgtgttctaatctcaggtaaattactcactaaactctggattcctaaagagtataaaatggttggccgggcgtggtggctcacgcctgtaatcccaaaactttgggaggccgaggctggtgcatcacgaggtcaggagatcgagaccatcctggcta

SEQ ID NO: 15578 - DNA, 2300 bp, Homo sapien
ctgtttatagtcaaaagcctttcccacatgggctttccccgcaaatgagcaaggaaatgagaagtacaatcatcataatagaggctgtgtattaagtgctttctgggtgtactagaccttactaagtggttcggctgcatgagcttaaccccataagacagatattattattagccccgttttgacaaatggtgaaactgaggctcagattcattaaataatttgcacatctaggccaggtgtgatggctcacacctataatcccagcactttcggaggccaaggcaggtggatcacttgagctcaggagttcaagatccgcccaggcaacatggcaaaaccccatctctacaagaaaatacaaaaattagctgggcgtagtggtcacacacttgtagtcccagctactcgggaggttgaggtgggaggatcacttgagccccggaggctgaggttgcagtgagccgagattgcaccactgcactccagcctggacgacagacagagccaaaccctgtctcaaaataacaataataatttgcacatctagtaagttacacatctaataagtggccacgacagaaatttggacccaggcaatcccaggctttggcattctacataagtgctcttcaaagcaaagtgtgcaatccagtgctggtctgaaaacagttgtcagttcacaatcaagtacagaaactgagagtaaaggtttagaaacttttgttgttgttttgagatggagtctcactctgtcacccgggctgcagtgcggtggcacgatctcggctcactgcaacctctttctcctgggttcaaacgattttcagcctcctgagtagctgggattacaggcctgggccacatgcccggctaatttttgtattttagtagagacaaggttttgccatattggccaggcgaaacttacatagcaatctggcagaatgattttacctctgctaacccaaataaaatgagattggtttgtattttggatgttttcaaaattttatttttctggtcattatattaattttgtgcaaatattgatacacaattgattggaaatttaaaaccagcacttccacaacagatggtttgaaaggcactgctctaggctatactgcctgccagaaagatcctgtcatgtatagctgggattttactacaaagatctttgtatgttcatcctgggatttgggatgagaggcatactccgtgtagagaacgtagaaggtagccttactggtgggaaccaaaaggccctgacgagatctccaacaggctatacaatgggcctctgtcaccctctagcttgctaagctcccaacagcactagcacagtgccttggtacctgcgatttcctctacccagaaggttccttcttttttgtttttgagacacagtttcgctcttgttgcccaggctggagtgcaatggcgcgatcttggctcaccgcaatctccacctcctgcgttcaagcgattctcctgcctcagcctcccaagtagctgggattacaggcatgcgccaccatgcccagataattttgtatttttagtagagacagggcttcaccatgttggtcagacggctctcaagtgatccacttgacctcaagtgatgcacccacctctgcctcccaaagtgctgggattacaagcgtgagccaccgcgcctggcctccagaaggttccttctataggcttcacatagcgtgctccttcttgtcatttggatctcagctcaaatgttacctgctcagtaaagccttctggagcgtccttcttaatccccagtctcctatcctgtttcacttcccgcatggcacatgtgactctaaaattacacttattttttataagtgtctgcggcagccactagaatgcagacttccacagagcaaggcccctacctttctcaatgatcactgtatcccagcgtctacaacacctgttacacaggttgtcatcaatgcacatgtatggaatgcatgaaaaaaagatcgaaagagatgggatggcacaaaaaacacaagaaactcctggcaatttgaattatttccgctcctgcacctcagtttccgcctctgtaaaatgggctcgcgctgccttaaccctcctccgcccgcccactctgacaccaccggaaaggattcattcgggaacattcgtggggcggagacgggacagggggcctcggcctgtagcgtcacgtccgccagggttacctgtggggctgggagcgaaccgcactcgcaccgcaaccccggcatcagtgcccaggttggcctcgc

SEQ ID NO: 15579 - DNA, 2300 bp, Homo sapien
tccagtgctggtctgaaaacagttgtcagttcacaatcaagtacagaaactgagagtaaaggtttagaaacttttgttgttgttttgagatggagtctcactctgtcacccgggctgcagtgcggtggcacgatctcggctcactgcaacctctttctcctgggttcaaacgattttcagcctcctgagtagctgggattacaggcctgggccacatgcccggctaatttttgtattttagtagagacaaggttttgccatattggccaggcgaaacttacatagcaatctggcagaatgattttacctctgctaacccaaataaaatgagattggtttgtattttggatgttttcaaaattttatttttctggtcattatattaattttgtgcaaatattgatacacaattgattggaaatttaaaaccagcacttccacaacagatggtttgaaaggcactgctctaggctatactgcctgccagaaagatcctgtcatgtatagctgggattttactacaaagatctttgtatgttcatcctgggatttgggatgagaggcatactccgtgtagagaacgtagaaggtagccttactggtgggaaccaaaaggccctgacgagatctccaacaggctatacaatgggcctctgtcaccctctagcttgctaagctcccaacagcactagcacagtgccttggtacctgcgatttcctctacccagaaggttccttcttttttgtttttgagacacagtttcgctcttgttgcccaggctggagtgcaatggcgcgatcttggctcaccgcaatctccacctcctgcgttcaagcgattctcctgcctcagcctcccaagtagctgggattacaggcatgcgccaccatgcccagataattttgtatttttagtagagacagggcttcaccatgttggtcagacggctctcaagtgatccacttgacctcaagtgatgcacccacctctgcctcccaaagtgctgggattacaagcgtgagccaccgcgcctggcctccagaaggttccttctataggcttcacatagcgtgctccttcttgtcatttggatctcagctcaaatgttacctgctcagtaaagccttctggagcgtccttcttaatccccagtctcctatcctgtttcacttcccgcatggcacatgtgactctaaaattacacttattttttataagtgtctgcggcagccactagaatgcagacttccacagagcaaggcccctacctttctcaatgatcactgtatcccagcgtctacaacacctgttacacaggttgtcatcaatgcacatgtatggaatgcatgaaaaaaagatcgaaagagatgggatggcacaaaaaacacaagaaactcctggcaatttgaattatttccgctcctgcacctcagtttccgcctctgtaaaatgggctcgcgctgccttaaccctcctccgcccgcccactctgacaccaccggaaaggattcattcgggaacattcgtggggcggagacgggacagggggcctcggcctgtagcgtcacgtccgccagggttacctgtggggctgggagcgaaccgcactcgcaccgcaaccccggcatcagtgcccaggttggcctcgcgccgtcctacggggcggccagaggccgccgaaggcctctcgcgctgcagcagtctcctcaggagcgccgccatgtgggatggaatagcacacgtgggcttctccctgcgtcacttccggggactgcttccagccaatcggcctccgccacagccagcgcagccttgccccttaaagtcacaggccccctagcgcgaaatcccacgcccccctggacggctgcggccgcactcgccaccagggggcagaggccagagaaagggctatttcccggacccgcccccttcagcttgggaaagcgaaagcgtggcaggggccggacctgggagcggaggaggcgggtctccatagaaacctccacctgtttccggccgggctgtgagagattaggggctgctgcgggggccaatctcagccagctcgcctcttcccagcggcctctgcgggagcggtgggtgttgtacacaatcatcatggcggcggccggggccccggatggtgagtgcggcgggggtggcgggcgccgggccggggctgaggttgcggtcgctcctctgggggatgcggcccggcccgggagggagaaccgcggctcgggaacggaggtccggcggcgcccggacagcgtccgttcccaagcccagcccgcgg

SEQ ID NO: 15580 - DNA, 2300 bp, Homo sapien
gggaaaaggtagaaggtggacagtgaaaggaaggaaggacagaaaaatgtatggatactacacagctctttggtaacagaccaaaaagtgaatactgcctccaccacctattagctttgtgaacttgggagatttacaacctctgaacctcagtttctagaactgtagaagatttattagagtaagtccttctgtacagacctgtttcaaggattaagagaccaatgcggggcatttagtacggtggctagcattgaataattgttcagtaagtactagctctcattctttccaagttgttcctcagtcatctaaatcattcacatattaagtgagaatccacaggcatcagagctacagaagccaatagggacaaaactcctgttcttaatggagattacaaggctacatgtagaaagctttaaaaaaaaaaaaaagttcaaggccaggagtgatggcttatgcctgtaatcccagcacttcgggaggccgaggtgggtggataaaataaaaaaaactagcccggcggggtagcgggcacctgtaatcccagctactcgggaggctgaggcaggagaatcgcttgaacctgggaggcggaggctgcagtgagccaagatggtgccagtacactccagcctgggcaacagagcaagactccgtctcaaaaaaaaaaaaaaataggaaaaagaaaagaaatctcagatggcaaagagctatgaacaaggtaaaattaagaaacagaatcgactgtgaagaaccagcatcaaagtcaatagcagcgtttcctaaacttcacttagaagaattacctaagatatttgctaaaaataaattcctggctacatcccagacccactgaatcagaatctcctgggaaagggcccagaagctgtaaaacaagcgccttaggtgattttttaattagagatgttagagcaacatcaatgagaaactggggcctaaacgtcagacttcggctttaatcccagctctgcaacttactagctctataaacttgagtctctttccccagctgagtaatgggcatccaagtatccttcagaagactgctgtaaggatggggggacctgatgcaaggaaagccaccaggtgcctagtagggtgcaagggccatcaggaggcggggtggggaagactggctgtcagcgccacaggaattacctgtaatcgagtggatcttctgtttcagctcggagcctgtgctgtccagggggaacttcacgtcatgcttggtcttattccagatgatcttcaagtccaccagctccctgcccgcgccgccgcccgcgtcttcgccgttgctgaccgaggcctgggctgcggggtccccagggggctgggccggggccggctgcaggctgcctcgtgcggcgccggagtcctcggccgccgcccccgccgcggcttcagcctccaggcagttgacgggccgcgcgggagcctcagtagccacagtctcggcctccgtgtccatgccaggttcctccatgcctgcaagggggttagggggtgggcgctcgccgcgggctgggcttgggaacggacgctgtccgggcgccgccggacctccgttcccgagccgcggttctccctcccgggccgggccgcatcccccagaggagcgaccgcaacctcagccccggcccggcgcccgccacccccgccgcactcaccatccggggccccggccgccgccatgatgattgtgtacaacacccaccgctcccgcagaggccgctgggaagaggcgagctggctgagattggcccccgcagcagcccctaatctctcacagcccggccggaaacaggtggaggtttctatggagacccgcctcctccgctcccaggtccggcccctgccacgctttcgctttcccaagctgaagggggcgggtccgggaaatagccctttctctggcctctgccccctggtggcgagtgcggccgcagccgtccaggggggcgtgggatttcgcgctagggggcctgtgactttaaggggcaaggctgcgctggctgtggcggaggccgattggctggaagcagtccccggaagtgacgcagggagaagcccacgtgtgctattccatcccacatggcggcgctcctgaggagactgctgcagcgcgagaggccttcggcggcctctggccgccccgtaggacggcgcgaggccaacctgggcactgatgccggggttgcggtgcgagtgcggttcgctcccagccccacaggtaaccctggcggacgtgacgctacaggccgaggccccct

SEQ ID NO: 15581 - DNA, 2300 bp, Homo sapien
agtgtgtaatagtcacagcagtaggtagtggctagcacaggtacgaacatattcgccctcccagaaagttctgctggacagcactgtgctatagtttcaaaggatccatagtctgtcgtcattaaaagcttttgagccaaaacactaaggctttcttcatcctctctttcaagggaatagtaacacgacgaaatgtagtcagctgtttcatttcattctctcttctgacttatagcaacacaggaaagtgttggataaaggaaaacctgaagatgtgatgccatctgttaagggggcccaggtaaggcggatttctttgtgagcattctgaaaatgaggcagccccaccgtctgacttgaggttcctccaatcctgtcccttctcttttttccctgtttttttttttttgagacagagtcttgctctgtcacccaggctggggtgtgccaccacacctggctaatttttgtatttttagtagagacggggttttaccatgttgcccaggctagtctccaactcctgacctcaggtgatctgaccgctttggcctcccagtgtgctgggattacaggcgtgagccaccgcgcttggcccccttctctttttttctgactgtccctccatctcttaccattctctcgtgccttcaggagcgcctgccaacggtaccgctgtccggcatgtacaataaatctggaggaaaagtgagactcacctttaaactagaacaagaccagctgtggattggcactaaaggtatgttcttcctcgcctccttgctggcccactgcctgcctctggcacccagcagcactcacattttagagtgcgatttcacccctccttctgaaacctctctctccactgtgctttgcttgcttctggcttttaaatttgcttttagatgctcgccttttgtttggaccgttttccctcattgttttcagtctgatcttagggctgatccaccaaacagtggctcttcagttgcacacagatttgggggtcccaaacacgtggcccaagggccaaatctggtccacagaaaaatgttttgtgggatgacacacaatctgtaaaaattgggagatttcactaatctgattttttttttttttttggcttctcttgaaaactcaaatgatctggccctttggggcctgcattctcacatggcatcgatccactagagccgagtggtggtttccagtgggccatactacagtcttcatggtcccatttatcttagaagtagccagctttgttcatttgtcacctgcctggcccctgtaggtcagagtttgaccctatagtaggtgaagttttcctaaccgctgccgaggaatctgcctctccctccccgcctggttgccctctgcctgccccacccccgcctgtgcacggtgtctggatcagccttgctgtttgctgggaagtgtctctgactgtcctccctctcccttcccccagatggttacaaagtcttgttagttacactgcagaactgtctgtccctttctttgccacactgttgtgccagttaaagttcccaagcatctttaaacttggtctgttcaaagcgagttaccctgtttcactgccccatctgtgttttcttctgtcctgtccatcttacctactgctttttatcctgggtacccgtgctcaaggacctttggctgtttaaggacacattcaaatgcctaaccatagcgttcagtgttctcaacactgggccttagtttaaattttggttccagcttctggcccgtttgccctgtggtcccctgtgtattttagccgcatctctctgtgaagctcccagtgtgctttgcacagctccttgtctttgctcatgctgtgcccttacctggaatgcctttttcccattccttgttattaataaaatcttccaaggccctacttaaatgtcctctctgaatgaagccttccttgattctccccccaccctccaaatgacttgctgccgcttctgttcatagagcgcttcgtttatatccccagagcactcattactctctgacttgtctgtccccctgttagattcctggagggaaccgaacatgcctaaatcacctgtttctgaccagcactgtaggtattcagtgttcgaggtaaatgctaaagagaagtatagggggtcccatcatctgacgttcactggtttcagggacagaccatttagtgagactccacttaaaatgggaccaagttttatggagaataattggggcaggggtggtgggaagagagagtttttaatcatctaaaacac

SEQ ID NO: 15582 - DNA, 2300 bp, Homo sapien
taaatttgcttttagatgctcgccttttgtttggaccgttttccctcattgttttcagtctgatcttagggctgatccaccaaacagtggctcttcagttgcacacagatttgggggtcccaaacacgtggcccaagggccaaatctggtccacagaaaaatgttttgtgggatgacacacaatctgtaaaaattgggagatttcactaatctgattttttttttttttttggcttctcttgaaaactcaaatgatctggccctttggggcctgcattctcacatggcatcgatccactagagccgagtggtggtttccagtgggccatactacagtcttcatggtcccatttatcttagaagtagccagctttgttcatttgtcacctgcctggcccctgtaggtcagagtttgaccctatagtaggtgaagttttcctaaccgctgccgaggaatctgcctctccctccccgcctggttgccctctgcctgccccacccccgcctgtgcacggtgtctggatcagccttgctgtttgctgggaagtgtctctgactgtcctccctctcccttcccccagatggttacaaagtcttgttagttacactgcagaactgtctgtccctttctttgccacactgttgtgccagttaaagttcccaagcatctttaaacttggtctgttcaaagcgagttaccctgtttcactgccccatctgtgttttcttctgtcctgtccatcttacctactgctttttatcctgggtacccgtgctcaaggacctttggctgtttaaggacacattcaaatgcctaaccatagcgttcagtgttctcaacactgggccttagtttaaattttggttccagcttctggcccgtttgccctgtggtcccctgtgtattttagccgcatctctctgtgaagctcccagtgtgctttgcacagctccttgtctttgctcatgctgtgcccttacctggaatgcctttttcccattccttgttattaataaaatcttccaaggccctacttaaatgtcctctctgaatgaagccttccttgattctccccccaccctccaaatgacttgctgccgcttctgttcatagagcgcttcgtttatatccccagagcactcattactctctgacttgtctgtccccctgttagattcctggagggaaccgaacatgcctaaatcacctgtttctgaccagcactgtaggtattcagtgttcgaggtaaatgctaaagagaagtatagggggtcccatcatctgacgttcactggtttcagggacagaccatttagtgagactccacttaaaatgggaccaagttttatggagaataattggggcaggggtggtgggaagagagagtttttaatcatctaaaacacaaaaatcagtgttcaaccctatactgattgttaaaatgaacaaaaattgaaatgccaaaaatgcttgagttttctatcaattttatgataacttgctattttcttcatttcacattcaactctaactgcatggtcaaagcaagttttgcagaatatctgagggttccccccagtttttgcaagggcctttgaaccctctgctagatcattctcttctgtagagcctgtccatcttccctttatcagtagtaagctgcccagcctctgtcaactttgcaggtgattttgcttagttctgtctcatcacattcacttgctgaagtgcatagacttcctgcctcttgctggacctctacttttgcttgtgggcagcctcattgaaggcagttgctacggctgacctggaaagaccctgccatgaagataggtgcaggcagagaagtctggatgggaactaagtctgtaagtgctcattggttccttggggaatatttctgtgtcaggaagttgtatagggaacacatcataactgcaggaactgacagaacaagaacttcctgaccctgtattggaagttttctttttgctagtaggagcagccgccttcctgctttggcctaaagggagagctgtagaagaagctcaatatgttggggcttctgagcccttgaaagcctccttactcaccagtcttgttgaggagcatggccatggactactcatgttttctagggttgaacaaggttaagattttcattcccacccatagcactgtacctctggagcccaaggggcaggcagtcttgtcacttgcccagtcctgttacctaagtgtcataagcactcataagaggacagcttgttctgggagttggctgctagccactggcttc

SEQ ID NO: 15583 - DNA, 2300 bp, Homo sapien
gcttgctcacagttgcagcctcaacaattagtacgtaacagatactcaatttttttttgagacttttttgagatggagcttcactcttgttgcccaggctagagtgcaatggcgcgatctcagctccctgcaacctctacctcccgggttcaagcaattctcctgtctcagcttcctgcctcctgagtagctgggattacagtcacctgccaccacacccagctaatttttgtatttttagtagagacggggtttcaccatgttgtccaggttggtctcaaactcctgacatcaggtgatccacctgcctcagcctcccaaaatgctgggattacaggtttgacccaccatgcctggcccccagacactcgagttttaaaggaatgctataataaatagaaattattttacaacagtgggatgaaactatgttttttttgttttcgttttttttttttgagatggagtcttgctcttttgccagcctggagtgcagtggcgcaatctcggctcactgcaacctctgcctcccaagttcaagcgattctcctgcctcagcctcctgagtatctgggactacaggcgcgcaccaccacacccaactaatttttgtatttttagtagaaatggggtttcaccatgttgaccaggattgtctcgatctcttgacctcgtgatccacccaccttggcctcccaaagtgctgggattacaggtatgagccaccgcgcctggcagcataccattacattttattttacttggatttaacaaaaataaaaagaaattgaggtaaaactggtgacattattggatcattcattcaggcagatttcagaatttggagtcattatcccgtgtgtttccatttcagtcaatatcctttagctccctgcttagaaataggaattagccttcttaaactcctccctcgcttacctatttttgttagctattgtaaggaacatggctgtgctttggtcaaggataggccaaggtaagatgtttacatcctgcgtgactcagcaagtttagacagaggcgtataactccacttgttatcacagccatgtaggcataacatgggaaggtcatcacttggctctaagccactattttctgtaaaaggtataattgccctgctgatactgtacaggcgttcgtgcccagagaaagagagagccagagctgtcagtctttgcagacagacagggggagccagatcacagctgagagagagttaagctgctgaccctgaaggcaagggagagccagcctcgcagttgtgtgggggagccatgggactaagcagctgagacaaggcagacagtgtgagagaactagtgtaagtaagctgctgatgagagctgctgctgaataaaatcatctttcacctgcctaccgtcccctgagtgttctttcagctatctgttcatccacccactcccctcagacctcgatatgggctggaacctggctgtgggcatgacagttggcatagtcgtggacctgacagctatattatacactgtcaagttttaaaacatgtatattgttttaatcgtaattctcacatttattagtcttaggtattgaaattgattattttttcacattattatatatatttttttacctattcaataaatgttaatacttgtggaagaattgtggaatcaaaactttgtcctttttttcttttaatcttttttgtaatagagacggagtcttgccgtgttggccaggttggtcttgaactcctgagctcaaacagtcctgccaccttggcctcccaaagtgctaggattaaaggcgtcagccaccgcacccggccccaaacgtttaaacagatgtatttcagaactttcagataaaaaatgaaagtaggtttctcgtgccgtgtcgtttagggaaagacggcgacgtctgcacagtttagttgtgacaccaagcagttgttcgtccccgaacctggatgggctccgagggcgcagtgcctccaggagccgccaggggccgccaccgccggcggtgcccgacagcgctgccgtgtgcgtcgcctgcgcgccgccggaaaggaaccctggtccggaggcggcggcgcagtgcatcctgggttggcgtagccatggcgtctcgtgtcctttcagcctatgtcagccgcctgcccgcggcctttgcgccgctgccccgggtccggatgctggccgtggcccggcctctcagcaccgctctctgctccgcggggacccagacgaggctcgggactttgcagccggccttagtgctcgcgcaggtga

SEQ ID NO: 15584 - DNA, 2300 bp, Homo sapien
ggccaaggtgggtggatcacgaggtcaagagatcgagacaatcctggtcaacatggtgaaaccccatttctactaaaaatacaaaaattagttgggtgtggtggtgcgcgcctgtagtcccagatactcaggaggctgaggcaggagaatcgcttgaacttgggaggcagaggttgcagtgagccgagattgcgccactgcactccaggctggcaaaagagcaagactccatctcaaaaaaaaaaaacgaaaacaaaaaaaacatagtttcatcccactgttgtaaaataatttctatttattatagcattcctttaaaactcgagtgtctgggggccaggcatggtgggtcaaacctgtaatcccagcattttgggaggctgaggcaggtggatcacctgatgtcaggagtttgagaccaacctggacaacatggtgaaaccccgtctctactaaaaatacaaaaattagctgggtgtggtggcaggtgactgtaatcccagctactcaggaggcaggaagctgagacaggagaattgcttgaacccgggaggtagaggttgcagggagctgagatcgcgccattgcactctagcctgggcaacaagagtgaagctccatctcaaaaaagtctcaaaaaaaaattgagtatctgttacgtactaattgttgaggctgcaactgtgagcaagccagacaggcaagcctggttcagtggctcacctccgtaatcccagcactttgggaggccaagggaggtggatcgcttgagcccaggagtttgagatcaacctaggcaacacagggagaccttgtctccataaaaaatttaaaaaattagccaggcatggtgatgcatgtctgtggtcccagctgcttgggaagctgaggtgggaggaccaattgagcccaggaggtcaaggctgcagtgagctatgatcacaccactacactccagcctgggcaacagagtgagactctgtttcccaaaaaaatgtagctcttagcttaggaagaacctaatcctactaagttcacaattggggccatctcttcccatgacctatctagtctttcagtgttacacgtatgtatgtatatatgtatgtatgtatgtatttatagagatggggtttcaccgtgttagccagggtggtctcaaactcctgacctcatgatctgcccgcctcggcctcccaaagtgctgggattacaggcgtgagccactgcacccggcctcagtgttacatttaatccttttggtaaaacataacaaatcatctcttatttaaataatttgggagagctacttttcccttcagcaaacaaataaagacaaaatatcagcctacatggcctgtagggtaaaagtcccaatattaagatcacatccttagcagatgaggaagagttaaaagacaacaccggtgcttttcagtaacattcccatcaaaggatggataagcataaaagctgtcagcttcccagcacaaactatcccaccaacccaccatgatcgctccctctgccagcccatttgcacggtagtctcatcccctcttattcccaatgggaccttataccaccagttagctcttcttccctacatctcaaaggtctctcttctggctctttctcctgaacccataaacacatcaaagttcctcttagcctaaaaacaaagtaagaggaccctccgctgaccctttatagatctctaataccattcctcctacctttcatagacaagctgttacatgtggggaaaagcaagagagatcagattgttactgtgtctgtgtagaaagaagtagacataggagactccattttgttatgtactaagaaaaattcttctgccttgagattctgtgaccttacccccaaccccgtgctctctgaaacatgtgctgtgtcaactcagagttgaatggattaagggcggtgcaagatgtgctttgttaaacagatgcttgaaggcagcatgctccttaagagtcatcactactccctaatctcaagtacccagggacacaaaaactgcggaaggccacagggacctctgcctaggaaagccaggtattgtccaaggtttctccccatgtgatagtctgaaatatggcctcgtgggaagggaaagacctgaccgtcccccagcccgacacccgtaaagggtctgtgctgaggaggattagtaaaagaggaaggaatgcctcttgcagttgagacaagaggaaggcatctgtctcctgcctgtccctgggcaatggaatgtctcggtataaaacccgattgtatgc

SEQ ID NO: 15585 - DNA, 2300 bp, Homo sapien
aggctggagtacagtggctcaatcacagctcactgcagcctccacctcctgggttcaagcaattctcctgcctcagcctcccgagtacctgggactacaggcgcacaccgccacgcccagctaatttttgtatttttagtagagacagggtttcaccatgttggccaggatggtcttgatctcctgaccttgagatctgcctgcctcagcctcccaaagtgctgggattacaggtgtgagccaccgtgcccagtgaaaggttttttttaaaaatgtaagtatatatgaacagagaaaaattctaggtgaaaatattctaaaaacaatgatcaattctgatgtttacattcaagtaatttataatcataaaactgaggggttattgaaatgggagtgttattaaaattacttgagccaagggggaaaataaagaaagaaatacatgagatagaaaactagttgagatttagaagttaagagaagagattgtgtgataaagaatactctgttcgtttaaaaaacatttttagcacaatgctgtttgtttatatgtacttaaaatttcatagattattagaatttaaaaaatcagaacttttaaaaatatgtacagtatggagtatgtacagttcctttacatactccatcagatagtagaagtagtcaacaccttgaacacattcctcctaaaggtaacagtgaccttactactcacagcctaaaaaataggtttatttcacctgtaaattcatctgcctgaatgaaatgtcactgattctttcttaaataaatgtttagtagtatttatatataataggttaaaaatgagtattttttgttttattttataagaaaaatataagttatatacatttttttcctcctcagaacctaaaaataaaatatgtgtttatgacaagttacacatcaaaacccatcttgatgaagaaactggagaaaagacatctatcacacttgatgttgggcctgagtcctttaaccctggagatggcccaggaggattacctatacaaagaacagatgacacccaagaacattttccccacagggtcagtgaccctagtggtgagcaaaagcagaagctgccaagcagaagaaagaagcagcagaagaggacatttatttcacaggagagagactgtgtctttggcactgattcactcagattgtctgggaaaagactaaaggaacaggaagaaatcagtagcaaaaatcctgctagatcaccagtaactgaaataagaactcaccttttaagtcttaaatctgaacttccagattctccagaaccagttacagaaattaatgaagacagtgtattaattccaccaactgcccaaccagaaaaaggtgttgatacattcctaagaagacctaatttcaccagggcgactacagttcctttacagactctatcagatagcggtagtagtcagcaccttgaacacattcctcctaaaggtagcagtgaacttactactcacgacctaaaaaacattagatttacttcacctgtaagtttggaggcacaaggcaaaaaaatgactgtctctacagataacctccttgtaaataaagctataagtaaaagtggccaactgcccacaagttctaatttagaggcaaatatttcatgttctctaaatgaactcacctacaataacttaccagcaaatgaaaaccaaaacttaaaagaacaaaatcaaacagagaaatctttaaaatctcccagtgacactcttgatggcaggaatgaaaatcttcaggaaagtgagattctaagtcaacctaagagtcttagcctggaagcaacctctcctctttctgcagaaaaacattcttgcacagtgcctgaaggccttctgtttcctgcagaatattatgttagaacaacacgaagcatgtccaattgccagaggaaagtagccgtggaggctgtcattcagagtcatttggatgtcaagaaaaaagggtttaaaaataaaaataaggatgcaagtaaaaatttaaacctttccaatgaggaaactgaccaaagtgaaattaggatgtctggcacatgcacaggacaaccaagttcaagaacctctcagaaacttctctcattaactaaagtcagctctcccgctgggcccactgaagataatgacttgtctaggaaggcagttgcccaagcacctggtagaagatacacaggaaaaagaaaatcagcctgcaccccagcatcagatcattgtgaaccacttttgccaacttctagcctgtcgattgttaacagg

SEQ ID NO: 15586 - DNA, 2300 bp, Homo sapien
agccgggtgtggtggtgggtgcctgtaggaggctgaagcaggagaattgcttgaacccggaggcggaggttgcagtgggcctagatcacgccactgcactccagcctgggcaacagagcgagactctgcttgaaaaaaaaaaaaaaaaaaaaggccgggtgcagtggctcacacctgtaatcccagcactttggaaggccaaggcgggcagattacctgaggtcaggagttcaaaaccagcctggccaacatggagaaaccctgtctctactaaaaatacaaaaattagcccggcgtggtgttgggcgtctgtaatcccaactactcgggaggctgaggcaggagaatcgcttgaacctgagaggcggaggttgcagtgagccaagatcgagccactgcactccagcctgggagatagagcggagagtctgtctcaaaaacaaacaaaacaaaacctatgtgcaaaacatgctactagacaagttgccaaccgtaaggaattttctttttttttgagagacagtctcactctgtcgtccagcctggcgtgcagtggcgcgatctcggcagctccctgcaacctcagcgtcccctggttcaagcgattctcgtgcatcagcctctgaggcctgagcctctgggactacaggctggcgtcaccacacccggctaatttttgtatttttagtagagacggggtttcactacgttgcctaggctggtctcaaactctgagctcaagcgatctgcccatctcggcctcccaaagtgcggggattacaggcgtgagccagggagactggcctcccaccaatcttatcaatgtctggggattatcttgtttacttataaatgatctttctcacctccaccagaaggtaagccaggataagaataacatcagcacaagctggaaacatcctaaaagtctatcagtaaagtacagtctaaagaagcaagggcacttccaaggccaggtgcagtggcgggttcgtgtaatcccagctactcgggaggctgaggcaggagagtcgcttgatcccaggaagcggaggttgcagtgagccgagatcgcgccactgcaccccagcatgggtggcagagtgagactctgtctcaaaaaagaagaaaaacagaaaaggaagaaaaaagaaacaaaacgagggcacttccaaactacaacatactgtctagaacttaaaaaagaaagcaaggtagataaacatgtcctgacaggaaagctaaacggaacctgcagaaccattcagatcataccatttatgaacattcccttctccaaaaaatatacataggattcctttttggtggttagggatacgcccctcctccaccacccacattaacacacgaaaggacctggaagtaccagacttaaaagatttacttgaggccgtccggggggagaagtaaagattgagggtgtgggaggggggaggagcaagggtgtcgatacagctttatctacaaactgttacacattgtattaatgcgctgctactgtaatgaaatttgttctttaaacgccaccacgtgagcaccacgctatttccacattttcattttctgtgccccctcagccctaagaggagggggtggtcagatgatactgctgccctcggactgccgaggacacaaagccaggcctaaaaccctgggaaagcggggtcagagtcctgcgtccgcccttcccgcacccccggcaccttttccttctcctcacagctgaggggcttcccgggaggctcgtccatcgggcaggcgacagaacgaaaagagcagccgtcgccgaccccaggcctgccgacaccgggacccagttggccctgggccggggaggcgccccaggaaggaatggggagcccgggatcgcaccctcagtgcgcgatcagctgacccacgcgggccaagcgcgccctaaactccggccaattaaatccaccattcggcctgcgcacgcgcagccgtagacggccgagcagtggagcgaggccgcctaaaggagagccgcgctgtcgatgagtcccagtgggccacctggagcggaagtggaggagcggccggaagtagccggaatctctgaaagactgaccgactgactctgacaggatccggggctgagggaaggaggcggcggccatggagttgggcgagctgctctacaacaagtctgagtacatcgagacggtgcgcgggtccagatatgtatcctcctctttccaaccctgcgtccctttgaggcctggtcggcgttcccaacctgcccctaccccaccaacccc

SEQ ID NO: 15587 - DNA, 2300 bp, Homo sapien
gaccagcctggccaacatgatgaaaccctgtctctactaaaaatacaaaatattagccgggcttggtggcagctgcctgtaatcccagctactcgggaggctgaggcaggagaactggttgaacctgggagacggaggttgcagcgacctgagatggggccactgcactccagcctgggcgacagagtgagactgtctcaaaaaaaaccgaaacaaaaaaaaaacaaaaaggagatccaatttacaaaataaaaaatttaaaaacaagagaattaaaaatgtaaacaataaataggagatatggcaacattttatctgccctgctgtggtgacaattagcagaacgcaagctaaggtttgcagcctggagctggctttgtcccttaccttgccattgagaacgatgttctggcttccacacaacactgactggcgactgactttgttcccagatgcctaaaagaaaacaacggaaaaccggggaaagcaaacttaataggtttctggactacaggtttccatcaagaaagctcccatttgagagaaaaaaacataaagtggggtgctgtccacaatggagtgagtccaggatatcaaaaaagcaatgatggattaggaaactatggctgagtatggtggctcatgcctgtaatctcagcactttgagaggctgaggcagacggatcccttgaggacaggagctcaagaccagcctaggcaacatagtgagaccccttctcaacaaaaaaaaaattttttaattagccgggcatggtggcgcgtgtctgtagtcccagctcctcagaaggctgaggctagaggatcgcttgagcctggaaggccgaggctgcaatgagctgtgattgtgccactgcactccagcctgggcaacagagtgagaacctgtctcaaaaaataaaaacacaaaggaaactagggactcaaggaataaactcataatttgaatgtctatagcttggtggcatcagacagacgcggattcaaatcccacttccacgcgtgggctttacggccttaaaacgaggataatgactatgagtatcagagttgtgagaaagcaaagaaaaccaaaataacgatagtaacgttaattgaccacttgccctgtttccaagattttacaaacatatcatgtactgatcataaagaaccaaatcggcagggtgcggtggctcacgcctgtaatgccagcactttgggaggccgaggcgggtcgatcacctgaggtcaagagttagggacctgcctggccaacacggtgaaaccccgtctctaccaaaaaatacaaaaattagccgggcgtggtggcgggcgcctgtaatcccagctactcgagacgctgaggcaggagaatcgcttgaacccgggaggcggaggttgcagtgagcagagatcgcgccgcggccctcaggactgggcgacagagtctccgccccccaacccccttcctcaaaaaaaaagaaccgaatcgtttttagcgcaagttaacagatacaaaaggcagtgtaaaagggcccgaagtccgagctgtaattcgtatgaacaggatgggacttgtcctatcctcccgaaggcactttacccctatgagaaaatcaggaataaatacaaaaggcctcaactggccaagcgcggagtaaacagcaaagccagacggtacacggggcatcgctagataatccgggactaatggccaaagggacaggggttggtggggtaggggcaggttgggaacgccgaccaggcctcaaagggacgcagggttggaaagaggaggatacatatctggacccgcgcaccgtctcgatgtactcagacttgttgtagagcagctcgcccaactccatggccgccgcctccttccctcagccccggatcctgtcagagtcagtcggtcagtctttcagagattccggctacttccggccgctcctccacttccgctccaggtggcccactgggactcatcgacagcgcggctctcctttaggcggcctcgctccactgctcggccgtctacggctgcgcgtgcgcaggccgaatggtggatttaattggccggagtttagggcgcgcttggcccgcgtgggtcagctgatcgcgcactgagggtgcgatcccgggctccccattccttcctggggcgcctccccggcccagggccaactgggtcccggtgtcggcaggcctggggtcggcgacggctgctcttttcgttctgtcgcctgcccgatggacgagcctcccgggaagcccctcagctgtgaggagaaggaaaa

SEQ ID NO: 15588 - DNA, 2300 bp, Homo sapien
ccttatttcattgaagacaccgcatttgtgaactcttgcttcctggcctagaaccattcagcctaccctgtatttgccataaactccacaattcacaccaaaatgtctgtacttagagctaattcgcatatatacaggaagggctcttagaatcagtttgtgggcacagagcctcaggagtaaatgaagttactagggctgttcttaccatctccttctggccaaatagcacaacatttcctcgttctgctctgacctcttagcttagaaggaagattcagaagtgaggggctaagaaggttgtccttgcctaatgctctgatctgtaagtgaatagggcagaacagttcagccttgaggttagaatttagcaggagctatcctgacttaatatccagttgtggggtttgcaaaacaaaacagctgtatgtaatcattgccactagttccatctagaactcctttctagtttgttatttttaaaatgtttatacataaaaccaccaaaatacatagcttcgacaagatggaagtttatttctctctcccataacagtgcagtgatagtcagctggtccaggccaggcaaggggctggtccatgatgtcatcaggcacccaggttcctactgtcttgccatgtggccacagttagcaacaaaggaggctgtaaatttagtttctacttgggcagccaaaactctgaggaaggagattctgctagtaaaaaggagtgggggaagaatggccattgggagacaacaagcagactcaaccaggcctctttgttggcttcctttcctcctgctgcacatgagccttcgccgtgcatttggagccatgacagctgatagctccagacctgcatcctcctagcttgggggctctgaatgaaaggtttcttcccttccagttcgaatttggaaactcccaaagttctcaatggtttgttgtgagttccatgtcctcttggatcagtcactgtggccatgcatgtttggccacatgattaatccagtctgggtcatgaccttttcttcatccaaaacaaggtgatgggaagacaaaaacaatagctactacaaacaataggagtttataattatgtgctgatgtattcgaagatgtgttgacagtcgtgagtgtgtatcctaggaaaggcgagctggactctgtctccatggtggctctcaccccagggacctaggaacagcctgtcaccacacaattacttttataaccctggagatgaaaatctccttgtcctcaaaatacttccagaagaacaaccagatgggaaggaccttggttgggactctttccagttcacttggggcagagggaatttaatggctcacgtagctgaaaaggatgggctagattgggcttcaggctgcatcccaggactccaaacagggatctgtctctttggctctcagctctgctttcatttgagttggctttattcttgggcttcacagtgtggccccacagcaccagttattgataaaaagagctcccctttgctgacagaactgctggatttggttctcattggtccagacgaggaaggtatccagcctcaagtcatcattgtggccaggaagatggaatacaccaaatggacaggcctggcatgtacccacagagactgagagttggtgctggtggttgtggtggcagatgatattacctgaagaagggacgaatgggtgctgggcaggacaaagcatcagctgtccagttcaggcctctcctctttccctggtgtcttcattttcctccgtctccctgctgtcccttaccctctgcccaatctctcattactcctggtcttgggagttgccttctgaggatactccactgggggtacctgagcctggattagagggcagggggaggatattgcctagccaaagtgggtgttcaataaagaaccatttggagatggtcttctgtctggaactgcttcctttttgttttattatttttccccagatgagctgactgggccatggaactgcatccttatggttcccatagcaccttaccgaggcgcccttatcaatagagttttagttatgtacctgtgttcttgtctgaacccctactaactgtgagctcctgaggagtcaggcctgagtctgtgggtcatctagcacatccttaatagaatgattgcctggatgtgaccaccctcacccccaaccctcacacaccctgccagcatgcctcagaccttaccccagctcaagataagtctcagattgcaggatacctgctgcagggaacaaaggtgaa

SEQ ID NO: 15589 - DNA, 2300 bp, Homo sapien
aaaaggcctgtgagagactctgagcttcctgggaacaggtataggttctttttatttcaataataacagaaacaactgtcaaaaccatgtgcctgtactatttggagtgctgtccttgcagaatctcattataagaaccttaggaaataggcacatcatctcctggatagaatcctaggaaatgggcactataatgggcactttatcccattttataaacatggaaattgaggcacagagagattaagtactttcccaaggtcatacagctagtgatggaggagctagcatttgaacccggagtttttagtctattgagtttaaccgacagatcatactgtgttttggtagggagggagggaggaagcaagcaagtgaacaaatgagtctgggatttaggacttgccagacaaacaaggcccaagaggcaagtgtgcaggtgggtgtagttgggagtcagcagagttgggttggaattcaagctttgccacctgctggctataaaccttggttgggtaagtaacccaaggtaaatgagatcatctctgtaaaactcttagccttgtgcctggcacatagtaaatgcttaataagggttcactgttagtattactgttactgataacatacaaatagattgtattaatggaccataattgcaactgtataaaacaaattccatgtttggccaggcgcagtggctcaagcctgtaatcccatcacttcgggaggccgaggtgggcagatcacgaggtcaggagatcaagaccatcctggctaacacagtgaaaccccatctctactaaaaatacaaaaaaattagccaggcatggtggcgggtgcctgtattcccagctacttgggaggctgaggcaggagaatggcgcgaacccagggggcggagcttgcagtgagctgtaattgtgccactgcactccagcctgggcgacagagcgagactccgtctcaaaaaaaaaaaaaaaaaccacaacaacaacaacaaaaattccatgttgacaaggatgggaatatgagaacatggaaacagctatgaaaagacataagagaattaggaggattttctttaatatatcattttttaaaaaaaaacttgcttgtatttgtttattttttaaatagagacagggttttaccatgttgcccagactagtcttgaactcctgggctcaagcgatcttggcctccctaagtgctgggattacagtcatgagccactgtgccccgccattttttaataaacctttctaatggaacaagtaaaacacatgcagtggatgctcagcaggccttgagtgtgtgaatgaaaaatatttgaacttgtttttactggttgatttcattgcttaaaaaacataccttagctggacgcagtggcgtgcgcctgtagtcccagctactcatctcttaaaaaaaaagttttatgcttgttaatttcataaatgctagagggatcaccctaatcaaataaagctactcaaaaataaaatatgaaaggtgttagtgggatacagctttctagttttttgccactagtggataggttggaatttaaattcttcggatattggaaccagaacaggctgtaactgattatttttgctgtgattcgtgcttactggagcctcgggaaagagggagacaacatgtaaagagaagcaatctgtttggaaaatgaaaatacagttaaattgctaatgaacccttgtcaaaatcaaatgtctccccttagaggctgatgattgtctagtctaatatgcattttttttgagtgggtcaattggactctaagaccaacaagataaaaaggcagccttgcatgtcacttggaccacagctgtctggccatgcagcatgccttcactgctgctgaagaaaagcagctgcttgttgagaatctcaaattctcagatcctaattgcctggccctgactctaagctgaaacctgctactgtctgccttgagctgttttagcctcaacacgagctatgctgaactgaaagcaggcacaggctcaatgaccaggactcagacgttggggccgttggagattaaggaccccctccgtggagcgctaaactatgaaaacgtcctggaacctggctgaaaagggcttattctctaatgggaccatctaagatcaagctgctgataggctctttgtctctaatacagaggctaattgcattcctaacttctaatatttgccaaacgctccaagctggggaagggcacatcgcaaggactatgacctctcctcctgcttttgacagaccagact

SEQ ID NO: 15590 - DNA, 2300 bp, Homo sapien
acccttccagaggaaaggcctagctgagagtaagagatggttgaaaaaatgcaatgttatgattgctgaacagggcacgactgtttttgtaatattggagaaaataattaaagcctggcacctggggaggcttgatccctggaagcctcctcttgctgaaggaaaattcccagtgctgcctttccatgtgctgtgagtgctttgagttcagactgacaacagagtgggtctagcttctatgctttccatgaagatctcccacaaatgtcatccatgctcatgagatggatcaacttgtatcctgaacaagcaaaactgtttgggactcactgccttcaggcagtcccttggaagccaaggactctgggaacttttcagatgggactggaaacacttgggcaggagttcccctggtaggaggtctgttcacctgtacagcctaatggatgtcctgcttgaggtgccctaatattgcaaattctttgtttacaggggtaccacctgtgcccctgggactgtgcttctgtacatgaccacaactctcatgatgtcccctcagccctggaaagcatttgggttagcttccgcttactggtcagagttatactgtgcctgaattgatgcctcaggtcaggttgaaaaaaaaaaaaaaggttcagacagcaattaagggctgggcacggtggctcatgcctgtaatcccggcactttgggaggctgaggtgggcagatcacctgaggtcaggagtttgagaccagcctgaccgacatggtgaaaagtaaaaatacaaaaataaaaaaattagctgggtgtggtggtgtgcacctgtagtccctacaaaaataaaaaaattagctgggtgtggtggtgtgcacctgtagtcccagctactcgggaggctgaggcaggagaatcgcttgaacccaggaggtggaggctgcagtgagccaagatcacgccactgcactccagcctgggtgacagagcaagactccatctcaacaacaacaacaaaaaggaattaaggaggaagccacctggcttcctaagatagactttatggttaatgggatttattttagctggttaagtccaggacccctaccaggaagaactgaggtccatatttgaggttggtctcacccttttgcatgtggtcctactaataataattttgctgtaaagaagcctcaataaggagatggactgtgtgaaaagagatgagaaagcaggcctgtttgcaaggctggcccttggctggcatctgaaagcttggatttcaggagggttctcattactccctaaatgataagagtggctcactgtgcctaaactgttcgtacaaacaatgtgggttatgcccaacatctgctttccttctgggagtcagattttcatatgtgttaggcagaggatgaggtgagcagctcccaatgagaaccctgaacactgagtctgtaatgagcttcccttgtatacaacattgcacatgggttgtcacaactgattgctggaggaattgtgtcctatgtgactctgctgggagaggactgtgggaggcttacacctggtttccctggactttgtccatgcgcttttttcctttgctgattttgcttcctagcctttcgctgtagtaaaacatagccatgagtatgactacaggctgagtctgtgaatctcctagtacatcatcagactaggaggtggtggtgttggcaccccccagcacagggcacaagggagacttgcagggtgtttgtcatgttccctttctcaatctgggtgtggtttacagatttgttcagtttgtgaaaattcactgagctctatgaacaattataatatgtacatttttttctgtaagtgtattaaatttcaataaaaagaattcacactataggggtacaaaataacttaatttttcaaagtcttccttttattcagccaacattttagtaagtacccttttttttttaccaagcactgctctgggagcttgggacatggggtagaaaggacggcatcattgtcctcattgtccttcagcttagctgcaaggcaggtgaaggatgcttatagtatggttgatttttgctgggctctatgaaggatcagagggtgctaaggaggcacagagaaagagcttttaacgtgggtattttactgttccagggttgccactcaagtacctacagaacaaacgggtgtagctgtaaactgtggcaaactgaaagcatgtaggcacagagtaagtagctagagctgatttttttcaggaaaggccacaaatcccaac

SEQ ID NO: 15591 - DNA, 2300 bp, Homo sapien
agaaagcaggcctgtttgcaaggctggcccttggctggcatctgaaagcttggatttcaggagggttctcattactccctaaatgataagagtggctcactgtgcctaaactgttcgtacaaacaatgtgggttatgcccaacatctgctttccttctgggagtcagattttcatatgtgttaggcagaggatgaggtgagcagctcccaatgagaaccctgaacactgagtctgtaatgagcttcccttgtatacaacattgcacatgggttgtcacaactgattgctggaggaattgtgtcctatgtgactctgctgggagaggactgtgggaggcttacacctggtttccctggactttgtccatgcgcttttttcctttgctgattttgcttcctagcctttcgctgtagtaaaacatagccatgagtatgactacaggctgagtctgtgaatctcctagtacatcatcagactaggaggtggtggtgttggcaccccccagcacagggcacaagggagacttgcagggtgtttgtcatgttccctttctcaatctgggtgtggtttacagatttgttcagtttgtgaaaattcactgagctctatgaacaattataatatgtacatttttttctgtaagtgtattaaatttcaataaaaagaattcacactataggggtacaaaataacttaatttttcaaagtcttccttttattcagccaacattttagtaagtacccttttttttttaccaagcactgctctgggagcttgggacatggggtagaaaggacggcatcattgtcctcattgtccttcagcttagctgcaaggcaggtgaaggatgcttatagtatggttgatttttgctgggctctatgaaggatcagagggtgctaaggaggcacagagaaagagcttttaacgtgggtattttactgttccagggttgccactcaagtacctacagaacaaacgggtgtagctgtaaactgtggcaaactgaaagcatgtaggcacagagtaagtagctagagctgatttttttcaggaaaggccacaaatcccaacttttatgagctcctcttttaaatgctgtaaatgttttacaatggcggggcgcggtggctcacgcctgtaatcccagcatttgggaggccgaggggcagatcacttgaggtcaggagttcaagaccagcctggccaacatggtgaaacctcttctctactaaaattacaaaaattagccgggcatggtggtgcatgcttgtaattccagctgctagggaggccgaggcgggaggattgcttgaacccgggaagcagaggttgcagtgagctgagatcgtgccactgcactccagcctgggcgacagagcaagattccgtcacacacacaaaaaaaaggcgtggggggaggccaaacaaaaccccgcaagacacatttggctatgacctgccagtttgctaggcattcttccaaccttccctccctctgaccaagaaactgagtgtccactattttaggccctgggaaattcagtagcgaggaggccagacagcttcgttgcatcatggggggctctggtactgtgcttctccaacttcaggatgtgtaggaatcacctgagcagtcttgttgagaggcggacactgactcgggaggtctggggtagggcctgaacgtttgcctttgcggttctaacaagctctcaggtgatggcgatgctactgttccctggccccgaggtagaggaagatttaagtaaaagcttcctggaggaggcgcaagtgaaccgcaggagctttcccggacgcccgagaaagggagaaaccccgaaggaattcctcctctctcggggctgggtctccgcatccacgccgggtttggtttcccaggctatcccacgtgttcgggcgtccgtgtcaatcaggttttccccggctgggtccgggtttaaaggctgctgctgcgcagggcgctcccatggtgccgcgcggcgggcgggtttggattttaaatccccgcggccaatcagtggcgcgcaggcttttgtaacgttcccagcgccgcgtttgaattcggggaggagcggagcggtgcggaggctctgctcggatcgaggtctgcagcgcagcttcgggagcatgagtgctgcagtgactgcagggaagctggcacgggcaccggccgaccctgggaaagccggggtccccggagttgcagctcccggagctccggcggcggctccaccggcgaaagagatcccggaggtcctagtggacccacgcagc

SEQ ID NO: 15592 - DNA, 2300 bp, Homo sapien
gatgctgcccaggaagcatcttgagttccagtctgagccaaacccctggcagctctatcagcccatgggagaatttagccaggctgacttcctggaagcagagatttccttctcatgcccatctctctggctccagaccagcgctgtggacatcttctctgcaggctgcgtgttctactacgtgctttctggtggcagccacccctttggagacagtctttatcgccaggcaaacatcctcacaggggctccctgtctggctcacctggaggaagaggtccacggtgagggagccctgggcagggcagagaagggaggacgggcaagacgctaggcaggcctgaagcagactctcctcctcctcttccatcctccagacaaggtggttgcccgggacctggttggagccatgttgagcccactgccgcagccacgcccctctgccccccaggtgctggcccaccccttcttttggagcagagccaagcaactccagttcttccaggtcagaaggaaagcttgggaatggcccccaaaagtcctaagtttgggtcctgggcaataagaaatgggatattagattagctgagggaaaacaggaagagctacctggtcctgggagcctggctctttccctaaactgggagccagcctggactcctaaactccgccatcttggcactctctggtccattcactgccagctttgccagccccagctgccctttgtatgggaatatagcccattcctttccacccgagtcatcattcatgctgtgccagtagcccactgcacttgagtgaacttgagcaagagacttcatgcctctgaactgcagtttgctcaatctgtagaatagggacagcagtaccaagctcataggttggtggtaaataacagaggcgtggcacagagaagcttcacgcccccagaggcaatgatccttgtcagtcaccctaaactactcctgtaagacaacacactcctggctatgtggcctctggccccggtcacaaggctcaggagctctctgggccccaggacgtcagtgactggctggagaaggagtccgagcaggagcccctggtgagggcactggaggcgggaggctgcgcagtggtccgggacaactggcacgagcacatctccatgccgctgcagacaggtagaggccatactcaggtgggcctgggcggtggaggggagtgggcctgggcggtggaggggagtctagcagggacggttttgccactgaattccctgtccacagatctgagaaagttccggtcctataaggggacatcagtgcgagacctgctccgtgctgtgaggaacaaggtatgtgttggggcctgggtgggcctgggtcttgggaaggcctggccgcagctgagccagggttctctgctctacctacccacagaagcaccactacagggagctcccagttgaggtgcgacaggcactcggccaagtccctgatggcttcgtccagtacttcacaaaccgcttcccacggctgctcctccacacgcaccgagccatgaggagctgcgcctctgagagcctcttcctgccctactacccgccagactcagaggccaggaggccatgccctggggccacagggaggtgaggtgggctggatgccacacagatggtctccgtgctggctcactgaagagctgagcctgtggctggcctcagaatcaggctgggtgcagtggctcacacctgtaatcccagcattttgggaggctgagtgagaggatcacttgagctcaggagttcgagaccagcctggccaacatggcaacaccccatttctacaaaaaatttgtaaaattagccaggcatggtggcgcacgcctgtagtcccagctgcttgggaggctgaggtgggagaatcacttgagcccaggagttcgaggctgcagtgagccaggatcatgccactgcactccagcctggtccacagagagacactgtcaccccctttcccccacaagactggcagaggctgggcagcctggggctgatgaagcagagatgttcgctggatcccaggccctggcacccctcaggaaatacaagaaaaagaatattcacatctgtttaatgtgcataaagccaaggaaaggacagttccgaattcaatagaaatattctgtacaattcatatggtggggttgagggggagggggacaaggctgtagaacccacacccgaacatgtacaaaaataacttatacagcaacccccacctgcaaggatgatgcagctctgcccagccaccggg

SEQ ID NO: 15593 - DNA, 2300 bp, Homo sapien
tttgtttttgttttgttttgtcttgttttttatttatttatttattttgagacaaagtctcactctgttgcccaggctggagtgcaatggcacgatcatggctcacggcagcctccacctcctgggttcaagcaattctcctgcctcagtctcccaagtagctggaattacaggcatgcgccatcacgcccggctaattttggtatttttagtagagacagggtttcaccatgttggccaggctggtctcaaactgctgacctcaggtgatccacccacctcgacctcccaaagtgctgagattacatgcatgagccaccgcgcccagcctgttttgttttttagagacagggtctcactctgttgcccaggctggagagcagtggtgctacctgcagcctggatctcctggaatcaagggatcctcctacctcagcctcccaagtagctggggctactagtgcacaccagcgtgcctggcttattttttattttttgtagagactgaggtcttgctatgttgcccaggctgctcttgaacttctgaacctggtatggcttagtgtgaaataactttcacaaaaatcccaacctgtttcaacccagcctaagacagtggtgtagttccttcagatggtcagctaggaggtccaagcaggataaggacaaggaaggggctgacagagtggaagagagactgagggatgaaggtaccgtgtaggtcagggcacagggataaggagaatgaaagggtgaaaccgttgcatggagaggaggctgcaatcagagaaagggacattggaactaaagtggttctgagtgtgacaagggcccagtgcagttgtggcgtgggggataaggtctccaaagaggtacacccactgagaggctgcaatgctggctaagctgtaccttggacattgaagacaccaaggagagtggcaggatttgtgatggagatgaaggctaggggccaagctaccaagttttcagtaactgtgaggggatgaccaggagggccaaggatgacaaagaggacggggagaaggtggcagagctgggctgcatgaccctcaaatcagcagggatttttttttttttatttttacacaaggatgaaggagacatgaatgagttgaaacttgcaaacagggtggaccttaccttcaaggaccctggcagaccctctctgaacaaaactggagacatctaccaggagcaagggtggtcacggccattagaaggtgcccttccatgcggagttgtcttacatctaaggcataggaatctctaagctctacgaagacagggacctcatcatcttgttcatcaggcaggcatgtcatagcttataataaatgcatatttattggctgggcgcggtggcttatgcctgtaatcccagcactttgggaggacgaggtgagcggatcaactgaggtcaggagtttgagaccagcctggccaaagtggtgaagccccatctctactaaaaatacagaaattagctgggcatgttggcccacatttttaatcccagctactcgggaggaggattgcttggacccaggatgcaaaggttgcagttagccaagatagtgccattgcactccagcctgggtgacaagatcgactctgtctcaaaaaataaatacatgcatatttatttatttattttatttttggagagtgtgtctctctctgtcgcccaggctggagtgcaatggcacagttatagctcactgcagccttgacttcctggctcaagcaatcctcccacctcagcctcgcgagtagctggaactacaggtggacatcaccacacctggccatttttttttgtagagatggggtctcactatgttgctggtctccaactcctggtttcaagtgatcctccctcctaggcctcccaaagtgctgggattacagaggtgagccacttacctgacccataataaatatttattgaacgaacgactgaattcaccaattaatcgctatttcctgatagcccaccgggatccgctggtgcaatgataaagagcgcaggctttgagatcaggcggatctgtattgggactgcggctctcagcctccgcttgtacctgctgtgcagtgaggactccaggaactgatgatgaaccggcacggtcctcggcacgtggcaagttctccataagtgggctcagtaaaatccctctcccgggaaagcgccccaccgtgtttggtggggtgactgggacgcgaggatgcggctgggagtgtgatgagaagggcggggatcggcgaggactcca

SEQ ID NO: 15594 - DNA, 2300 bp, Homo sapien
tatgatgtgtgcatgggagttcctaattactctccggcctaatttactttggtgtagcactgactccaatattaaggctggagaagccctttccaagatcagcatcccaagctggcctgcggtgcttatcacagcttcttagggctctcatctcctcctgggttcagaactgaacccaaactacatgcacagcctgactcacagctgtgggttgcagtgattgctgggcttcattagggaggagtgtggtttcccgcatgcttagtctttggggggagtctgaaagagaatcaagcattccttatgccagttgcttaatccttgggggtatctgaaagaagcaagcacttcttagatcaatattttcaagacttatctgatgcaggcctctgcctggggctggaggatagactgtttcttcagcttctctctctccagggtggatatgaacttgagcccttgcaatgaactgcttgcatgttttcccccctgggaaatttgtgtatgtatgtgcaattatgatgggggaaacggtttaaagatactttcaaaagtggacacttctagtgtttgtcccttgacaaatgagtttctcgacctgtttttttttcattatcaacgcctcccctagtctttttaatttccccaccctcacccctaccccatgaaattttattttctttctttttttttttttgagaccaagtttcgatctttttgcccaagatggtgtgcaatggcgcgatctaggctcacctcaatctccacctcccgggttcaagcgattctcctgcctcagcctcccgagtagctggaattacaggcatgcaccaccacgcccagctaattttgtatttttagtagagactgggtttctccatgttggtcagtctggtctcaaactcctgacctcaggtgatccgcccgtctcgacctcccaaagtgctgggattacaggcataagccaccgcgcccggcctcttttcttttcaagacagggtctcactctgtcacccaggctggagtgtaatggcgtgatcatggctccctgcagcctcaacctcctgggctcaagtgatcctcctgtctcagactcccaagtagctgagactacaggcatgtgccacgacacctggttaattttttttttttgtattcttttgtagagatggggtctcactatgttgcctaggctggtcttgagctcctgggctcaagcaatcctcctgcctctacctcccaaagtgctgggattacaggcatgagcctccacgtctgccctgaaatttcaatatcacagctatactgtatatctatttatgtgctgtatgtatgctgtgctttgtacataaaaaatatgttttattttttgccccgttggggtgagatagagaccgcactgagaatgcacgctttacataattagttcacaacttgcccccggcagcctccaccacgtaaaattagaagaaagcagcccagcagggcctacaaggaatgtgtgaacggatgcacgtaaagtgcttagcaaagcgtggtaaacaagagcccttgttgtcattcttgctttaagcctagtcccagtgatgtctgtaaccctctcttgggccaaggagtcccatggctctggagggctgttcagaggactaagtcattcccagtctggagctctacgggatcagtaggtacctaagggagtgaattgggcttggagggactgtggccagaagacagctctgggcctggtggtgatagaacttctgatttctcaggaaaagccaagaatgtggattttgggttaaatctcctgaattttaagcattggctcaattaaacaacaataaggcaatgtgaaccgaacaaaagggatgaaaccaagatttactgactttcccagagtcacgggcacggctgggattccaacaaggactcccaaaccagtgctctttccacttaacctaacgcacacccttcatctcgccgcccctccccacttccccgtctttgggagttcttcgatgcctcttcccccctccccccaggattccctccccataggccacccgccttccagcagggcgtggtctctacagaggaggtcaggtctcccaggcttcctcagcgtcgacgccggggagcgccctggggttgggagcgcccggggcccgcgaaggaggaggtggctcaggtgtcagggcgcaccgtgggaaccggccccgggggaggcgtggaaacgcggggcctgggactcgaccagcctctcccgtgcggatcgcaaaatctcggagctgaaacagccc

SEQ ID NO: 15595 - DNA, 2300 bp, Homo sapien
aaatagagcatctggagccaccagtttgagaccctgacctacaggaatctgggtccaatgggaaccacatttctcatcctcacttggtgcaacgccttcaggaaccaagtggctcttttccatccacagcccttgcatccccaggccccggcgccatgaggtactgtttgttgttacagaccaaagtcatccagggcacttcattcaaaaggcaggatgtgggctgtgagcttccagctcatcagttcaaaggaaatctacttcagcagcaatgtctcctgggatgttttcccaagcctccctgggaggtggtggggcctcttcaaggactaataatagacaggcacatccagtttcccaaacatgtcaaccttaaaagtgaatgctattttttcctccttacctttgaattactatgtaggagagggacattctattattgcagcccttgctctcgacatgctacctaataatgacttaccactcagcagcttccaggcaaaattgtcatagtgggacctgagctcgtgcaactccagcctgccccccttcatccaccactactcaggttcacccctttgtcaccaggatgctttgtagtcaggccagcccaatcaccattcagcaacggtatgactgtgggtgtatcttaatcactctgaacctccccatccttatccataatgaaagttaccagatctacatagggttgttgcgggggctaaataagacagcacaagtacctgatgcccagcaatcacttgatatttattattaaacacctactgggtgtgagtgggggtaagaagtgccgacctttaagtcttcattcattcacttgttcatccatgccctcactcaatcaaccaatatttactggggtcttgggaggtgtcaggcactgagcttggtgctgggcgacatggtggtgaacagcccccctgctctcacagagcctaggtctggtgaaggagctcacagcctaatgaagctctgcgttcccagagtgggggacatggtggcagtgggtatctttaggccttgtgcatgaacagggcgctaaataacattgaattacacattgtagacaattattaccctttcagttaccttcagatcacatcaaggagagagtcctggttggatagtaatgtctttaacacccctctagcatttattaatttcctctcttaacaaataaaagatgacttcagtcgaagatgcttaggacagatgacggcacctggagatattttaataatgtagatacctcttgctgttcaaactcagaccaaaagagataggctttttttcccccagagggtgcacaaatacgaccagaatttgtgaagacgagtcagaaatgaatgaaatttggaaaaatattgatctactgaaatccttcctccccacactattagccctatgttacagttggggaaacggagtcgttttgcagaggggatggacagaaggtagggagttctcttccaaacgtgcaggaggcaagcaaagccaagaatcttctctgtggtggagttagagacatataaaataaagatcgctcctcccctacctctgcagaacgtgtgtgtgtatgtgtgtgtaagtgtgtgcggccacaagcctttccgaatgagtgacagcgggagcccatccctccaggagacgcgtgcagaatgaccaatgggatggatgggggtggatgggtaccagtctccgcagaggccggggtggaattcgctgcgccccaccccttccacccgctccccttcgccccgtaggtctttccactctcgctcctcccctgggcacatctcctgaacgcagccccgggggccgaggacggggtggggtggggggcgaggctcgggtccgacgaccccgggctgcggtcccggcgctgcagagctgcggctgtgcacgcttagccgcgaggcccgcggtagcccgggcgccgatatgtaaagcagctggcagcgctgggcggggcctgggcgcgatgcaaatgaggagggcggggctggcccggggctccgcctccctcccccgcagctggggccagcggtgccaagcgcagctggacgagcggcagcagctgggcgagtgacagccccggctccgcgcgccgcggccgccagagccggcgcaggggaagcgcccgcggccccgggtgcagcagcggccgccgcctcccgcgcctccccggcccgcagcccgcggtcccgcggccccggggccggcacctctcgggctccggctccccgcgcgcaagatggctgacccggctgcggggccgc

SEQ ID NO: 15596 - DNA, 2300 bp, Homo sapien
acgtggctaaaccccgtctctactaaaaacacacacacacacacacacaaaaaaaaaaaaaaaaaaaagaaaaaaaaagttagctgagtgtggtggtgggcgcctgtaatcccagctacttgggaggagactgaggcaggagaattgcttgagcctgggaggtggaggttgcagtgagccgaaatcgtgccattgcactccagcctgggcgatggagtgaaactctgtcaaaaaaaaaaaagagagaaaaaagaaaaaaagaaaaatggaagacttatcgggaatgcaggcagctgtgcgatttcagcttctctttgtttttggaccatgggttttctggttcttctttggttcctgcaggtctgactttctcctttttctgttgatggtctttcttggcctgtgtttgcaatgggtcaaccatgtgctttctggccatacttcacacttacttcccaactgggacagatagcatttcttaagtctaattccaaacttctgggataatctgattgcccttcattgagtcagaagccagtggatagggacatggaagatgctatagctgggctccacccttgcaggtgagaggagcagtttcaggaaagtctgccaggcatgagctgagaccttaagagatgtcagctagaattagccactgtcagtatatctgcttctgggtcccactcttcatcctgcttttcaaggttttcaaatatacactcctactcagtctcatgaaaattattatttttaaaataccctttagcacatttacctctaatgatactagattcttgcctcctgcctctgtaaatcactcggtcacttcccgatcttatatttggctgtcaagaatgtggaaatctcacagaacccttgaatttcaaagttggaagggaaaattgcttgtctatgcttataaaaaatacacacctacacccacgtacacatgtatttactaaaatagtattaggctaaatattcagttgtacagctttctgatttcattaacaatgtctgtctttccgtgtcagaagagatagacatttgaaaaaacggcagcgtaggattttgttctatggatgagctaaaagttctttcacctgtccacaaacttccacctagtccgtgtgccttataaaacacaaattctgaaatcccatgtaacgtgtcagctagattctgcctatcactgagtagagatgaaccatcacatctcatgttctagatttggggttacaaattcaaattcctacaggggccaggcaactgtcttagatgtgtgaaacgtcctagatataagaaatgcctgtaaatgaaaccttaagagtttttataagcatacaaataagtatgtaatattttgaaacatacttattttttggtgtacccacacaggcctagcatcaccagattcttctctctttttttttttttttgttttgccccaagagaggcaggaaatgagtatatttatgggagctttcctaattgtgaagtgttggtaagttcattatttttaaaaaactaaaaaccaacttgcaggccaaacaaaatgtgggccaccaatgtgtaatcactgatgtagataatgcacttcaattaatctaaaatcatcaactattttggcagccctctcagactgctgactcactgagcttttcatctgatgaaatccttaagtgattcacaaatacttaatctgaaaacctcttaatctaacttgtgttcctggacttgtaaattgggtttctggaccttaatacttgctcatgttaaatccattctgttacttatgtttaaggtcctacatctgtcttccagcctgatcacccatcttttcagccatgtgttgtttttgaattcaactcatttgatcctttctctatgtcctttttttttttttttttgagacggggtcttgctctgttgcccaggctggagtgtggtagcacgatcaggactcaatgcaacctcgacttcctgggcttaagcgatcctcctgcctcagcccccacaagtggttgggactacaagcacgtgccaccacacctggctaatttttttgaattttagtagagatgaggtctcactatgttgcccaggctggtcttgaactcctgagctcaagtaatcctcccagctcagtctcccaaagtgctgggattacaagcgtgaaccaccatgcccagcctctctgtgtcttatgataaaaaaaatactggatgagacaagactgaggaggaagacccagggaccctttttagcagagcttaccagcgggtgtccaaggattg

SEQ ID NO: 15597 - DNA, 2300 bp, Homo sapien
actcccactccgttcagttgttctgacttgctccacatgcaggctcgggacttcccacagtgatcaggttggccctggacagcaattccaaagaatgagcctgcctcaccaagtcagaggctcaggacaaagctccagttttatcacatgtatccctttctcttattcagcaaaactgggtgcatcctgacccataattgttaccttcatctacctgagctcctgatccttttcccccaactatccttctgctaggctcctgggcaccatactctgcttgtctgcgcttctgttgtagagctaagtgggtggagatgaagatgctgctgttccactgtgggtctggtaaatggagagattggggcatactgtcccttagcccgaagctcactcacctttcatcaacatggtccttctttgaaagaagacctttctcacttctatccaagcaagagaagaatcaaacagatcctgaaatgactgctttgatcattagtaattatttcatcttatttacctttctgagagtggggagagaaatttttgctaactgaattaatccctcccaagaaataccaacctcacctccatgttacatatggctttcccttaaaaaagaaaggtaataacaatcaaggcaggatatttttattaagatgcaaattttcatttcaggaaagaaaatgacactaagaaacttgtaggggccctcgtgtatcctctccctactatcttctgtcattcttctggagtacggctgtggtgctggccccaagtttatccattccattgtggattatgtggcaagatttcagtatttctacctcctgtccataaatcagtgtttttgaaccacgacacatgcatatgcaactaaatgctcataggtatacacacctacatattcaaatctatactatacctacacacgtgcatgcatacacatacatgtgcaaatatgtatgcatatgcatagcaaaaatgctaggcatttgcagcaaatatgttcacatggtccataacactgtctgcaggtacaaacatacatttacatacttgctttacttctatgacggattcacaggcattcagaatttataactaaactgaacatagcacaggtgagcattcaaacacaatcactccacagctatatattcaaacttcctcctgcacatgagtatttatctaacaccaagaataaagtcttcagtcttaacaccaaaatgaaagtagcaaagtcaccaagaagttgtgagctgcatttgcgaacccttcaatatattcctgctacccagtcacctgaatagaagttcccaggcagccagagatggcaccaggggagtatgtttgtctgcgattacctcccgttatatttctgtccagctaaataacattcaaacatgacagttggttgcggacacatctcaggaactgtggaaacaacccaagcaacctcatttccaactatctgacctctggatatcagtcccaggatgccataagaaaaaaaataataagggcatttctgtgggctgtttctagtcaactcggtgtgtgcccatgcatatgccggaatacatagtaataaaaagctggttaaatgctggtcctttgcaatactggctatttccaaggaagagagctttcaggtgtgcaatgccatttgccctttggactaacaagcaaagcagacctaacttcacctgcttcatggtctcacttagataacaatgttaacaaatgatatctcagagacctttgaacaaaatctgacattttcagtgactctcccaccatgaatccatcacccccttcgatgtagatatgttaaaatgtataaaaggcatattcaaaggccaaaatcttatagtcttttgcccaaggtccctaatatgtgtatgacagagtctatgtatatttagcttcttccatcttttaggaatacatgatcatgtatatatgaacagttccgggtctgatctgagcgggttgtcttcggtgtaaaccagagctccagagaaaggagggtagacatattggtttgtttgctggggaaccaaattgagacagactctacacagatgtgattgtgacaacactttttgcccgcctaagcgagccatagagccgtctccagagctgccggtgcctttaagaagactcggtctttcgggtcttctttttccccaatgggctccagtggtgcccgcagcaaaaggcaaacttgcctggctcatggggtgaaagggaggattgaagaatgccgcgttgggtgggtgctgagggagcgccagagt

SEQ ID NO: 15598 - DNA, 2300 bp, Homo sapien
gctttcccttaaaaaagaaaggtaataacaatcaaggcaggatatttttattaagatgcaaattttcatttcaggaaagaaaatgacactaagaaacttgtaggggccctcgtgtatcctctccctactatcttctgtcattcttctggagtacggctgtggtgctggccccaagtttatccattccattgtggattatgtggcaagatttcagtatttctacctcctgtccataaatcagtgtttttgaaccacgacacatgcatatgcaactaaatgctcataggtatacacacctacatattcaaatctatactatacctacacacgtgcatgcatacacatacatgtgcaaatatgtatgcatatgcatagcaaaaatgctaggcatttgcagcaaatatgttcacatggtccataacactgtctgcaggtacaaacatacatttacatacttgctttacttctatgacggattcacaggcattcagaatttataactaaactgaacatagcacaggtgagcattcaaacacaatcactccacagctatatattcaaacttcctcctgcacatgagtatttatctaacaccaagaataaagtcttcagtcttaacaccaaaatgaaagtagcaaagtcaccaagaagttgtgagctgcatttgcgaacccttcaatatattcctgctacccagtcacctgaatagaagttcccaggcagccagagatggcaccaggggagtatgtttgtctgcgattacctcccgttatatttctgtccagctaaataacattcaaacatgacagttggttgcggacacatctcaggaactgtggaaacaacccaagcaacctcatttccaactatctgacctctggatatcagtcccaggatgccataagaaaaaaaataataagggcatttctgtgggctgtttctagtcaactcggtgtgtgcccatgcatatgccggaatacatagtaataaaaagctggttaaatgctggtcctttgcaatactggctatttccaaggaagagagctttcaggtgtgcaatgccatttgccctttggactaacaagcaaagcagacctaacttcacctgcttcatggtctcacttagataacaatgttaacaaatgatatctcagagacctttgaacaaaatctgacattttcagtgactctcccaccatgaatccatcacccccttcgatgtagatatgttaaaatgtataaaaggcatattcaaaggccaaaatcttatagtcttttgcccaaggtccctaatatgtgtatgacagagtctatgtatatttagcttcttccatcttttaggaatacatgatcatgtatatatgaacagttccgggtctgatctgagcgggttgtcttcggtgtaaaccagagctccagagaaaggagggtagacatattggtttgtttgctggggaaccaaattgagacagactctacacagatgtgattgtgacaacactttttgcccgcctaagcgagccatagagccgtctccagagctgccggtgcctttaagaagactcggtctttcgggtcttctttttccccaatgggctccagtggtgcccgcagcaaaaggcaaacttgcctggctcatggggtgaaagggaggattgaagaatgccgcgttgggtgggtgctgagggagcgccagagtgcgctacgggcttcgctccccttcccctttccttaacccttcctagagcggaggaaccgggtcgtgctgcagcgcccaggagccagggcgctgactgtcctcggctccagaaactttgcgcggagagtgggcttgactgggcagagccgagccggctggctgacccgggaaggaacgggggaagggcggggtgagggaagaaagaccctttagcaccccgggtttctagcccgggcggcggtgtgcagctgcatgagggagctgtcccttcggcaccacggaccttaaagcctaggcgttaagacgacggaggcggggcaacaggcggggagctgtcccttcagcaccacggaccttggcgcccccagggaaaccagccggcccccgccccaggactctgtcttttctccagtttgagcgggggtgtcgggagcaggcggagagctttcctgcgaggctgtggaagcagtgaacactcttctcagcggctcgcctcccagcagtgctattttttgccatccgccctcacccccagcacacgcgctcgcacacacacgcacgcacgcacacacacacacacacacactcacacagagacctc

SEQ ID NO: 15599 - DNA, 2300 bp, Homo sapien
tgctctagagaggaaacagctgtgagctattagcagccagtgctctgggcatctggggatggatgcactggctgggaagagggtccctgtgaggcaccaacagcacccactacaccagtgggtgcctcctgggccagcaacatcagcctcccctgggaatgtggtaggaatgcaaagtcttgggccttcctccagaccctactgaatcagaaactccggggatggtgcctcacagtctgtcgtgattccaatgcataccaacgtttcagaaccactgcagtataccacttgggtcactgaacaacaaatgctgatggcagagaaaggcagtgagcattgattcaggaggctcgaggttccccaaggaacacaggactgccgcactgcataactctagagagcactattccagttgcagttcaggtcaatggtgctcacagagtacagtctgaagcatgcaatggagtacagttgcatggtgtacacatggagtggtgcagctgccaccaaggagccaggcctgggctactctattaagggaagtgcagtgctttctagcagggctagaaagtctaatcagggccaggtgtggtggctcacccctgtaatcccagtgctttgggaggccaaggtgggagatcgcttgagttcaagagcagcctgggcatctctacaaaaaatgaaaaaattatccaggcatggtggtgcatggctctagtcctagctacttgggaggctgaggcaggaggatcacttgagtgcaggagctccaggctgcagtgagcttaggttgcaccactgcactccagcctgggtgacagagtgagaccctgtctcaaaaaataaaaaagtaaaaacaaaaatcccagagaagccatgcccatgtgtatgccccgatcatttcttgaggcccatctgacctactgcatgatgtgaaactgagacagagtgaggagccccttttgtaagggcctgtgaagcctaagaatggaagtaaaggaaaatcctgagttccttcaagggaaattccaggcacctagctggccctgagaactaaataagtaacttactttttttttctctctctctctttctttcttttttttttatttttgaggtggagttttactctgttgccaggctggagtgcagtggcgtgatcttggctcactgcaacctctgactcctgggttcaagccaatctcctgcctcagcctcccgagtagctgggactacaggcgtgtgccaccacctccagctaatttttgtatttttagtagagatagggttcactatgttggccaggatggtctcgatctcttggcctcttgatctgcccacttcggcctctcaaagtgctgggattacaggcctgagccaatgcacccggccctaaataagtaacttcttaaacaagaaaggcaatcatcctgaaacaatagccaaggaagttaagagttaggagatatttgcttaccctacagaaactaaagataacaacttaacaaagctccctgaattgtctttcagatggtgggacatagaccccaagtaagagtgaagcgaagactcaactttaaccaccaccctctaagtttcttttgaggagcttggagaacgtcactccctgtgggtctaagtggtacaggcgctaaaaaattatttaggcagatagtgagggtaaggaagtcctcggctgtttcccttttaacaaaaagcagtccctaaatcatttattttctaacaaagagcagcctgtaaaatcgagctgcagacatagataagcaagctggaagcttgcatgggtgaatgcagcagctgtgccaataggaaaaggctacgtggcggccaggcatgttcaacatggcggctccatcttcccttttctttgtcaactaggtgtacagtaaggaaccgacaacatcacaccggccaggtagagaagccatttgcataatagaagattagggtggggtggccagcttctttgcgcgctttgtaaacatcacacctagtccaccaatctttgggccctatgtaaattagacaacacctcctcaagccagtctataaaccctcccctccccgcacatgcatttcaccgcaaaacccaaagacccacttaggtgtcccctctctccgcagaagagagagcttttccctttctctctgttaaacctcttctcttaaactcacttcttgcgtgtcctcgtcctcgatttccttggcgtaagacgacgaacctcaggcatttaccccagacaacgaaggtgcttcataaggtcatgcagctggtaagt

SEQ ID NO: 15600 - DNA, 2300 bp, Homo sapien
ttgcaggtggtgaatgcattttgacctgtttgatgtgatatgaagtgaggcctctgtaagtgagaatatcaaggttgaacaaagtttttggcagatgagaacggttggaccaatagacaacattctttccaaggacatccccccctgcagattaggttatgatccactctgtcatatcctgagggtgtggcccactttgagatcccatgatgcaccacgctgattaaattaggcattcagtatataaaggggtcggccacagacgggcaaaaggaacagattcaccgcttcggagtgaattccatgacggcttgcaattttctcgtcgagtttttctttcactagagatagccctcgccctttcattcacacagaggcttttaagaaaaaagcaaccaacctgaagaggacctggcagcaataagtttttggtgaaataacaaagaggtaaaagtggaagaaacttgttatatatgaaaagtactgatgtgtgtggttgagttaaattgtaatggtatctctagagctgcccttgactacggccaaaattttattgccacgacatctctatggatcacgtaaaaatgtatccagttattcagcacgtatttattgagcacctactatgttctaagagctgaggatacagcaaaaacaaatataaagataagattcctattgtcagccgaaggtaggggttgggggagatagataattaaaaagtaaatgtgtaactgtcaactatctgcaagtgctaggaagaaaagactaaagggatagagaaagatcgccatcttattttaaaaagatggccttaggaaggcttttctggcaggatggtgattaattttaaatcaagttcagtaagaatttggagtgtgcttgcaggaagtccctgggaaactctgctacttctcggctataggatcttattctcagttgcctaaattcactgagcctagcctgtaaaattcagagaggatgaggaacatggattgtaaacgataataactatcgtttatgaatgtaattttattatattatgattttttctgaatgtaataacgtccccatgcccaaaggaaaaaaaaaattccaatctactgagggggttcttgtcactgttcctggcatttgcgcttaggaatggaatcgggaccctgccactgagcaggcatccccttctgcaaattcagaaagtacatgattgctagcttcagttccatcatctataaatcggaaataatgtcatgttgaccacgtagggtttttgttgttaaattgacatttattgagctacagctattaatatttcggtgcattgagccacgtcaatgcaccggcatggtcttagactatggatttatgtgcatttatttaatccaagtaaaccaagtactatttttaatggcattttacagccaaggagacccaggcacagaggggttaaatctagagcccccacagccagggatccaacccagacaacgtggctgctgagcctggcaatgttgttatgcgatcagccctgtgcctagcacatagtaagagctcaataaatctgtatggtgctggtggctgttatcagttcttggcagcggctgctccacgatttccacttgtcaagagtatagggtagccagtttattggaagcagcagctagggagcgcttgcatagcaaccatagttttctgcgtagcaaccataatgctcacttaaattgggaggcttagaggagctgacggggcctgtggggaagggggagttagccggccacccctaggcaagccactttgcagtggaaactgcacgcagcccctgcaaggcgagctctccccaccgagcctccctgtgagccggtcctcctgacgcgcaacccccctcccttttgaagcagatggttcttcccgttgtccctgctctttcagtttccgcgctttggagtcacaaagcgcggggtcacgtgggcgggccgtgcgctttgtgacgtcagccgccccgcctctcggcccgcctatccgcgcacgccagccccgcctcgcgcgcgccgcccgtgcaatccctgcttaagagaccccgcagtggggcgctcgtccgaagccaggccgcgtccgccatagtacctggcttggaggtgtcgccgccgctcggtgagagcccccgagcggcagggggccaacacaaaaagggagccggagaagccctagccgctgcccagcagcttgcgggcgtgttctcgcggttccgggcctcaaggcgacggaaacgaaaggcgagcgaagcgcggaggatccggcga

SEQ ID NO: 15601 - DNA, 2300 bp, Homo sapien
gcattttctgctcaacaatgtgtatcttctgtttgggaaagcactagtgatggattactttttaaagcaatacatttagcttgcaaattgtgcctttaaaaaaaaaaataggcagacttttgagggccaagaaggaagctgtccagttttccaaaaatcctttttccctgctatcagaaatgtgaaaccaaatttagcaaccaagattaatgaaaagatgggttttccattagtgctgtccctatcttgttcttggctttgttatgtcctttcccctagactgtatcccgacaaaatgtcctagtaacaaattgctttttaagctcctgttctgggaaaactaagcattaaaattgattattctaaaacataaagtggactaaagccatcctattttataattttctaatgcaaagtggtttagtatagagttaacacttagaagtttatagtttactgtttttattcttatgtactgtaaggaccatatttgagtttttggtctattcctaccattgtttctttgtggggaggagttggggcggtttgggggattggttttttttttttgtttttttaaactacaggtatttgtaaaacaatgtttgggttcaaacaaattagttgttaaacatctgtaatccagttttctgtaaatgttgctgttgttctaagctctgttaatgttaagcattctttgtatataaaattacaataaaatgttaaaactggttgcttgttttgtggatgaatgtaaagacaaaccccaatgaatggctgatatgagtgctaaatgcctgaagattcaacttaactagaaatcactcccttagaccctgcttacatctagaccttgtatatcatacctcaaagatgaaattcataaaacttatctgaagagtttaatttaaaattataatgctcaatgcacatcttttgcacttgagttgaaactaacatcactacctaaagagccttctacttctaatatctgctgcataatacgttcagtcattctacccccatccctacctccacattgtaagtataaattagtcttaatgctctgacacttgaattatttttaaaacatcaagtgtttctattctaacttaatatcagtctttaacttgtagaaaagtagtatgcaagtcttaatgtaaggtacaaacagggtctaaggtttgagtgcccccagaatgactttcttcagccttgcagacacctaaacatcatgtaattacctaaggaattcccaagtgcctcttccaggttatacgtgtaaatagctgtttttatgcaagattagttagatactgctctttacaggatgagtggtgttgtctttggctgtgtggtcttaaatgtgtttctaatgtgtgtgtcaaataattacctgttaaacagactgccaatctggctgaagccaatgcttctgaagaagataaaattaaagcaatgatgtcgcaatctggccatgaatacgacccaatcaagtaagttcataaatattttatactaataggaacttttggggtgggttttcccccccaatcaaaagcactattttttcaaagtcctcgtatacatgtaattttttttcccccttttagttacatgaagaaacctctaggtccaccacctccatcttacacgtgtttccgttgtggtaaacctggacattatattaagaattgcccaacaaatggggtaagttcaaagcagaaactatggtatatcttactttttttcctttggaattgttccttagctatcttatttttcttggttaatactgccttctgtagacaatggcaaatgagcatggtctctggagccaaatttgccaggcttcaaatcttggttctggcacttggctgagtttgggcaagttacttgatctctataagcctgttttttcttctctaaaatggagataaaatagtacgtacttcacatagcagttacaaggattaaatgagatcacatatgtaaagcactacaagtaatatagtaagcactgtataacattagctaatttattaaataaagataactgctttttctcttcctcctcctcttcctttttcctctgaataggataaaaactttgaatctggtcctaggattaaaaagagcactggaattcccagaagtttcatgatggaagtgaaagatcctaatatgaaaggtgcaatgcttaccaacactggaaaatatgcaataccaactatagatgcgtaagtatgcaaattaggtatgacctgtggagactccagtcagtcccagggtatagtgtt

SEQ ID NO: 15602 - DNA, 2300 bp, Homo sapien
ctgtcagcaaacagcagagtattggcttgcatttaccctcttggaagtagaagaaagtcaggggtcagacaatatctaagataccagtttaatttaagattaaagttaacaagctcagctcccaactgtgaacaagaattgcaactatttctcttctagaccccactgtcccaatcatctcccaccgtctcttttccaaaagaagagacaggagattgttagaggctcctgccctagtgggcgggtacaagcaatattaatctaagaagtaagaatcttactgtctaggtcaggggtccccaaccctgggccacagaccagtatccatccttggcctgttaggaactgggcaacacagcaggaggtgaacagcagctgagcgagcattaccacctgagctccacctcttgtcagatcagcagtggcattaagattctcataggagcatgaaccctgttgtgaactgcgtgtgcaaaggatctgggttgcacgcttcttaggagaatctaatgcctgatcatctaaggtggaacagtttttacccccctgcccccgtccatggaaaaattgtcttccacaaaacagctccctggtgccaaaacggttgagaactgctagtctaggtcataatcaccaccaggataaaggagcctccaaaacttcataacaagagttttggccaggcataatggctcatgctggtaattttagagctttgggaggctgatgggggaggattgcttgaggcctgaagttcaagattagcctgggcaacatagcaagactctgtctctaccaaaaaaataaaataaccagacatggtggcatgcacctgtggtcccagctacctgggaggctgaggcaggaggatcacttgagcttaggaagtcaaggctgcagtgagctataaccacatcactgcactttagcctaggggacagagtgagaccctgtctccaaaaagaaggaaattcgggatatcttctagtgcttcattgctaaacttatgaaagtttactatgtcattactggatcacattttaaaagaaggtaatagttattcatggctcactgaaaagatgcttaaaatctaaacccctactgttgctgttgtgtaccaattatttataatttaaagcacctctagtttaacagaagtaaccagttctgtttggtgaggcacaaattagaaacttagccaacactgttatttttacttaagcttttgagagaaagcgttgatattttcattgttaattatagaagttaaaactagaatttattctgctttgtatgatctttacccacttcctccctcaaaaaagaggttacaggagttggttttccttcatttaaacttttggggccaggtgtggtggctctcacctgtaaccccagcactttgtgcagatcacctgaggtcaggagtttgagaacagcctgcccaacatggtgaaaccctgtctctcctaaaaatacaaaaattagctgggcatggtggcacacgtctctagtcccagctacttgggaagctgaggcaggagaattcgcttgaacccaggaggtggaggttgcagtgagccaagattacaccactgtagtccagcctggacgacagagtgagactctgtctcaaaaaataaaaaataaatgaataagtaagcttttggggagagctaggtcatagcagcattaacctgtcagtgccttcaaaagacagtttaggaagtaacaggtagtaattagtggagtgataatcagtctgaacttcataaaagagaacttttaaatacaatatttccgtgtagagaaggtcctataaacttgcatcatctcagtcgagacatggccttaaaaattatgttgtagagttatttttacaaataaattgtactaatgttgctacactagttgaatagttggttctattccactgtttttaagtttgaaaataattatggatagaagagataagcttacttgtctcagatgactttagtttgaagaagtaatatcttggaatttatttttccagaagtataaaccgtgggcgacaccacagcgaaagatcacagaggactcaaggcccgtcactaccagcaactccagtctttgtacctgttccaccacctcctttgtatccgcctcctccccatacacttcctctccctccgggtgttcctcctccacagttttctcctcagtttcctcctggccagccaccacccgctgggtatagtgtccctcctccagggtttcctccagctcctgccaatttatcaacaccttgggtatcatca

SEQ ID NO: 15603 - DNA, 2300 bp, Homo sapien
gtgtagaactaacagttgtggggattaaattgcccttgtcccttaaagttattcatagtatcaaataattgggaaatgtttttggaaggaaagaaataggggaatagccaaaaaacagttcccaggacccttttaccataaggctacagcttcttgctggaacattaacctgcgtaattatgaagtagtagtagaatacagatcgctttattgatagaaaaagtgaattataaaaattccctggaagtttgtttaaaagactttattttttagccttacacttgaaatgtggtttcttttaaaactaggctgttggccagtataggacaaaaaacagactcctacttcaatattcagataggaagtgaaatttaaaattaattgacattttgtttaatgttagttagctcatataactcacggtacattaatgcacttcactctaattgttaagacttcacttttgttttgtaacaagtgattgctccgatttgtgtactttattccattccagtagaggtcactgtgcctctttaatcatctaagatgaaatttgatataaagatagatgaaaccgtgaggaaagaatgctagaatctgagagtctgtgttttattttgtatgtatttctcaactatcaactattgttttgttttgtttttaggtctaaatctccctatagtggttcttcgtattcaagaagttcatatacttattctaaatcaagatctggttcaacacgttcacgctcttattctcgatcattcagccgctcacattctcgttcctattcacggtcacctccataccccagaagaggcagaggcaagagccgcaattaccgttcacggtctagatctcatggatatcatcgatctaggtcaaggtcacccccttacagacgctatcattcacgatcaagatctcctcaagcgtttaggggacagtctcctaataaacgtaatgtacctcaaggggaaacagaacgtgaatattttaatagatacagagaagttccaccaccatatgacatgaaagcatattatgggagaagtgttgactttagagacccatttgaaaaagaacgctaccgagaatgggagagaaaatatagagagtggtatgaaaaatattataaaggttatgctgctggagcacagcctagaccctcagcaaatagagagaacttttctccagagagatttttgccacttaacatcaggaattctcccttcacaagaggccgcagagaagactatgttggtgggcaaagtcatagaagtcgaaacataggtagcaactatccagaaaagctttcagcaagagatggtcacaatcagaaggataatacaaagtcaaaagagaaggagagtgaaaacgctccaggagatggtaaaggaaataagcataagaaacacagaaaaagaagaaaaggggaggaaagtgagggttttctgaacccagagttattagagacttctaggaaatcaagagaacctacaggtgttgaagaaaataaaacagactcattgtttgttctcccaagtagagatgatgccacacctgttagagatgaaccaatggatgcagaatcaatcacttttaaatcagtgtctgaaaaagacaagagagaaagggataaaccaaaagcaaagggtgataaaaccaaacggaagaatgatggatctgctgtgtccaaaaaagaaaatattgtaaaacctgctaaaggaccccaagaaaaagtagatggagaacgtgagagatctcctcgatctgaacctccaattaaaaaagccaaagaggagactccgaagactgacaatactaaatcatcatcttcctctcagaaggatgaaaaaatcactggaacccccagaaaagctcactctaaatcagcaaaagaacaccaagaaacaaaaccagtcaaagaggaaaaagtgaagaaggactattccaaagatgtcaaatcagaaaagctaacaactaaggaagaaaaggccaagaagcctaatgagaaaaacaaaccacttgataataagggagaaaaaagaaaaagaaaaactgaagaaaaaggcgtagataaagattttgagtcttcttcaatgaaaatctcgaaactagaagtgactgaaatagtgaaaccatcaccaaagcgcaaaatggaacctgatactgaaaaaatggataggacccctgaaaaggacaaaatttctttaagtgcgccagccaaaaaaatcaaactcaacagagaaactgggaagaaaattggaagtacagaaaatatatcaaacacaaaagaa

SEQ ID NO: 15604 - DNA, 2300 bp, Homo sapien
ttgctttgttgcccaggctggtctcaaactcctggcctcgagcaattcttccacatctgcctcctgagtagctgggactacaggtgtgtgccatcacacctggctaagttttaaaatattttttgtagagatgagggtctcactatgttgtccaggctgatcttgaactcctgggctcaagcaatcctcctgccttggcctcccaaagtgctgggattacaggtatgagccactgtgcccagccagaatagtactattgatgacacaatgatgaactatctaggttcaaaaattgttaatattttgctgtatttatatgtaaatacatgcatatgtatgtaagtatatctacaagtaagttacaggcatcatgacacttctctaaatacttcagcctgtatcatctaagaagaacaggccaggcacagcggctcatgatgcctgtaatcctagcactttgggaggttgaagtggaaggatcacttgagcccaggagttggagaccagcttcagctatatggcaagtctcctgtctctacaaaaaatagcaaaaattagccaggcatggtggtgcatgcttgtagtcccagctactcaggaggctgagatgggaaaatcgcctgagcccaggaggttgaggttgcagtgagccgtgatcacaccactgcactccagcctgggtgacttcgtgagaccctgtctcaaaaaaaataaacaagtaaaaaataaacaaagggccaggcgcggtggctcacgcctgtaatcccagcactttgggaggccgaggagggcggatcacgaggtcaggaaattgagaccatcctggctaacacggtgaaaccccatctctactaaaaatacaaagaaaaaaaaattagccaggcgtggcggcgtgcgcctgtagtcccagctgctggggaggctgaggcagcagaatggcgtgaacccgggaggcggagcttgcagtgagccgagatcacgccactgcactctagcctgggtgacatagcaagactccgtctcaaaaaataaataaataaaataaaataaacaaagaacactttcctacacaaacacaactcccgaatcactcttgaagagaattaaaaatgatttcctaacacaatctcacatgctgtccatattaaaatttcaccaactgtccctcaaatgtctttttatgactgttttaatttttctggtcaggatccaatgtaggatcagaaattgcatttggtttttgtctctttactctttttttctagaaaagatttctacccttttgtaagtgacactgatttttattttttaattttattaagacagggtctcactatgttgcccaggctggtcttgaagtccttggctcaagcaatcctcccacctcggcctcccaaagcgctgggattacaggcgtgagccactgcacctggcctgacattgatatttttaagagctcatccaggctagttgtcatggaaacatctcacattttggattcgtgtgattgtttcctcggggtgttttctaggctcgatttccccatctgtgaaatgggcgcagtgacagtagccaccacatgggtaccacattctactccccaggcagtgcgagaactgcagggcatagtgcctgcacagcgcctagtgcagtgtctggcacatcacggatgctgaataaatgagccattgccatcaccatcattccaaccagcatcctccacctcatcaccaccagcatcttcagcaccccagagtccaagccgcgtcaatgcgcaaacttgtctcattctttcctcacccttctggaatgtcttatgcccctcctgctcagttccctctctcctggagaccttaagcgatgaaacttaagccgtatgaatctcttagcccctccagcaactggagtttagcctcacccatcttcctaaggacaacctctcttttttttagaatcacaattttctgaccccaaatggtttagacacagtgaggcattaacggtgtcatgtccacccagggagcaggcgggtgcttcgtcattgctggtgctggtggtgggtgaccttggcgcggaggctgtcggtgcggcagctgctgcagtgctgtcggagggttgctggggaaaggagattggctggcgaggaagatgaggaatgtgctgccaggagactgggatcacggccagatgctaattacgatggcctgggggtgctggtaccccctgtcagcatcatgtaaggaagtgtgggggctggcgggagtgggggaggtgagagaaacgggcaaggtgagagggac

SEQ ID NO: 15605 - DNA, 2300 bp, Homo sapien
acaagcctgggcaacatagcaagatcccatttctacaaaaaatttttaaaatgagctgggcatggtggcgtgcacctgtcatctcagatacttgggaggctgaggtgggagaatcgcctaaggttaggattccaaggctgcagtgagctatgattgcgccactgcactccggcccaggcaacagaatggaaccctgtctctaccaaaaaaaaaaaaaaaagcttctgagaaaataacaaatacaaaagcccagagatggacaagagagcactgagctgaagggccacagataccatttctttaacagtcaaccctgaggacttgaggggtaagaattattaatttccattttacagatatggacaccgaagttctaagaagctcagcaatgtgccaagtgctagtgttacacaggaaataagtagcagagacaggctttaaatctagctctgatgccaaaggctatgttccttccaccatgcttgattctgccccttccagaatcagggaccctttaggttctgggtgcccaaagtttttgacccacagtaactctagtatctggtaatagctgggatcaaaaggtgccccagaggctggtcaaggtggctcacacctgtaattttagcactttgggaaactgagacgggaggatcactcaaaggccaggaggagttcaagaccagcctgggcaacatagtgagaccctgtgtctgaatttttctttttttttttgagacagagtctcactctgttgcccaggctggagtgcagtggtgcgatcttggctcactgcaatctctgcttcccaagtttaagcaattctcctgcctcagcttcccaagtagctgggactacagacgcatgccaccatgcccggctaatttttgtatttttagtagagacaggtttcaccatgttggccaggctggtcttacgaactcctaacctcagatgagcctccccccttgacctctcaaagttttgggattataggcatgagccaccgtgcccagcctatgtctgaatattaaataaataagtaagtggtgctccagggggttccctcacactcttctctttctcttgctgcacccctgaaccctaatgacctatggatcttcgtggtagaggtgccatattggctgtgctcagtaactaggctcaaagtgctgaccgctgtgcctgtctggctgtcttagccagtgagatgctgtccttaggcaatagcctacctatatgtttcagccgatccctgaccccacacctctagacattctccactagccagcatgttgaacatcttttctcttgcttctttatagcaaaccacttgttccctgccaccccatgttccgccatggctaccacgtgggctgacgccttcacagacatgtttctctcgctctttggaattgtctgtcactgacccaatgcaataaggctgcccaatgtgctctggtcatcccaggctgaattaatcaaagtataaggcccagaaccagggaggtggacttgggtcagccctagcccgggaagaacattcagttctgggaggaagggtgccaaaaggcagttaagttcagaggcaattatccagagagcacgaggctcaaagccaaaatgtatgagtaacattgaaagaattgaggttgtgtggactgaagcagagatgactcaggcggagactattcccaaatgaggctgcaggggactgcagggggagcttcaggagctggggctcactgccactaagaattcactcctctgctggcatctggctcttcaatgctcccaagcctctctgagtctgagttccctctcccacccaccttactaacttttttttctttttttttttttttgagacggagtctcgctctgtcgcccaggctggagtgcaatggccatgatctcagctcactgcaacctccatcttctgggttcaagcaattctcctgcctcagcctcccgagtagctgggactacaggcgcatgccaccatgcctggctaatttttgtatttttaatagagatggggtttcaccatgttggtcaggctagtctgaactcctgacctcaggcgatctgcccgtctcagcctcccaaagtgctcggattacaggcgtgagccacagtgcccagccacttactaacttgtctaacctcctggcttccgaaacccatggccctgctatcccttctgtcattttcacaaatgattctgcctctttcctcaggaaattgaggccaataagaaaaacattctctgcaccatcaactaattggtatctgaaccc

SEQ ID NO: 15606 - DNA, 2300 bp, Homo sapien
gccaccatgcctggctctatcaaatcttcaaaccttatcatagtataccactgctatttaagctattgcagattagattggaccatatgaaattgtcattttttcagtaacagcttttttgagaaataattcacataccctacaattcacacacttaaaatatacaatttggctgggcacggtgacacctcttgaaaccaggggttcgaggctgcagtgagctgtgatcatcccaccgcactttagcccgggtgacacagtgagatgctaactctaaaaaaataaagcatacagccaggcgcagtggctcacgcctgtaatcccagcactttgggaggctgaggcaggcagatcatgaggtcaggagatcgagaccatcctggttaacatggtgaaacaccgtccctactaaaaatacaaaaaattagctgagcgtggtggcgggcacctgtagtcccagctactcaggaggctgaggcaggagaatgatgtgaacccaggaggcagagcttgcagtgagccgagatcgcgccactgcactccagcctgggtgacagtgcgagactctgtgtcaaaaataaaataaaataaaataaaataaaataaaataaaataaagcatccaattcaatggtgtttaatacattcacagagttgtgcaaccatcaccacaatcaattttagaatattttattcaccacctaaaaaacccacattctttaactatcacccccatctcctgatcactcactcccggcccccagcaaccactaatctacttcctctctctatggatttacctattcgagacatttcatataaatggaatgacattatatgttgttctttgtgtctggtttatttcacttaccataatgttttcaagggccaaccatgccatagcatgtgtcagtactcaactcctttttatgccaaatattagtccattgaatggatgtgctaaattttgttagctagatatggtagtgcacatctgtagtctgttactcaggaggccgaggtaagaggatcacttgagcccaggagattgaggccagcctaggcaacatagtaagatcccatctcaaaaaataaattaatatataaaaacaaacatcatctctagagagacaattccagtgaaaaaataaattttatttataccttcattcattgatggacatttgagttacttctactttttccctattatgaataaaactgttataaacatttatatgcaagtttttgtgtggatatatgctttcatttctcttgagtatacacctagaattagagttggtgggtaatatggtaaactctatgtttagatttttttttggccgggcgtggtggctcacgcctgtaatcccagcactttgggaggccaaggtggacagatcacctgaggtcaggagttcaagaccagcctgggcaacatggcgaaaccccacctctacaaaagatagaaagatcaactgggcgtggtgatgcgtacttgtagtcccagctacttgggaggctgaggcaggaggatcacttgagcccaggaggtcaaacctgcagtgaaatgtgttcacaccactgcacccagcctgggtgatggaatgagaccttgtatcaaaaaaaaaaaaaaaaaaaatttttttttggagacaaagtctccttctgttgctcaggctagagtgcagtggcacgatctcagctcactgcaaacttcgcctcctaggttcaagcaattctcctgactcagtctccaagtagctggggctacaggtgtgcaccactgcacctggctaatttttgtatttggtagagactggtggggggcgggagggcattgcatgtgtgtattcatattttttaacatacattgtgacatgattctgtggaacaaatgcagtgatataaaatgcttttgaaaattataacattaaggccaggcatggtggctcacgcctgtaatccagcactttgggaggccaaggcgggcagatcacctgatgtcagcctggccaacatggtgaaaccccatctctactaaaaatacaaaaagtagctgggtgtggtggcacacacctgtaatcccagctactcaggaggctgaagcaggagaatcacttgaatctgggaggtggaggttacagtgagccaacatcacaccacagcactccagcctgggtgacagaacaagactccgtctcaaaaaaaaaaaaaaaaaaaaaaaaaaaaaagaaagaaaaaaattatgacattaagtgagtataagggggtatattatttacgtactcacttttgtag

SEQ ID NO: 15607 - DNA, 2300 bp, Homo sapien
actgagtcattaaaacctaaaaaagtctaataaaaaaaaaatcagccaatcttaacagctgtgcaaatgttgataaatatgactgttttcattgccttatgttgttgtgaaaaattattcctaaacctggtatgaaagcatattgtgccattacgtatatgttcatatttttaaactcctaatgaaacaccatagtaacttttaaacattttaagtagaaaggattatgaaagaaaaacaaatatgtgtgtaggtaaatgaacctcagggatgatagcaggaaaaggaaagtcactagcatttattcggtgcccactacattttatattttgtaaacctgattttttttttcaaaaaagtgttttttatatgctcatcgcaaaaaagaaaaaaacagatacactaaaagaagaaaatgaaaaaaagtcataatcagttaacgttttggtgcatatgtttcatgactttctgtgcattcattcactagcttaacctatcggagaggacaggaacccaacatgtctagggaagttttgtttgtttttaacgggagagattcaagcatgttgtaaagccagttgaagctgggcgcggtggctcacgcctgtaatcccaacaccttgggaggccgaggggggcgatcacctgaggtcaggagttcaagaccagcctggccaacatgacgaaaccccgtcattactaaaaatacaaaaatagctaggcgcagtggtgcgtgtctgtaatcccagctacttgggaggctaaggcaggagaattgcttgaactcgggaggcggaggttgcggtgaacggagatcgcgccactgcactccagcctgggagacagagcgagactccgcctaaaaaaaatgataatataataaaaaaataaaaaaaaaagccagttgaagaacttaggttagaaaaaggagaatgggatgatccacagagtggggtttctgagaaagtaaaggttatagattttaagcacagaggaggaattatctttaaattagaagaaaaagcttgatgagaggttggaaagaacacacgcaagtgaaaatatgtatcttactgtatctacatgtatgtgtattgttgtatctacctgcagatatgtatgtcttattgtatctacatgtaggtatgtatgtatacttttaatgtacacatatgcatctgtgtctacatatatacatatcttagtctatctacatgtatgtatcttactgtgtctacactaagatgtttcttactgtgtgagctacgttggaacctgctttttcatttattctattgcaaccatttcctccatgccgggattattcctccacatcatttttacagtgtcctaatacatgccagtagctgtttttgaagccatctagtagcgctggacattttggctgtttgcaatttttcaccatcatcaataccacagcttagtatctcgaaggtgaaatatttgcagatacccagaattatttcctgagcagaaaatccgtgcaggcggaactgctgagtcaaaggtcggtggataaaaatcgcttttaagcctcacaacccgcctcaggtatgcattctttacctgaggaggaacagagaagcagagaggttaaataactggcccaaggtcaaaaataattagaagtggctgaattcaaaagccgcgcgggctcatcaggctgcagttggggtaaaatttgcgttttaggcaattttttttttttttttttttggcgtgtgtcagtgggggaggggccgggcggcgggtaggaaacttgtgtcgcagcaaagaaggaggaggaggggagggactcccctcctcggtcagaccggagccggccgcaccgaaaaaggttggactcgggactccgcaggcccccccagccactccgcggggcgcctcggaggctgtgacctccagggaggtccggctgggtgcagcgtgacacgccggggcggttgccaaggacctgcccaatctgcgggtccagttgctagggcctccatcttgggggccagtggccgtggcgcccccggaaggggttgccgagtggggcattcacttccggtctggggcctgcggcggcggcggtgtcggcggcggcggcggcggcggcggcggcggcggcagcgggtcggtgtagaaaatggcgctggtgcagcggctcgggcctctccccgcggcgctgcggagggcttgaggctcgcgagcctccttcgccgcgccccacttgctcgtgcactttacacacatgaggtgagcggaacaagggcctccctccgggcgggaggagc

SEQ ID NO: 15608 - DNA, 2300 bp, Homo sapien
ttgtaaagccagttgaagctgggcgcggtggctcacgcctgtaatcccaacaccttgggaggccgaggggggcgatcacctgaggtcaggagttcaagaccagcctggccaacatgacgaaaccccgtcattactaaaaatacaaaaatagctaggcgcagtggtgcgtgtctgtaatcccagctacttgggaggctaaggcaggagaattgcttgaactcgggaggcggaggttgcggtgaacggagatcgcgccactgcactccagcctgggagacagagcgagactccgcctaaaaaaaatgataatataataaaaaaataaaaaaaaaagccagttgaagaacttaggttagaaaaaggagaatgggatgatccacagagtggggtttctgagaaagtaaaggttatagattttaagcacagaggaggaattatctttaaattagaagaaaaagcttgatgagaggttggaaagaacacacgcaagtgaaaatatgtatcttactgtatctacatgtatgtgtattgttgtatctacctgcagatatgtatgtcttattgtatctacatgtaggtatgtatgtatacttttaatgtacacatatgcatctgtgtctacatatatacatatcttagtctatctacatgtatgtatcttactgtgtctacactaagatgtttcttactgtgtgagctacgttggaacctgctttttcatttattctattgcaaccatttcctccatgccgggattattcctccacatcatttttacagtgtcctaatacatgccagtagctgtttttgaagccatctagtagcgctggacattttggctgtttgcaatttttcaccatcatcaataccacagcttagtatctcgaaggtgaaatatttgcagatacccagaattatttcctgagcagaaaatccgtgcaggcggaactgctgagtcaaaggtcggtggataaaaatcgcttttaagcctcacaacccgcctcaggtatgcattctttacctgaggaggaacagagaagcagagaggttaaataactggcccaaggtcaaaaataattagaagtggctgaattcaaaagccgcgcgggctcatcaggctgcagttggggtaaaatttgcgttttaggcaattttttttttttttttttttggcgtgtgtcagtgggggaggggccgggcggcgggtaggaaacttgtgtcgcagcaaagaaggaggaggaggggagggactcccctcctcggtcagaccggagccggccgcaccgaaaaaggttggactcgggactccgcaggcccccccagccactccgcggggcgcctcggaggctgtgacctccagggaggtccggctgggtgcagcgtgacacgccggggcggttgccaaggacctgcccaatctgcgggtccagttgctagggcctccatcttgggggccagtggccgtggcgcccccggaaggggttgccgagtggggcattcacttccggtctggggcctgcggcggcggcggtgtcggcggcggcggcggcggcggcggcggcggcggcagcgggtcggtgtagaaaatggcgctggtgcagcggctcgggcctctccccgcggcgctgcggagggcttgaggctcgcgagcctccttcgccgcgccccacttgctcgtgcactttacacacatgaggtgagcggaacaagggcctccctccgggcgggaggagccgcgggcgctgccgcagggcccgcaacccgcggcggcggcagcagaggcggcggcgccgggcgtccccgagacttcgggcctcggcgggagggcgcaggctgcgttgctgcggaggccgagcgggcggcccgggggagcctcgctgcgccgcgccgcgggggccaggccggggttgcgcctcgcccgcgccgcgggaccgcagtccgggctgcagccccgcagctttgtgagtccccctccccccgtcctctcccctcccccatccggccccggcgcgagcctctgccgcagcagctccgttttcacgcgcatctcgtttttgtgtgtgtgtttttgttttgtttttgtttttgtttttttgtttcagagaattggaagctaaagctaccaaagacgtagaaagaaatcttagcaggtaagatgggcgagctttccgtctcccgccccacgataatcgtatatttctactccgattcgccttttctgggttgagaagttcccccgtgacattttcttccgcacccggagagcagacattcgggagaagcggcctgggggaatactg

SEQ ID NO: 15609 - DNA, 2300 bp, Homo sapien
gcatgaggtacacgaaggaatatacgttattgttacatattagaagcattatattgtctgggagacaaaattttcacccataattaggcctagaaagcactttgccccaattatcagtaagagactcatcagtgagcatcaagaatggaaaggattataaacagtagatggaatatttgtaattattcactgtaattcttcctgaactacaatttgtattactttagaaaaatggaagtcacatggaaaaaaaaaaagaggctaagatcatatattatattaaaaaagtataaatgacatagactaaatttaccagatgttcagagaagaaagaaaatggggagatcagtttgttaggtgaagggaggctagagctgagagtgtggaagaggaagttggtggctattgtaaactcaggtgaccaaggctttaatgacattgtcatatatattgtaggcatttgataaagatttcttttggacacagtaataacttcacttctgtttactgagtggttacaacacactgggcacttgaccaagactgttgctactttatggaggagaaagacacagaggtaactcagatggtgaatagtgggctgttttaattccagggtgggagctcttaacccttgaatggagatttttctctgagtgccctcaccagtaacatgggggtgtttcacttcacttatctgacagtggtatctgtgaggatacattacagcatttcatagaaacattcaactgctaccaaagtataaggtggtattgtgtcagtcattaacgaatagccactgtttatatagccttatgttctgtgttttataaacatgaagacatttaaccttaggatagctctgcaaggtgtaggtactatctccattttaccgagaaaacagcaggctcagttaggtttatacaacttgcccaaagacagaaagcttgtaaaggcagggctggggttgaaacctggcaccaaaagctcatacaccatgcatctctgtacttctccaactgggtttacttacactagcttaaggcatttccatccgttttatttctttctttccactcttttatgagtcaaaaatttccctatttgcagtttccgatttatttttcagatttaagatagagcatccagattatttatctcattttgattcatctcatagataacgttatctttgtctttagttccatgttctgagtttgtcttatatgattcagatattacatttttagcaaatacagacattgttaacttagcctttttgtaagaaaaccagcaggttgttttctaaccttgtgttgttcttgtgttgtcttccaaagatgaaaaatagagaccaaacacattaacaatgaggcagaataagaacagttgccaaggaatagaggattcccttaggactactgaaaattggttggccacatttgttctttgagtcattgcgagttccctggttttgtaatgatccgatgatgatgtctttgaccagagagtaatgtggtaaaagagatagtgaacatgagttgttgtcttggccgaaggtccctgggcccttattgggtaggtaggtagcagaagtgaaatatgactcttggcagtgacatctcctaacaaaatttgagcctgtaaatgaggatatccctgctcacagaaagcttctgtttttttaggattatttttcttagtgcctttgaatttagatggcttactttggaggtacactttactggctaatcttttccaccccttttcttttgttgggattagtgccagaacagataaagcccagtgtaagccagcctcagcctgccaactctaataacggcacttccacagcaaccagcactaataataatgccaagcgagctacagccaacaatcagcagccacagcagcagcagcaacagcagcagccgcagcagcagcagccacagcagcagccacagccgcagccgcagcagcagcagccacagcagcagccacaggccttgcctcggtatcctcgtgaagtacctccacgatttcgccaccaggaacacaaacagcttctaaagaggggtcagcattttcctgttatagcagcaaaccttggatctgctgttaaggtgttaaacagccagtcagaaagcagtgctttaacaaatcaacagccacaaaataacggagaggtgcagaacagcaaaaaccagtcaggtgagagaaggcatttcttacgagactcacaccttatcatcattagctgtatagcaagttgataaattcgtagctttttggtgatgtat

SEQ ID NO: 15610 - DNA, 2300 bp, Homo sapien
taatgtgggccatggaagtagtactgggccatggggtttttcccatggagccataataagcacatgtcaggtctctgtggatgctcctgaaagcaaatctgaaagtagcaacaatagaatgaatgcttggggcactgtaagttcttcatcaaatggagggttaaatccaagcactttgaattcagctagcaaccatggtgcctggccagtattagagaacaatggacttgccctaaaagggcctgtagggagtggtagttctggcattaatattcagtgcagtactataggccagatgcctaacaatcagagtattaactctaaagtgagtggtggttctacccatggtacctggggaagccttcaggaaacttgtgaatctgaagtaagtggtacacagaaggtttcattcagtggtcaacctcaaaatattaccactgaaatgactggaccaaataacactactaactttatgacctctagtttaccaaactccggttcagtgcagaataatgagctgcctagtagtaacacaggggcctggcgtgtgagcacaatgaatcatcctcagatgcaggctccatcaggtatgaatggcacttccctttctcaccttagcaatggagagtcaaaaagtggaggctcttatggtactacatggggtgcctatggttctaattactctggagacaaatgttcaggccctaatggccaagctaatggtgacactgtgaatgcaactctaatgcagcctggcgtaaatggtcctatgggcactaactttcaagttaacacaaacaaaggaggtggtgtgtgggaatctggtgcagcaaactcccagagtacatcatggggaagtggaaatggcgcaaattctggaggaagtcgaagaggatggggaacccctgcacaaaacactggcactaatttacccagcgttgagtggaacaaactgcctagcaatcagcattccaatgatagtgcaaatggcaatggtaagacgtttacaaatggatggaaatctactgaggaagaggatcagggttctgccacatctcagacaaatgagcaaagcagtgtgtgggccaaaacaggaggtacagtggagagcgatggtagtacagaaagcactggacgccttgaggaaaaaggaactggggaaagtcagagtagagacagaagaaaaattgatcagcacacattactccaaagcattgtaaacagaactgacttagatccacgtgtcctgtccaactctggttggggacagactcctattaagcagaatactgcctgggatacagaaacatcacctagaggggaacgaaagactgacaatgggacagaggcctggggaagctctgcaacacagacttttaactcaggggcatgtatagataagactagccctaatggtaatgatacctcatctgtatcagggtggggcgatcccaaacctgctctgaggtggggagattccaaaggctcaaactgccagggggggtgggaagatgattctgctgctacaggaatggtcaagagcaatcagtgggggaattgcaaagaggagaaggctgcatggaatgactcgcaaaagaataaacagggatggggtgatggacaaaaatcaagccaagggtggtctgtttctgccagtgataactggggagaaacttcaaggaataaccattggggtgaggccaataagaaatccagctcaggaggtagtgacagtgacaggtccgtttccggttggaacgaacttggtaaaactagttctttcacttggggaaacaacataaatccaaataattcatcaggatgggatgaatcttctaaacctactccttcccagggatggggagaccctccaaagtctaatcagtctctaggttggggagattcgtcaaagccagtcagctctccagactggaacaagcaacaagacattgttggatcttggggaatcccaccagctacaggcaaacctcctggtacaggctggctggggggacctataccagccccagcaaaagaagaagaacccacaggctgggaggaaccatccccagaatctatacgtcgcaaaatggagattgatgatggaacttcagcttggggagatccaagcaaatacaactacaaaaatgtgaacatgtggaacaaaaacgtcccaaatggcaacagccgttcagaccagcaagcacaggtacatcagctgctaacgcctgcaagtgccatctcaaacaaagaggcaagcagtggctctggtaagtttctattttatgaaatcaagcctt

SEQ ID NO: 15611 - DNA, 2300 bp, Homo sapien
ggagatgaaaacctgtgttaacagtgacaatgaggccgggcacagtggctcatgactgtgatcccagcacttcaggaggccgaggtggacagatgacttgaggtcaggagttggagaccgcttgggcaacatggtgaagccttgtctctacaaaaaaatgcaaaaattagctgggggtggtggtacatacctctgggcccagctactcaggaagctgaggtgagaggattgcttgggccggggaggcacaggctgcagtgagccaagattgtgccactacgctccagcctgggcagcagagccagacactgtctcaaaaaaaagtgacaatgggacatcgaaatggatgtgctttagcaggcaggtaaaaatgtgggactgagctcagttgtgaagtctaagcaacatgtttatatttgggcatcacttgaatgggagtgactgctgataccctgatagtgaatgaagtctaaggaaagcaagtttacagagagagtcaaaagactgagaccctgagtctactttgtcagccgcagagtatcccagcattgaagaagcacccgaggtgagctcagcatgggtagaggaagagaaaccagaatggacagatggtgaggaggggtggtagagagcattgtccacttttaaaagatttgttgaaatagagcagtagcttttgggccggagctggctatatccagcaaagattttgcaggaaaaaagtttccaggagagaagatcattttttattgcagagcagtcagaatgaggagaggagcagacagagcaaagcctaagagaggggaagatgttaccctgtctggtgtccagtttcctcatctgctaaaagggcgataacagtagagttacaaacattaaattagtacacataaagcattcataggccaggtgcggtggctcacgtctgtaaatccagcactttgggaggccaaggcaggcagatcacctgaggtcaggagtttgagaccagcctggccaacatggggaaaccctgtctctactgaaaataaaaaaattagctgggtgtggtggtgggtgcctgtaatcccagctgctcaggaggctgaggcaggaggattgcttgaacccgggaggcagaggttccagtgagccaagatcacaccactgcactctagcctgggctacagagtgagaccccttctcaaaaaaaaaaagaaaagaaaaagcacttataatggcgactgacataaaccaggcatttattaaatggtggtttatcacagtgggtgttgattgtttttattacttgttaatggaaacttacctgtattataaaactcagcagattagagatggctaaaggtgccttaagttatgtaacctaagagtccttttaaaacgaggccgggcctggtggctcatacctgtaatcctagcacattgggaggccgaagcggccggatcacttgaggtcaggagttcaagaccagccgggccaacatggagaaacctacatctctactaataatacaaaaaatagtcaggtgtagtggtacactcctgtaatcccagctactcgagaggctgaggcatgagaattgcttgaatctaggaggtggaggttgcagtgagccgagatcccaccactgcactccagcctgggccacaaagcgagactgtctaaaataaaaaagaaaaaaaaagtgaggttatcagccagccaccttctgtttactagtctatttcaagttaattatttcagtaaaataacagtatctcctaattgcgacttcatttgtgaggaatgcaaaatttatgaaatggaagtgtatttttcacatacccttgtcttggctgaagtcatttcagtttggaaagtgagtgttttgcttttgttgtaaatttatctgaaaccaattgggttgtcttcctgtttgataacagtctcctgcctttattaggaatgttacaagacaaacgaatggagatagataaacatagcctaaatattggtgattacaatcgaacggtcgggaaaggccctggttctcggcctcagatttccaaagagtcttccatggagcgcaatccttattttgataaggtaaggttttttacttttacctctgacttgataaaccagtatacttcatagcgtaattttcacactaatattttaaaaccttttatataatataaagtgttacaatccactaccaaatcttattactggattttgaagttcactgtctttttatgtctcaatttatcatagaggttgcatttatatttttcttcttaatcccatgaaatatgtt

SEQ ID NO: 15612 - DNA, 2300 bp, Homo sapien
ctgccttggcctcccaaagtgttgggattacaggcatgagccaccatgcccagccttcaaaatcacactatttcaaaaactccacactcgtttaaagtgcattagaataaaggaaacatttcactttttaaaggactagctgtcttaatcttaagtaggatattaagggtgggaaggaaggctgatgttcttattagaaacagtacaccagagaatttttgagcagtgctgttttggtgaaacagctggggatggtcacagtcacatttgctagctctcagaacttgaagttttaactactgtctaactatgtataaatgattactgatataaatttaaaaatggaggtaagaaaggagattgcctttcttatacatgcaactccccacccccacccactcttttttctctgttatctccaggcttttattcactgggtagagattttgagcttatatgttgtttctttcctaggtctctttttttcttgtgcccttgattatattttaaccattgattgttcatgccctgtttattttgctttttttctctctcttttcctatacagtggtttcttgtaaaccagctttgctggttgttagccagagtgtttgaagaccatcagttaactagttgttctgggctgtgggcagaggctggggcatgctgttgcccctgctgctgcctcactctgtgactgaactggtttggctcagcctggtattaccacagactctcacctgggacataaattgtactttgagtccttaggattgttagtgatctctgcatttccaaaaacagttcccttgtcagttactactgtgggtgaatactgaagaagccatttagtggtggccaggtgatgtcagagacaacagttagtagtaaaagaatgatacccaagtacagggagaagtttttgtctcatcagtgaagggagctggctcttcctatttgactgcacacttgacatataaattggccacataagttctaagcataggatttcctgccctggccagcttctcagtgagggatacttcttgattaagaaagtctgcttagcccatgcaaataccaatacagttatctaagttcggcaacaggctatggcctgttggccaaatttggcccactgcctgctgttgtaaggttttgttggacacagccacattttctctaacctggggtctgtggctgctttcgtgctgcaccagcagagttgcatggagacaccgggaccatgtggcccacagagcctgagataccggctgaacctctgcagaaaaaaattgtcaactcctgatccgattgatgggtccaagagtagcaaatttaattgctctctgcaaaaatacgcatggtattagagaatttgtattattaaagttttcaggtttgacagaccttaacatcacatggactcatcagaccagagaatttaaaacaatttaatttggaactttagaataagaacctcttgggaattgtgaaacaaagattctggctcccactggaaagtcttcatttttaaacaagcgttttaggtgattctaatattaatagtccctagattactcttttaagaaaaactagcttaatagttttctgaccactgtatctaaggttgaaatttccattcttgttccaagagaatatccaagtctgaggggcctcatcagcaaaggtcaagtaaattgtgccttaagatatatctgtccccagcctaggtgtaattgctagtacaggacatttttactttagaatttgcaagcaaaagatagcaactgaaagtgaccacagatcttcatgcataggtacacttgggaaatagctaaacagatacattttattccaagtaaacttatacatctggcttccttaaaacttttctccctcttattttgccaaggagttttaaataaatcatcaaaattttatggagaaatattttctacgtataactaaattatagtattaacagttatgtggtttgaaaacattagttacatgtttttctaggaaatagaagttgtgctactagaaagaaaatgtgctgtattttctaaggttttgttttgttttttaatttttcaggcttgaactcaaacttgaatgtaaatatggatatgaacagtattaaagagccacagtcaagactaaggaagtggacgacagtggacagcatttctgtgaacacatctttggatcaaaactccagcaaacatggtacaaaagatacatcttaccaaaaaaaaaaaaaaaacacacacacctgcagaatactagatttaggc

SEQ ID NO: 15613 - DNA, 2300 bp, Homo sapien
ggcaccccgtgaagatctcctttggcagctcctgagttggggctcttttgcagtccttttttccctgagtaaacaacaaagttctaaaattcacttaaatggcctttcttgagtgactcaattacggttattaagaatttcacaattgctattttagagcaattcagattgttttccatttcagtttgagtacagttttggacactggcctaagaatttcataggtcttacagctgttagtaacagatcaatggcttgagtgtttggagggatggaaagcagtttcctttggactgattttcttttttggcagtttagttgatttggggttttaaagtttcttttgtttgttagatttgctttttgtgggagaatggatgtcattatttaaatttcctcctttcttaaacattattcctcccctctccattttttccccctttgagtagccagaaatagtgattccaaattgacatggtctcctggttcagttacaaacacctctctggctcatgagctgtggaaggtccctttgccacctaaaaacatcactgctccgtcccgcccacctccgggactgactggtcagaagccacccttgtctacgtgggataattctccccttcgtataggtggaggatggggaaattctgacgccagatataccccaggtaagatgcagtcgtaaggtgggtttctgtggtttatttgctaaacgctaaccagtactaacagtcgagtttaacagagacctgaacggtaaactattgcctcacctccatcagggggaatgagaacttcggtaaacaaatgatccacccaaaggcacacaacaggctgcaataacattaatgcattaggaagctccattgtctcagaagttcctcaagactacatcttaaaatgtgtaggaacttcctgctcatggcaggcttaaaccacatcacatggagcagaaggcagtattgggcaagtctggggaacatgggagcaggccatctgggccttgaagactaggggggtagcttggcctgtattaaatggggacatttgagagtgaaagagagtgctgttgattaatcatacatggccaacaggcataagccagaaggccccggcagtctggttcctctgcctttcctcattctataatgactaacattggatttgtactggcatcatttcctgcctgtgctgtctccacaccatacatatacacacacagccccagatgagcctagcagtttccccagtaaatacagtcttatccttcactctaccttgcctgcaaactaccaaacattcccatcttcaagctgaaaatgagtaataaaacctcattaatattttctgattaaatatgtaatttctgatctttagacaggtgattggctgtaggaaaacttgcagcttttcctttgagtgcgggttaattataggaaaagaacactaaagtacgtgccaagctgctgaatgcaagttaacataattggtgtggtgtgagtggtttttggtttggtgtgagtggtttttggaggccgcagacatctgtctggatgccagctaagagactggcagcacacagcgaggggcgctagtgaaagtggcccaggaacccaccccagggaggcttggtgcagttgagtggaattaggaaacctgtaggagtaagccaagcgaaccgaggggcagcctctgccaaggcccagacaccggagaaagcacaaaggctcccgttggagtgatgagaggattgcagggagtggaggaggattccgtgagaggtggataggcctgagctgtgtcatggaatggtctttcccagcacctgaagtgtttgtgaggtgccttgagttgcagatggggtcagggatgagggctgtactcccaggggaagggtggatgccacaggggtccagcaggaaggccagatggggagcccctgcagtaaccccggggaaaacaaggagcatctgtgcgatcgcaagctctggaatccccttaaagcttcatgccctgaaggacacacacgcagagtgatcagacactactgaagtcttccccagatggtaccgtttgagattattttagctcctatcaatgagaagatctcaaaaagatgcagccttttgtggctcactgccctcctctgtggtgaactgggagccattctgagctcactgtcgccagaggcagagccccctgccataggagttaatgcctggccatggctagggcgagctgaaattctgggcctagggagaaagcctcccatgtagaagtgcaaggaagtgaaggaa

SEQ ID NO: 15614 - DNA, 2300 bp, Homo sapien
caggtgcacactgctatgtccatctaattcttcctattttgtgtagagatgagggtctcactgagttacccagactggcctctaactcctggcctcaagagatcctcctgcctcagcttcccaaagctctgagatgatagcatgagcccctgcactccacctctcctattctttatagcactgagggtaaaaatgaaaaacctgacagagaaacaatcggaggtgacaagccaagggtcgagcaggccacatctggccctcaaggatgcgtaatcatgaaactttgcagaacttctctagaacaatcagaagttctgaccccattgggcctgtcttcccccacgtggagctgggtcgtggctgtcctcttcagctgggacacatgctctcgggtcagcctcagctccacctgcccggcttcactcactaccacgcctcttctgtagacaccctgcacatggctaaggctccccagacattcccaagaagtcaggactggaccccaggttggcgaagcagtgcaccctcggtggcaccccactgcctttcctggtgctgtggcctctgctgcagatcacagattcatggccttctgtctgtccctcttctccaatcccagctgttccttctgtaaatctgtcccccagggcaggtccctcccccaaaggccccattcatactggtgttggtcagtcacccagtgtttgctcacccaggccaccctttatccagtcaagccaccctccactgctcctgcaggactctagagccaggtggcctgggctgaaatcttgctgtgtcacttacaacccgggtgatcctgggccgatgactcatctcctctacctctgttacctcgtcagtaagatagagataacaggacctaacttcgagggttgttggaaagaccaagtgagtaaaggcatgttgtgcccttagagcctggcacgtgttcatcactgctattatttctggctactcggtgccaggacaggggcctcagctgagggccccccagagcctggcaggcccagtgaaggagtgagatggggaggccacgactcctccccagtcagcagctgtcctgtggccatgggggcctggtgaggccagatcttcaggttgttctagaaaagtgagtattctagaattatgtttcaagcctcttggtttgcaaatactagtaactatttttaaaatgttttggtatttggcctggcacagtgtttgacccctgtaatcccagcactttgggaggccaaggtgggaggatcacttaaacccaggagttggagaccagcctgggcaacatagcaagattctctctctaccaaaaaaatgaaaaaattagctgggtgtggtggtgcacgcctgtagtcccagctactcgggaggctgtggtgggaggatcacttgagcccaggaggatgagcctgcagcaagctgtgatgccaccactgcactccagcctgggtgacagagtgagatcctgtctcagaaataaaaagtaaataaagttttggatgctttgagcatctggcagaaatcttcgctatgccccgctgatgtcctgggcccgatgtgggcgcctggccatggctcggtcactcctgacggtttttcagggcctcagacacctcttcttcttcttcttcttctttttttgagactgattttcgctcttgttgcccaggctggagtgcaatggtgtaatctcggctcaccacaacctccgcctcccggattcaagtgattctcctgcctcagcctcccgagtagctgggaccacaggcatgcaccaccatacccggctaactttgtatttttagtagagatggggtttctccatgttggtcaggctggtctcgaactctcgacttcaggcagacacctgttctttgccatgcctctgtctgaagagtatatggaaaggggttgcacaagcaatggttgctgttcctgttgctgccactgcggtgagggctgtggctggacgtccctcctggcactttgcctctgtcccctccatccgccgccagcatttttcctcccctccccttcctccagctcgtcccaagcctgcctgtccccagcgtggaggcgggacagtggaagactgggtgagtgaagcaggatggtgccttgggctccagcgtctccccaacccctccatgccatgggtccccacgcaggtgaggaccctggtggaggacggtgtgggcagagcgtgggacatgtcaccttccccacctgctcagagttcaagggtcctgggctgggccccgttctctcttctgccc

SEQ ID NO: 15615 - DNA, 2300 bp, Homo sapien
tcctttcttatgttttttagaggcagggtctcgttttctcacccatgctggaatgcagtggcgtgataatagctcactgcatcctccagccactggactcaagtgatcctcccactttggcctctcaaagtgctggtactacaggcacatgccaccatgcctggctgctttatttttttgtagagtcggggtctcactgtgttgcccaggctggtcttgagtgatcttcctgcctcagccagtcagagtgctgggaatacaggcatgagccaccgagactttacccttttcaatcctgaattctgggccctgtaaacaggcagccggggaataggggaaggaggaagaggaaaaagcattcagggagtccacatgtcatgggcaggagtctcagttctgccccttactagctgtgtgacctattaccaaacactggccctcttcaagcctcagttttcttctctgtgaaaatggggataacagagcttgccctgcaatgagcttatgaaacttgaatgagataatttatataaattataatgtgcataatttatataaaaggccttacttggtactggtgataagagtgatacatgttcatttctttccttcatttccttctccttctttcttagagaaccagtaggatcttagcagagtttgaaaaaggctaaaatctctcctttccccctacccctcccagcccaaaaccagagccccagatctgttgttttccctcctgccctcatcagtcccaggttcctatccctgatctcagctggtgtagggaggagagtgatgtgattcagctctctttagagaaataattctaaggcaactcttccagatttattcatgcttttgtccaggacatatctattaactcaaatggttgcggaattggtagaaattctgttattaagaccaatcaaaccaatcaaactctcaaggagaaggtggcttgggatcaggggtcatgttatatcagggtgaactagtcatgcttggtggtccctcctggctgttctgcctctttctgcgtcttcccatggggccctaatgaggaggctgctaagtgggctgagggcagcacttccgtgtcattggggtggcctctgttaacagttttcttcttattgaactttcaaaacgataggcctttaaagccctttcaaatgtgcataatgtacttaatttttaaaataaacttgtttgtttggagtaattttgaatttatagaaaagttgcaaagataatgctgagagttcccatatgccccttactcagtttcccctgttgttaatgtgttacatgaccatggcacatttaccccagctcagaagtcaacattgggctagtccccccatcccccccaactttttttttttttttgaaatggtctcactctgttgcccaggctggaattcagtggtgtgatcactgcagccttggacttcccaggctcatgggatcctcccacctcagcctcatgagtagctgggattacaggcgcatgccaccacgcccggctaatttttgtagttttttgtagagatggggttttgccacgttgctcaggctggccttgaactcctgcactcaagtgatccgcctgctttggcctcccaaagtgctgagatcacaggcgtgagccactgcaccttgcggttcattaccattaactagactccacattttgttcagatttccctagtttttccactcatgtccattttctgtcccaggatctcatccaggagcccacattatatgtagtcatcgtatcttcttcgtctcctgctgtctgtgacatgttctccgtctttctgtgcttttctatggccttgatggttttggagagtactggtcaggcattttgaagaaaggccttcaatttgtgtttgtcagatgttcttctgatgggttatgggctttggggaggaagacacagtgtggtgccctcctgaccacctctcatcagaggtacatgatgctggtgtaccttattactggtgatgttaaatttgggctcctggccagggttggttgctgcctcactgttcctactgaaaggtgttttttctctttttgtgcagctgttaaaaaacccgctccagcacccccgaaaccgggcaacccacctcctggccaccccgggggccagagttcttcaggaacatctcagcatccacccagtctgtcaccaaagccacccacccgaagcccctctcctcccacccagcacacgggccagcctccaggccagccctccgccccctcccagctctcagcaccccgga

SEQ ID NO: 15616 - DNA, 2300 bp, Homo sapien
gatttactgagtcactgatatgtgctaggcacatgaggtgactaagactccactccacacccccagatttcagtcttgtagggcagttgatccatgagtccaaggtggaaaataagatggtagcttttcttttttcttttttttttttttttttctgagactgcgtcttgctctgttgcccaggctggagtgcagtggcataatcgtagctcactgcaccctccgcctcctaggcccaagcaatcctcctacctaagcctcccaagtagctgggattacaggtgcttgtcaccatgcccagctaatttttttatttttgtaaagatggggtaaacatagatgccctaggttgcccaggctgatctcgaactcctggcctcaagtgatcttcctgcctcagccttccaaaatgctgggattacaggcatgagccaccatgcctagctggtagattttcttaaaaggctcttttagttgcttaacctttggataagccacctggagtgggctgcaaatggatagcaacttttaagaaaagtcaccttgaacttgaggtttttttttttgagacagtcccactctgtcgcctaggctggagtgcagtggtgcaatctcggttcactgcaacctccgtctcccgggttcaagtgattctcttgcctcagcctccggagtagctgggattacaggcacacaccaccatgccaggctaatttttttgtatttttagtaaagacagggtttcgccatgttggtcaggctggtctcaaactcctgacctcaggtgatccccctgccttggcctcccaaaggctggcattacaggtgtgagccaccgcgcccagccataacttgagatttttatttaattgacattaattcagttctccacactgatccaggcagatgaccaccagaggctacttcaggtggcatctcttgtggtttggaactgacagctgcttagctttgcatacatgtgtgccaaaatttttgttgtcatatgttctgcattggccatccacaacacaccgaatgatcatatatgaagtaaaataaatgtgcacaaaacaaggacaggctgtttatccacacgtttatttcccacacagagagatgaatttgccttgaaagaactcctttctcatcgtccttgggatgagcaagggagagccttgttgtgtgtgaagctgctcgtgagataggaatcttgtttcaccattaaaactgaatgctgaatgctttgtgcattcctgaattccattttcttcaccttgggaaagtttactttggggttaaaaaaaattaagacttcagacttcttagggcttcccgtgcacctcataggctgcacgttagcttgtcaataattgtgccctatgcatgtacttgttttggtttaaatttttttgtttgaaggaaaaaagtctaagcaaattcacttattttctttttcttggttttgttttttatttttatttatttttatttattaatttattttttgagacgaagtctcgctctgttgcccaggctggagtgcagtggtgcaatgttggctcactgcaacctctgcctcctgggttcaaatgattctcctgcctcagccgccggagtagctgggattacaggcatggaccaccatgcctggctaatttttgtattttcagtagagatggggtttcaccatgtttgccaggctggtcgcgatgtcctgacctcaagtgatccacctgccttggcctcccaaagtgctgggattacaggcgtgagctactgccccggcctgttttttgttgttttttttttttcagacagggtcttgctctgtcacccacgctggagggcagtggtgtgatcatggctcactacagccttttaatctcccaggctcaagcgatcttcccacctcagcctcccaactgggactatagtagtgcatccccatgcccagctaatttttttaaatttttgtagagacgaggtctcactgtgttgcccaggctggtcttcaatcctggtctcaagcagtcctccctccctaacctcccaaagtgctgggattacaggcatgagccaccatgcccagccaatttacatattttcatttccttgtgacattccatttgtttaatcaaggctaaatgtattatttaagacaataattagtcttaatgcagaaggacaaatggaatgtcagttactttgctttttttttttttgagacagcatctcgctctgtcagccaggctggagtgcagtggcatgatcttgactcacggcaacctccacctcctggg

SEQ ID NO: 15617 - DNA, 2300 bp, Homo sapien
ttgcctctgccacctctgcctgggttcttcttcaccctgactcctctgcatgcacgtccttgggataaagcttctctgcctaggagggtactgtttcccagcataatttcatcttccttgctgcattctctaatttcttccaaacccaaattaacacactaatggaacatttgtagttcttctgaaaccttcagttgaagagaaagctggcctctttggggagtacctgtgtgttttcccatcttctgtaggcttgaaaaagtccagcattgaatgatccttttccacatcagttatttgttccacaggacttaattctggccatgtgactccaagagcatccattctagggaaaatattttggactttccaaaagagaagccagtacttgatgccacatcatgcacgtcacacttaataataagtgtgattgaatcctaagaccgtggtcgcttcgttcagactcctcctttgtctttatactaagcttttgttcttatcaccattaatatttctcctatcatattcaagcacactgcagattgtatctgcaagttaggtgcagactgaactttccccttatgttgaattttaagttgggcatctaaagctgcttttttttttttctctccctaaagctttcgatgctgtgtctctctgatttaccattagagcatttaccagcagagatgagcacagctgttgagtcagaaattgctcggccgtctttggatctatttcacctgtggtgtagacctgacatttggagcttatgctcctctgcagaaccactggtcttgagctgaaaggggatcaggccaggtgctgagtgggatgactttgtgattttgagaccgagcatgtgtctgtgtgtgttgtgggggggatgctttgtggatgtgcatacataccagcaccttcaagaatgcgacttcttctccccctaagttccaggagatcctcacaggttctggctttgtgcctgaaaattttgggattatggaattataaaattttatgtcttgcctgaccatatagtcagatcttcagcattctcaggggcagtgtttctgattttctcagccattgcccttgccttcccaaataatcaagattattagttcatggaggatggtgttgagtcacagtgcaaaggaacgaggtctctggaaaatgttcccacctttctagggacagactcttgctgggcaagttcagaggaccaagaaaatatatttatgagatatctgctgtgggctgggccccgcataggacaaaatagtagacaaatcatcattttagcctttgaatggctgagagtctgatttgaaagagttgattaacaagaggaaaaacgagagattggattttttttcgcattttgtttgtttgtttgttttaaagagacaaagtctcactctgttgcccaggctagactagaactctcattctgtttttttcccaagggtattttccctagagaaatacatcaggaagccatggagagcggggatgggacaggaaagaggttaggatggaacagcccgtggaggaagtgcgatttgtccttcttgctgaggtcaccctttaccgagttgcaattcaacccctcccacctctgcctgtccttgtacctgcctttcatcttagttctgtcttttctttccttgctgtcttctctgttttcagaaagacttatcttgtccttactatataaaaaaagtgtgacctgcccccacagccccctcacctccgtggactctggtgtcacattcatggtcagttggtggtaatctggtaccttcctgacctgaacacagcgtcctgtttaatctggttctccttcattttttctggtgggtacttcagatgaccccttcctgcctgccacctgcattttcttaccaccttcctactcctgaatcctttgcactcttgtgtctacccccaatccctctgctgtttaggaaaaaagagcaaaacatactgcagttttcaaaggaccagcaaccacccgtcagatcctggcatttgacccggcatgggccgtcccttccttattcatttttgtctcctcacgccactcgactgtcttctttcattgtaaggactctgcattgctccatttctttttaaaaatttttcttcaagaaggattatatattgctcatttctgtctccaccccagaagtcagccttttctgaggtccagtccttgcacctctgttctctcccaccctcacttcctcgcccccttttccctagaaatccccttacttggacagctttgcctcttacct

SEQ ID NO: 15618 - DNA, 2300 bp, Homo sapien
ttgatctttaataggtatttaacctcctttagaaaggcagcataaccaaaaggtaggaattatcccctattattctcatgtcttccttgtccagaaatggggcagctgggaatagtctccttgtagtgcagatggagcccattatttatttatttgaaaataattttgtaggaagccgaggtgggaggattgcttgagactaggagtttgagaccagcctgggcaacatagtgagaccttgtctctacaaaaaatttaaaaatcaataatttggggagaggggaaatgagtaaatgcctctgtttatttttaaatttcagcttactgttttgaataggttctacatttacacggtcaaaattcagaatatacaaaagaacttacagtgaagtgcctcctagcccatttccccaggcacccagttccctcctccagagcccctgctcttagtagtttgttgtatagccttgcagagatattctgtccagtacaagccagtgcatatgtgattgtatcagatggagccctttggaggcagaagaggcaagtgacatgtcaggggtggaccctgtgtttttaacatgaatgccctttctgctgggcaggtgaaattacatgggatgctgcagaattgaaagcatttttttgttagcagattatgacgttataaccagcccacttgtaattgccaggcctctcctgagataagccattggcccgtagggaagacactgaacagaggcccgggccatcagcactcaggtctgactttcctgcgtctccctgggatgcctggccaggccacttgacctccttcggctttgggttccttgactgtatgattataacattagatcaggtgattctgtggtcattgccagctggaaaacaaatctctgataggaaaatgagtggctttgtatttaaaaatattacaaaaactggctctttagctagaagtttttaggtatttaaataaagctacattttagaatgatagccaaattaagagccagtttagactgggtgcggtggctcatgcctgcaatcccagaactttgggaggctgaggagggcagatcacttgaggtcaagagtttgagacaagcctggccaacatggcaaaaccctgtttctgctaaaagtacagaaattagctgggtgtaagtggtgcatgcccataatcacagcaggggaggctgaggcacgagaatcacttgaacctggcaggcggcggttgcagtgagccgagattgccccactacactctagcctaggtgatagagcaagactctgcctcaaaaaaaaaaaaaaaaagccaatttaagaatgagtgttctagcaaaagcttttgaaattgagcacttcattgcatttacctgtcaggataaccatttagagagcaaggtctatgtctctgtcatgtccccagtgccttgaacatagtgtgctttgattcattaataataatatgaacaggctgggcgtgatggttcatgcctgtaatcccaacactttgggaggctgaggcatgcagatcacttgaactcaggagtttgagattagcctggtcaacataccccatctctaccaaaaatacaaaaattagctggacgtggtgatgcaggcctgtaatcccacctacttcagtggctaaggcaggagagttgcttgaacctggaaggtggagactgcagtgagtcaagatcatgccactgcattgcagcctgggtgacagactcagaccctgtcccaaaaaaacaaacaaaaataataataagcagaacaacaacaacagcaataataataatagcagctaacatttactgaatacttacaatgtgttaggtacttgatatgttttctttagtcaacagatagccccaaactgaaacagagatcatcatacaactaatatctgtgagaccagaacctgaacccagacaggctgtctcctacctgtgtaatttgcctggagggagaaattaatgaatgatgatctgaaaaagatcattgagaatgggtatcaaataatgagaaaaacacacactgtcttctatcttccagaaaaaactgcctctgacagctcttgctcaaaatatgcaagaagcatcgactcagctggaagactctctcctggggtaagagttgctgccttcagagtgccaagtgccatgtagattggtggaagtggctgggccaggtggtgtatgtaggacctgtgagaggaactgtgagcgttgatggcatggctcatccgctaggagaccggctgagactccttgggagaaagtggggtc

SEQ ID NO: 15619 - DNA, 2300 bp, Homo sapien
acctacctcgacctcccaaagtgctgggattacaggtgtgatgcattgcacccagcctcaatattctttttgagtgctgacatttcagagtctttctcgtggctgagtttaattacacactcttgctctagctgtaaggcagagctctccaggttagcttcagtggacaatcttttcatggttttctcagagttgtttcttccaatagcctcttttcagctaggggtctcactctgtcacccagacaagagtgcaatggtgtgataatagctcactgcagcctcaaattcctgggctcaaatgatcctgttgcctcagcctttcaactagttgggagtacaggtgcatgccactgcttctggccttttttttttttttaaatttttcatagagatgaggttttagtatgttgtccaggctagtctcatactcctgagctcaagtgatcttcccatcttgacctcccaaagtgctaggattacaggtgtgagccactgcacctggccccagaagataattttttatttgtcttttactctatgttcaaattcttcaattttttggtagactctactttttcaatttgtagagcttgcatgaatagtgttttccttctcttgaagtttagagagatcatgtactgtaattcctgagccaccttgctgtaacaaattttccagttcttcaatcttttcttcctaattgcttagattttcttgatgcttacaacttatttccctcaatttctgttgatgaacattctgtaatactgataattcaagctgatggtcatcagtatcctgacttcttttttgtttgagctccttgatgatattaatatttggtgtttgtagtttgtagatttcattttcatcaaaactagttgttcctcctattttataagtctgagcaatacatttccaatggccaactggagactcaagttttagaacttcattggactatctgtttatttcttgttatgatgaaattatgtcataaaaacccatgtaagcgtcgtggaacactgaagcatgatgggtaccacatggaatggaggggatgcagtgtggatgggaacctccggccttccctgaatgtgctgactccagggctggctgccggtcctgcaaccgatcctgtagtgcttgctttcttgttttaggaaggctcatttctacctctttctgttgtaattgatgtcgataacttttagtttgctgccctatctgaagctctgatgcttcctaggtctctcctaggtcactaaaaagatcttgaagtccctcattctttgatattaagaattccaaactggcatcagtctcctttatcccatagttagggagctctttcctttttctatgacatttaggagcacatttgagatgtggctgatgaaagaagccacattgctgcccatccaatgcaaagaaggggcttacctggagccaaggccaccaaaccaggaagacatgagtgtgtgagcacgtgtgttaaggaaaacacacattgactttaattttttttttttttttttttttcgagacagggtctctcactctgttgcccaggctggagtgcagtggcgccatctcggctcactgcaacctctgcctttcgggtaaaagccgttctcctgcttcagcctcctgagtagctgggattacaggcgtccaccaccacgcccagctaaatttgtattgttagtagagacaggatttcaccgtgttggccaggctgctctcgaactcccgagctcaagtgatctgccccctcggcctcccaaagtgctgagattacaacgttgaaccactgcgccctgctagaaacagcttttcatacgttgaaataaacgagagggtgaccgggcagcgttggggtcggggaggccaggcggaggaggcctagtggtcttctcgcccggggccttctagctcttcgcccgtgtcaggtaaggcactgttagcctcggctcggttcgactcggctctactcgggctcagctcggctcggccagacctagagggcgggcgggcggtgccactggaagtgacgaggcgagggcggggccgccggcccggggagccaccgccgcgccgccgtttgggccgggaagcgatgtagtagctgccaggctgtcccccgccctgcccggcccgagccccgcgggccgccgccgccaccgccgccatgaagaagcagttcaaccgcatgaagcagctggctaaccagaccgtgggcaggcgagtgcgccgggcagcacgggggtcgcaccggggctgggggcggagggcgga

SEQ ID NO: 15620 - DNA, 2300 bp, Homo sapien
ctaggttcaagtgattctcctgcctcagtctcctgagtacctgggattacaggcacccgccaccacacctagctgatttttgtatttttagtagagatggggtttcagcatgttgaccaggctggtctcgaactcttgacctcaggtgagccgtgcaccttggcctcccaaagtgctgggattacaggcataagccaccgtgcctggctggattccaggtgttttaagggtatccccacccctgtccaaattccctcaagttacagggtttttttgtcatcagatcacatgtgactcttctcagaggttatgaggaaagggaggccagcagcctgctctatgggtagccatcctcctcctccagagaatgccagtcaatctactagtgtcgtggtccacacccagtaagttcactttgtctagagtccaactaaccaaatttccctgaattaccagctgttttgaatcaaggctcacccaataacaaaggtgtgccaatacatctgcctccaccttcttctagtcaccttcagtctcaccgtccagacctgtgggattaacatcttgtgctacttactgtttgacattatccactaacacccatggaatttagacactgccaagctgggagacaatgcttgcgcagtggtttgtattacctttttggtagaggaatgctccaacaaaatggtgtatttcagcccattgctgctatccctggcaaaacttcctaacctcagccattccccactgtcatttctgccttgactgtcaatgagatcttgtgtctccactgaatactaagcaagcatttgctatctgatctcaccccaaggtgtatattctgggtttctgttattttgctttaaaaaaaaaaaacttatatagaaaggcagtttcattggctcgtggttctgcaggctttacaggaagcatggtgctggcgtctgctcagcttgtaggcagggaagcgagaacatgcatattttactttctgtgtctgagttgtttcacttaagataatggcccccagtcgcaaggatgttgagttctgcatggctggggaggcctcaggaaacttaacagttatggtggaaggggaagcaggtacatcttacgtggcggcagaagagagagagctattttgcttttttaaataggtgtgattcaaagttcttaaagtatacccattgcctgtgtccaacacctgacagataatcaagtggaatacagtagcatagttcttcttttatttataaaatattttataacaaaactagtaaaaatagatgcatcttgaatatgcatcataatgaaacagacacacgtgaactcactcccacctgagaaactgagaatgtgtctatgtgctccttccctgcctctccctaccctctcgtatgctaccgtcccactccctagaggtcatcaatgtcctgacttttttttttttctcatgtcttggcttttctgtacagtattttaccgtatatgtatgtttctctaaacaacattagttttacttggtttgaactttacaaaagtgtcgttagacttccttctttcactgaacatcacgtttctgaaattcagcccttgatgctacctgagagttcgagttcattgatttttactgccacgtggtttcccattctattacttttccacacgctacttcctttactacatttcaaaggcgattatgtctctaaagctcttagcacagtccctggcatggacagcacttaacaaaattttgttaaactgttgagtgacaacgagcccagactgaacgtaacagctgacatttgcttctggctggattctctgcccttaaaattccgtgacgagtcagaagaaacctggtggcctctccaggcacctaagactacacttcccagaaagcatcgcggtactccgccactgacttttagtttcctttctccgtcggcaaacttccgggttgggtgggcggggccaaaaaacttatccaatgagtacctttgtaggctgagaggaagggataattgcccaatgagcgactaggcagaggagccaataggcggagaggctgctggggcagccggcctccggggtgtcactgagccgcgccagctgagccaggtggagccctactttcctctcctgctttctgcctgtgactagcgccgtcccctaccgcccgtcgaccccacttccatgtctggcggacacagctccccggaacctccacgcccatggccactagacagagggagtcttccttcacctcctgcttttccacctggaattgcgacgcg

SEQ ID NO: 15621 - DNA, 2300 bp, Homo sapien
tgccacagttgagtttagaatgtttatttaaaatcttgtgacactgaactcaatgactagttctcggaaaacttactttttaatagtgtattgtggtgtaaggcctgaaattaggattcatatcaaattctgtctttacatccatttaaatcaagagggcctcaaatggctgaactccaagcctcgctccctgtctgcttccgcagatgaaattctctggctaaacactctccttattttagggatcagacacagagcctgcttatccccaaacagtaggcttcagttccctgccagctcaaggacgaattattcagacaagccagtcacaccctcccgtgggaaccagggctcactctgcacttttgttactacaaagcctgcctccagcagcccctccttgttaccgtgttccggagtgtagcctccacattgccctgcatagtgtgcagggtccttctcccctggactggagtatctgtgaccagtcagctgctgttgattgcatccgtcctgcatcaagtgttgtgtgttcggccatccccgtatctctgggggtggggacaggggcgggggcaggagcgtggggggaaggaatccctctttcatcaatggagtaaagagtgtgaataaaacgattggcatcacaaacagtgtggcccatccttgattgaggacccctggttagctttaactagctgctcctttactaagtagctggttttgtttgtttgtttatttatttatttagagacggagtcttgctctgtctcccgggctggagtgcagtggcgcgatctcagctcactgcaacctcctcctcccgggttcaagcgattctcctgccccagcctcccaagtagctaggactacaggcgcccaccaccacaccaggctaatttttgtatttttagtagagacggggtttcaccatactggccaggttggtcttgaactcctagaccttgtgatccacccacttcagcctcccaaagtgctgggattacaggagtgagccaccgtgcccggcctaagtagctggttttataaggcggccaggactattgagaacatcactgccagttgctggccagcttgcccttcagctaatgagttttgttatctcagtaggtgttgccacttcttcccaccctgacgaacgttaatggactgtatctccttgtgaggtcccatcaggtgtggcccgtgtcggccaggtggtttcccaggctcccacctgggggcagcagcaacacgacatcctaacgggtgggtgcctgagttccactagagtgaggctagactctgtggtctttggtctagcctcatgaccatcgctccatcaccggctgcttgggacagccaggcagacactgtttgggaaagtgttccagcatagtcctgtggataaccctttttcctttccccaaacaccagggtttttggaaccatcacctgggaagatttaggaatggctccctggtggtctcctaacagcctaaagaccccatgggcttttcttggcggtgttgcttatctgcatgccaaaggaccaatcctgtgggcaaggggctcgatggccccacctggaccctagacaaaatgaacgtactagggggatcccagcactgaagatttgcctggccttcctgggggagcagtatggccgcccacggagccggctgctggtctccctttcccataacctcccggaagatccacaccacgaatgatctgatggggacaaaaaccccgggactcgagggaccgttgcggcggacccttaaaacacctggcaatcccattaaattgaaacatggtacatattttgctcttctagttttggctaatacgttctatttaaagggtctcccagccacagtttgccagcgggcaggcggcgccgcaggaagtgaccgggcaagaacgggggtcgccgcccagctcggccttctggtctctgcgccctcggcctggggctccaggccacaaggggaggccgtgctgggcgggcccgaagggggtgggcggggccccggaagagacgtgggggcggggccaacggaccgcggaggcggagccgctacagtctgggcgctggagcggtgggagcagcgctcgtccgccgttggggcccccagcccgcgcgcgtgaagcagctagccgaccaagccccggaaggcgagtgccggagggggcgggacagctcctccggggccagcgggcaccaggcttgggggctgaggcccagcggcccgagaccaactgggctgaccgaggccgcctccccgccagccctg

SEQ ID NO: 15622 - DNA, 2300 bp, Homo sapien
ctcttgcattaaggtatcatttagcctgagatggctaagcttgcaatctccagactccacgctgtcataaactttcagatcctcaaccaggaacttacatggaatgagctggccctggaggtcagctggaagatggccaaattcctctgaatcaccagctattttgaatcaaaggctcatccaacaacaaaagtgtataaacccatctgcctccgccttcttccagtcacccccagtctcactgtccagacctgtgggattaacaccgtatagtacttgctgttaacacttactatccactaacacccgtggaatgtggacactgctaagctgggagatgatgcttgtgcaatagtttgtattacccttttggcaaaggaccactccaagaaaatggtgtatttcatcccatcagcattccccctggcaaagctctccacccttagtcattcccctcttgtcatttctactgtggctatcaatgagatcttgtgcctccattagaatactgagctagcatttgatatttgacctcactccaaggtgtgtattctgggtttctgttgttgattttctttttaaaaaaatgagtgcaattcaaagttcttaaagtatatctgtttcctgcttccaacaactgacagataacaaaatggaatatacaaagacatttttaatttataatgtatattaaacattattatacatatacaacttacaagggttgcttctggctggattctctgccaatcgcccgaacactgaggattctgctagttgttctgccctgagttaattatagctataaaatttcatcaccagcaagaaaccaggcgacttccccagtacatcttgaatttatacatatattttgtactagatttagtacaaaataaatccaaaacatcttgaatatgcctcataatgaaacagacacacgtgaacccactcccacgtgagaaactgaggatgtgtctatgtgctccttccctgcctctccctccccctcttgtgtgctaccctcccggctccctaaagatcaccaatatcctgattcttttttatttttttttctcatgtcttgccttctctgtacagtattttaccatatatgtacgtttctctaaacaacattagttttacttggtttgaactttacaaaagtgttgttagacttccttctttcactgaacatcgtgtttctgagattcagccattgatgctgctacctggtagctctagttcatttatgatcgctgctacatggcttcctattgtattacttttccacacactacttccctcactacatttcttttctttctttcttttatttatttgtttatttatttttttgagacggagtctcgctctgtcgctcaggacggaatgcagtggcgccacatgggcttactgcaacctccgcctcccgggttcaagcgattctcctgcctcagcctcctgagtagccaggactaaggcggccgccaccacgcccggctaatttttgtacttttagtaacaacggtgtttcaccatgttggccaggctggtctcgaactcctgacctcaggtgatcggcccgcctcggcttcccacagtggtgggattacaggagtgagccactacgcccgcccccctcactacatttcgaaggcaattttgggggcaaagccctcagcacagtcgctggcagagtcagcacacaacaaaattttgtaaaattgaatgacactgagcccggactgaatgtaacaacttacacatgttgcttctggctggattctctgccctttgcccgaacgctgaggattctgctagctgttccgccctgagttaattatagctataaaatttcgcgaccagcaagcagaaaccgggcgacttctccagacacctaagactacgcttcccagaaaggattgcgatactctcctactgtttagtttctttttcctatcgtcaaatttccgggttatgtgggcggtgccaaaataattatccaatgagcaacttcgtaggctgagcgggcaggagaattgctcaatgagcgactcggaagaggagccaataagcggagaggttgctggggtagccggcgtgggcggcgtcactgagccgcgccagctgagccaggtagggccctaccctcttctgttgctttctccctgtggctcgcgccgtcccccgccgcccgtcgaccccgcttccatgtccctggcggacacagctcccaggaacctccacgcccatggccactaggcagagggaatcctctatcacctcctgctgttccacct

SEQ ID NO: 15623 - DNA, 2300 bp, Homo sapien
cagacccaatagttgacaatcttcaagtctttcagtgctttccctccctttgccacacctgttgggaagggaagcctgtgagcttttctctgtctgttcagtgtttgagcctacggactctgggtgctgcctttatgcggggagaattgacggcacatggggctggagtttgcctagctcatgccctgatctgtttttcctttttgtatgtttaattcaacatcttattgactgtcattcggttactaccaaatgcaggacactggtcagtagaacctggacctgctgtaaggctgaagaagaaaaagaaaccatccaagctggcactcggttttggggagttctcttcactgctcacgccggccctcttgtgtgacctgtactgttgtgctgtgtggggctgggagccaactctcttttcgtcgcctgacacctgtgcttgcaccctgcccctggtcctttaataagacaagcagacacaggggctacagtcatgggcaatgccccaggcatcttccaagactcacacctgggatgtatcatttctaaatggaaggaatccaaatcagatggtttaaagaaaaagaaactccagcctgggaaacataggaagactccacctctacaaaaaacaggaaaaatgagccgggtgtgggggtgccttcctggggtctcagctactcagaaggctaaagtgaggatcgcttaagtccaggaggttgaggctgcagtgagttgtggtaataccatagcactccaacctgggcaatggagtgagaccctgcctcaaaatcaaattttttttttaattaaaaaaaaagaaactgattttcctctgtaatacaacctgccctagtacacattagatcaagaaaaatggccatgggcagaagtggatctcctagttttaacactatcttaccgcccgacctattctgtgaatggacagagaaatggggagagatacctagctacaagcttttatgaagttatgctaggacccagagctactggattcttgtcaggtgtgtgtggcccctatttccaggttcctcctgaaggaacctgaagaagcggacctccacagcctcaggccccgagcactccctccctaccctaagcaggcctcctggggaggggagcccctgtgctgtccccaacagcgctccaatcggactccaaacaggcaccctcttttgcttccccactggcccagggctgttttcccctcagagaaatggatggaaacgggggagtgacaaggatccaagttcctttttttggtggtggatctaggactatgtaaaaaacactttggtagattttcagaggatcctggtaagtttagagatgaatttgttaaactaaatcttgccttttcattgacgtggcaggatgttatggtcactttgcagtactgatgaaaagcaacacatatttggaaaggctaaggaatatgccaatagccaggtggtcactaaagaccaatatgcagtcatctgtttagggggagatgcggtcccaggcatagtctccacgtgagtgagactatggagaaaacctagaaaaagctagaatgagccactttgtcacctgcctgactgaaggaagaaggaaatgtatagtaaaacctgtacactatgacagggtcaagaaaattacccagagaaagaaggagatcccagtagtcttcctcaatcgagtccctgaggcccttgggaaatgcacccatgcagacccagaggcagcagaggggaagcatcgcgtgccatgcattttatccttcagtcagctccggacattagaaggaaattacagaaaatttggaggccagaccccagaccctgctgttgactttggcagaggcggcttttaaggttttcaataacggacaggacacagatggcaggtaagaagaggagactgaccaagacagcacagcttctggctgccctaattcatccaccatctcagggtgaccctaggattctcaggagaccaactaatcgaagacagccaaccttggatggagccaatgtgcctactgcaggatggagggggtcactggaagagaggctgccctgacctccttaaaacaggacagccggcaggcaaccctggccagccgccactcctcaccaagctttcagatgagattgatacacaccgcctgacagcaccctggctctgactgcagcacactccatcgtcatcacaccacggagcctcaggtcacccttgatgtggcaggtaggaaaacagttcctcgtggacagcagagctgcctgctcggtcctgac

SEQ ID NO: 15624 - DNA, 2300 bp, Homo sapien
gactcttacacaaacttgaagttcagtaacatttatgtgggaactaccccaatccagaataggcaaaaaatcagaaatcagacacgcgtcaatatcccaacaaccataatcaaacaccaacacactttctgtccccggaaaccatctctggacttaacctagagccagttactcttattccactcagagttctaaccagccagtactttgcagttcccagagcatcagaattgccatttatcacttaaaaagcatatttaatataaaattaaatatatcaggaaagggtgatccattattttcatggatctagaaaaaataaagcttgaaaattatttccactttataaggatcagacttttctaaaggacagctgaaacacttaatgtttactcacatttttttcaatataagaattagggttttatttaaatgactaatttaaaaggggggatggggagggactgtagttaaaactattaagatgcgggccaggcacagtggctcacgcctgtaatcccagcactttgagaggccaaggcaggcagatcacctgaggtcgggagttcaagaccagcccgaccaaaatggagaaaacccgtctctactaaaaatacaaaattagccaggcatggtggcacatgtctggaatcccagctacttgggaggctgaggcaggagaatcgcttgcacctaggaggcggaggttgcggtgagctgagatcgtgccattgcactccagcctgggcaacaagagcaaaactccgtctcaaaaaaaaaaaaaaaaaaaaaaaaaaaaccagaaaactatgaagatgccttgatcttgagcttgaagtcacagtttgaatctcagctccaccctttcctagataaaagactttgggcaaattaacttctttaagcctcagtttccttatctgcaaaaaggggataacagcagcacttaattcatgagtgtgctgtaaggactgaatgaaaacaatccaagtgaagcacttaacatggtactaggctatgaaagctctcagcacacattagcaaacctgtcatctgcaactctgtaaactccttgatactagactcggaatggcccccataatatgtcatctataataactaacttcagtcttccattcattcattcatatacacaaaaacccacttactgcacatctattctggaccaggtaacctactttttttttttttttttttttttgagacagtcttgctctgtcacccaggctggactgcagtggtgtgatcatagctcactgcagcctcgacctcctgggctcaagtgatccttctatctcagcctcccaagtagctgagactatagatgcacccaacatgcctagctaatttttgtatttttagtagagacgaggtttcaccatgttgcctgggctggtctcgaactcctgggctcaagcaatccaccagccttggccttccaaagtgctgggattacaggcataagccactgtgcctgggcaaggccaggtaactttctacatgccctcggaataaagtagtaaacaaaagacataaaaattcagattatgaaaatatggggtcactttttaaatgttccaggcaactacattaatggatggagagtcataatgaaaaagaacaggaatgggatacggctccttcttcatgtttaaccagaccttctacttaaagaatcccaggaactagccttaggaaatctaaatatcaaaccaaggtggtggagtgtctcatcccaggaaggaacactgaacaactgatttacagcaggggtgtccaatcttttggcttccctggaccacactgaagaactgtcttgggccacacaaaatacactaacaatagctgatgagctttaaaaaaaataagtcacaaaagaatctcatgttttaagaaatgttacgaatttgtgttgggccacattcaaagcagtcctgggctgcatgtcgccccgcccgcaggcctggggttgaacaagcttgattacagccttgttgcctctggccagcccaccaggtggtccattaaccaagataaccatcagccactagatatgctgacccgcattccctacccctcacatgctttgcccagctcagcctacatgccctctcccgatgtcagttaccaggctttgctaataaaacgtctctcccggctcttccagagagccagccgcagagtctctgccgtctccccgtgcgctcaagcacaagcccccaactaaaagccttgtctggaaaatctgcttggtgccataacagattatctggtgagcc

SEQ ID NO: 15625 - DNA, 2300 bp, Homo sapien
aacagatgaaggcatgggtgaaaacaagagagaattattctggaagcagtactggcaggatttgagcaaataatgagggggatggggaagccttgggtcagactatcttatgttgctatttataggatgtggaaggaagggtctaagaaacatcttgtatgatgtgctgtgggatatggaggaggtagagaacagggctaaaaataaccttcctagaggtgcagatatttggcagagaccctgtattcctgggcctctcgctgacatgggctgtcaacaaactgtcacgctcttctctagatatgtccacttctgtcctgaagcagatatttttatgtacacagccatgggtgagttcttaacttctttgtgcctcgtttttatcatctgaagatggtgataataagtgataggacttatctcaaaggggtttacgaatatataccgagtgtttagcatggtgttggagatgtagtgagtagttgagaaatgtcagaaatgagcattaaaattccgttagctctagcttgacttctctatcagtgcatacaaacactcaaagataaagctatgagacagagcaggattttgcctgtcttgttcactgctacatctccagccagcttagaacagtgactggcttgcagcagctatttaaatgtttggtgagtgaatgaatgaataaggaactcatctcattttctttccttcctccttcctttctcccttccttcctccctcccttcctttctttcttcccttctttccaaccatccatccatccatccatccattcatccatccacccacccatctatccatccatccatccatccatccatccatccacccacccacccacccaaccatctatctatccatccatccatccacccatccatccatgcatccacccatccatccacttatccatccatccatccatccatccatccatccatccatccatctctcttagaaaggcagtagagtgtagtgggttagctcacaagtattttttttcaattgtggcaagatacacataaaataaaatatgccattttaacctttttttttttgagatggagtctcatcctctcacccaggctggagtgtagtggtgtgatctcagctcactacaacctctgccccccaggttcaagcgattctcctgcctcagcttcccaagtagctgggattacaggcgtgcaccaccacacccagccaatttttgtatttttagtagagacagggtttcaccatgtggccagactggtgtcaaactcctaaaatcaagtgatcctcctgccttggtctcccaaagtgctgagattacaggtgtgagccaagcacacccagcatttggaaccatttttaagtgtacatttcagtgacattaagtacttcacattgttgtgccactgtatcatccatcccaaaactttcctcccaaacaggaaatctgtacccgctaaacacaaactcttcattctcccttcccctcgggccgtggaaaccaccattctacttctgtctctatgaatttgactagtctaggtacttcatacaagtggaatcagatacagtatttatccttttgtgacagcccacaagttctgtgatcatataagctgtgtaatcttgggaaactcaatcttcctgacactccacttcctcgtctgtgaaatggttgtaataatagtacctgcttcacagggtggcagtgaggtttaaatgagataatagaaggcacttagccccagtgcctggcacatagaaagtgctcactattagctattagttacagctaagcatgtattgtaaattagtggacactggtattgtgtgtctagcactgtcctgagcactttacccgtattatctcatttaaacttcccaacgaccctatgacatggtgaaaccactaacatccacacctaacagatgagaaaacaaaggcccagagaggccaagtcatgtgcccaagggttacatagctagtttacagcagagctgggattgaacgccaggcagcctatttccaaagttcatgggtcttgccgctgcattgcattacctcttgccagtctctgctgcctctgtctgtgaaggatcgtcatctatacactcagtcctggctcaggctgtcacggtgactgcaggtgtttgaagctgtgggactcattggaaaaataattgaaaatgggattgctgtttctttcttttcttttttctttctttctttcttttttttttttttttttttagacagggtctcactctgaggctgaagtgcagtg

SEQ ID NO: 15626 - DNA, 2300 bp, Homo sapien
ttgtatttttagtagagacagggtttcaccatgtggccagactggtgtcaaactcctaaaatcaagtgatcctcctgccttggtctcccaaagtgctgagattacaggtgtgagccaagcacacccagcatttggaaccatttttaagtgtacatttcagtgacattaagtacttcacattgttgtgccactgtatcatccatcccaaaactttcctcccaaacaggaaatctgtacccgctaaacacaaactcttcattctcccttcccctcgggccgtggaaaccaccattctacttctgtctctatgaatttgactagtctaggtacttcatacaagtggaatcagatacagtatttatccttttgtgacagcccacaagttctgtgatcatataagctgtgtaatcttgggaaactcaatcttcctgacactccacttcctcgtctgtgaaatggttgtaataatagtacctgcttcacagggtggcagtgaggtttaaatgagataatagaaggcacttagccccagtgcctggcacatagaaagtgctcactattagctattagttacagctaagcatgtattgtaaattagtggacactggtattgtgtgtctagcactgtcctgagcactttacccgtattatctcatttaaacttcccaacgaccctatgacatggtgaaaccactaacatccacacctaacagatgagaaaacaaaggcccagagaggccaagtcatgtgcccaagggttacatagctagtttacagcagagctgggattgaacgccaggcagcctatttccaaagttcatgggtcttgccgctgcattgcattacctcttgccagtctctgctgcctctgtctgtgaaggatcgtcatctatacactcagtcctggctcaggctgtcacggtgactgcaggtgtttgaagctgtgggactcattggaaaaataattgaaaatgggattgctgtttctttcttttcttttttctttctttctttcttttttttttttttttttttagacagggtctcactctgaggctgaagtgcagtggcgcgatcttggctcactgcaacctctgggtcctgggttcaagtgattctcatgcctcatcctcctgagtagctgggattacaggcaaacaccaacacgccctctctttctttctccttccttccttcttttctttctttttcttttttctttctttctttctttctttctttctttctttctttctttctttctttccttccttcttttctttctttctttttctttctttttctttctttctttctttctttctttctttctttctttctttctttctttctttttctttctttctttctttctttctttctttctttctttctttctttctttctttcttttctttcctttctttctttctctgtctttctttcttctttctctttccttttttttttttttcagagccttgctctgttgcccaggctggagtgcagttgcacaatcttggctctgcgcaatcttcgtctcccaggttcaaatgattttcctgccttagccccccaagtagctgggattacaggcgtgcaccaccacgcccggctgagttttgtatttttagtagagacggggtttcaccgtgttagccaggatggtctcaatctcctgacctcgtgatccacctgcctcggcctcccaaagtgctgggattacaggcgtgagccactgcacctggctgtttgctgtttcttaacatgtgaggttccaacccagtggggcccactaacatgtgctgttctgctttggaccgtggggagctggggtgctggacccatctcccaccttctacagcctggagtgtgctcccagatgacacagccaagctggcgtgtttttccctcactggcggaaagttcagcaatccctgactccctcaccctgccctgttgagatttaaaaaaatttcctcttctgggcctcagagccgcctcctacctgaggtttattgctttctctgcaccagcattgagcctctgcagccctttaaaaggggcagagcccatagtgtgatcagcaggtcctgtccctaggagataagagtatcttgcacagcaggtgcaggtttcccagcagctcaggcaagagtccgatgtttgtgccatctgatcctgatgtctggagaggtgagccctctgtcggcatcttcctctccaggctggcagagcaaggggggctgtgaattaattcaaggttgggggtcggggccttctatatctggacttgcctc

SEQ ID NO: 15627 - DNA, 2300 bp, Homo sapien
gccttggcctcccaaaatgctgggattataggcgtgagccaccacgaccagcctaaactcttgatttttttaatcctgcccaaattcctatctaagggatctggggagtcatgacctacaaaccataaattctcatcagatgggttttatttaatcctatatatgatgacttactttccattctgactctggcataacattacgtgacaaaaagaaagtcaaaatattttaccccaaaacatgtttccttgccctattttgcaatttcttccataaaggacagcattttcccccaaaagctatcctttgtggggtaaaatgtgcatctgtaaagaacatctattaacatagctagatgtttttcttccaggccctcccaatcctaaacggattaactaaaagtctaacaccttttgaagatctgaataggaaacatttgtcatctattatctctaagagcagccaccataagacttcaaaagaaccttagtctccactatcttttatcttaacctgaacacttcctttctatcaatcccaggtcttcagacaaactcaaccaattgtcaactagaaaatatttaaatttacctatagcctggaagcccccacccccacccctttgcgttgtcccgccttcctggaccaaaccaatgtatttaatgtatttgactgatgtctcatgccaacctaaaacataaaaccaagctgcaccccgaccaccttgggcacatgttctcagggcctcgagagggctgtatcacaggctgtggttactcgtatttggctcacaataaatctcttcaaatattttgcacggttttacttttcgtcaacactccctattacctgtaacttctcagtttccaagagctgagagcttgatttgcgagctaccctcccacttctccaattccatggccactgaatgaaggctgcactgcctgatactcacacttggtctcatgcgctggctctgcaacaacggacagacaagagttcctttgggggaaaccagcttcccaggtgacactgttgcctctgctacatgcgcaaagcgcagcctggcacatagtaggtgctcaagagagggaaagccgggtctatgaattcagggacaggggcagcaccagaagagagcaagctggggcctggctggctgaaccctggccccgagacccctgtgaccccccttctcatcaggatgcaccacatgaacctccccaacgcgagggccaacaagtggccccagatgagaccgcgccgggaagggcctggggccacgcacagatacttccgccagaaaaacaccacgccgcgccgtgcacctccgccagaggaagaaggtcccgcagggtcggggtaaccgctccatccccgaccgcaaccctggaccaggtacaaggaacagatccctccaccggaacgccgtgtccctccgccagacacaggagtccccgctcccgtgctctccttccccggcagccaggccccggtgccgactcctccgcctcagggaggccccgccgccgcctagattctccgcctgaagcgggactcgcgacggcaggttccctagaatccctctgtgtccctccgccccggggaggaccctccgcgcccctctacaatcttaaagtccctcagcgacgagtcaccgcgccgcgcgctctcgcgagagtccaccgcacggccccccccccctcccccagcccctcgcccgccaggacgcctcgcgcgggccccgcggcgctcggtggcaggcggcgcatgcgtgactgcggttcccagcgccccccgcgctctccgcgggccgagtggacgaggccgaacgcgagcagcctgccgctgccccctgcgagccctggcttcgccccgcagctcttctcccttccgggcggaacagtttttgcggcctttcctcggcggcagcggtttcctcaggacggtcggggccgtcgtgggcccgaaagagcccggcgccgctctcggaatccggcggccccagcggcacccgcggcggcctggacgtgctgcggtgacccgagcccggaacctggcgccgggcggggcctgcacatccggccccacccactcggggactcgcctctccgcgcccgacccgggagtagcggacacaccccctcccggcccggctgtccgcctccgcccagcctttcctcagcctgcttcatttttctcccagtcgtccagcctcccggtttccgactttgcactaagagggatgcactctggaaaaccacattgcgcggtcacatcttgtttggagaagaggccag

SEQ ID NO: 15628 - DNA, 2300 bp, Homo sapien
gcagtgtcaaggcaagtgacataaatgtgtgggggggcaacttgtatgagcactgtgaaaacggcagcatgttcactctacttctcagctctgactgaggggctcaaagttcaggatctgctgatttttcaacagtaacgtcctctccaaggtgttttttttttttccttttttgggaaagcccccagtttaaactattgcagccagtttacatttcttaatgtcactgtgctggccacattcagagctccatttgccaccatcggttttgatacctttttaccaaaacctttcgaaatttgagagcccatctttagtaaaactgggcatggagcagattcgtttggattgctgagaggggagatagaaaagtttgggtgctaggcaggaactgcaaggaggacctgggccatatgccagacatctagtgcctgggccttgaaagggagactggtcgctgacaaggcaatatctgttgcaacccaggcttcctagatgaccaccttggatcatggctcggagcacagggagggctgggcagtgcttgtgtttctctccgttccagttggccccttcccattgacattacagtaatgcagttgtgtgctgtttgaaaaagcatccctagttacacagaatgatttacaggacaccagactctgcatttcagaggtctccagtgtaccataaaaaatatattataaaagaataatctttatctgaactaaagctgcagtgaaggaaactcgtgtccagctgagagcagcagtgagcttttgttcactcagggaaaagtccgtgttctttatcttatttgattaacattttttttctctttggcactaggtatctcgttaatatttagacattatatacattttctttcaactggttttcctattacgtgatcaaacaaaaccagagatgccagccacagcagccaacaagggaaaagcagccccgtcaggcacccagctgtggctggggggcaaatggtactcactagagccacccccaggaggcacctggcagagctctgtgcagagccagccccggttgcagaaagctgagtttgttggagtgcctcagttgatcactctgtctctttctcccatttccctcacttccctgagcaaaatgcaacaggaagcaaagtctagttgtgaatcttccaaagccttctgatgtttaccatgttcccccaggagagggaggtgaggggtggagatctctctgcaaagaaaatacacttaaaaaatttcagcgagccgatgcacagacacccagcaacccagcttgtctccgcttattaggtgttcagagcgacagtggtcccacactatttcagtccaggaaaccatgaactccgttagtggcaatgcccccgaagaggcgcaggtgtgtgcacctgtgattaagggtgtcgaggaggggcagcctcatctcttgaagcagaaagtgttgtcacctggtgatgggacagagggaaaagctctggggctgggaaacctgggggcttgtgtcaaagctccacccatcaggagcttcaagagaagatggggggcggggggcggtggctggaaagatggaagttgggatgggaaagcggttgtagaaaaggattcactcctggaccgaaggcaggaggatatcccgggcgagagaagggagggtcggggatgggctgagttggagtcccagaggaaaagcggaagcgagagcttcgtcacccgctgtcttccagctcccggtgcgcggcaccggaggcaggcgttgggctttacctctctaaaagtactggggcaaaggaatggagaacacggcgtcccgagctcccaagggaggggagtaaacgaggtggggtggggaacaccccaagtgcgtgcgtgctgggggctggggggcacgatctccgttctcccgggtgccccagccctagcgcacgcctccgctcccccgcccccttcgcaggcgcgcgcgaggcgcaccccccttccctcggcggcgccgggcgcgcgcccggccccctcctcctcccctccgcgcctctcctctctcccggcagaaagttagcagcggggaaggaactccgggctgcaacagcgcgcggcggcggcggcagaggctgaagcagaagccgcggcggagccggggaagcgggggcgctgcagacggagcaggtgccgccggcgggtccgcgcgcccccctcggtccccttgcctgaggctgaggggggggcggtggtgggggggccacccggactcggcgggcagcgtggggcggggggccatgcggccgg

SEQ ID NO: 15629 - DNA, 2300 bp, Homo sapien
gcagctcctacttgtcatccctgcactttgggaggccaaggcaaggaggactacttgaggccaggcatctgaggccagcctgggcaacacagcaagactccgttgctataaaaaaaaattattttcaagtgaaaaaaaaagaaaattaaaacatgttttttagaagttccctaggtggtgatgcacacctcggggtcattcatttattcactaaatcaacgtctagtgagcatcaggcagtgtgctgggccttgagggcagagcagagaataagaaatcagaatctctgccctcattaagtttatattctggctgaggacctggcaataaataaccagtacataattcattcatgtcacaaggaacatcaattaggaagtggcataaaggatgacagcaggggccaggtgcagtgcctcacgcctgtaatcccagcacttcaggaggccgaggcaagttcgagaccagcctggccaacatggtgaaattccatctctactaaaaatacaaagattatctggctgaggtggcacatgcccataatcccaactactcaggaggctgaggcaggagaattgcttgaacctgggaggcggaggttgcagtgagtggaaattatgccattgcactccagcctgggcaacagagtgagactctgtctcaaaaaaaaaagtgggagtgggggaggccaggctgtaatcccagcactttgggagactgaggcgggcggatcacctgaggtcgggagtttgagaccagcctgaccaacatggagaaatcgtctctactgaaaatacaaaattagctgggcgtggtggcgcatgcctgtaatctcagccactcgggaggctgaggcagggaggcatgccattgcactccagcctgggtaacaagagtggagcttgcagtgagccgagatcactctgtctcaaaaaaaaaagaggatgccagaggggaaaaaagcaccctgaggggtgaaaacagccagtgccaaggccctgcagcaggtaagagcatcaaatcatgaaatcatgagaccatgctccaaagagctaaagaaaccactaacagaaattcttgaatttgcaggaaggcaaataaaaaaagaaacaatttgaaactcctttcacttataacaaaaccagctgcaatcagctggaagcaatatggccaactggagttagtgcaagaccagcttgctgatgtcacagcctgaatttccactgcatgtttcacactcactccctccaaatttgcacatgggacccatgaggaggcatgaagaggtaactgcacatgccaaaggtctttgcagacctcacttctccttgcaccaataacctactaatctcagaatccactccctaaaccttttctaataaaactactgccttaaagccagcacagggagagagatttgagctgactcctgcctccttctgagccaacttgcaataaaaagcttttctcagaaacccagtttcatagtgttggggtccagggcatccagctgtgagtcccttttgcaataagagagtgctcagcctggtcaagcatccaaggtgagaaaggggcagggcgtggtgtgtgatgaagttgggagagccagaccaggccagggccttgatgatccggcctgctgtattccctcctgtcctcaaaaccactcagcaggccgggtgcggtggcttacgcctataatcccagcactttgggaggccgaggcgagcagatagctccaggtcaggagttgaagatcatcctaggcaacatggtgaaaccccatctctactaaaaatacaaaaattagccaggcatggtggcgggcgcctgtaatcccagctacttgtgaggctgaggcaggagaatcgcttgaacccgggaggcagagcttggagtgagcccagatctcactactgtactccggcctggatgacagagtgagactccatctcaaaaaacaaacaaacagaaaataaaaaataaataaaaataaaaaaatgaaacactcagcaagcaggcagagacttgggagagaagaaactcggctcataggatctcggctgggacacacgcctgaggcccctgacctgatgtctggccacagactcctcagaaaggctcccgagagggtgacacccaccccctctggccatgagcccctttctgccccactcctaccctccaggccaggccactgatgtcactggtgccaggacagcattgttctccctcccacacccgccttcacctcacaagccccatcaccatgggaactgagccagccactcagaacacag

SEQ ID NO: 15630 - DNA, 2300 bp, Homo sapien
cacgctgtgcacatgtaaaccaaaacttaaagtataattttaaaaaaataaaaaagaaaaatcctatttgaaggaaacaaaaaagagtggctttatttgaaaggattattgcaaggtgcaggagggacttttttttcttttttttttgagacggagtctcgctctgtcatccaggctggagtgcggtgtctcggcccactgcaagctccgcctcccaggttcacaccattctcctgcctcagcctcccgagtagctgggactacaggtgcccgtgaccacacccgggtaattttttgtatttttagtagagacggggtttcactgtgttagccaggatggtctcaatctcctgacctcgtgatccgcccgcctcggcctcccaaagtgctgggattacaggtgtgagccaccacgcctggccaggagggactattataacaggggaagggagacttgcaaaagagagtacactgtggccacaagggttaggccaaaaagagcttttctttcataggaagaagaaaacaaggctagaaagaacctggaagtggggtgaaagggtgacatgatgggttagtagatcagagaatatatcaacctgaggccagcctattctgaggaggggctgtctgctggcccaggcccagggtgagccaaagttcaggggcctggaggaaggaaagaatcttaaccaaagtggttgaccagcgttttataaggattgattagtgggacaagcagttcaggtaatcacttataagacaatgaatgagaattggagggtctgtgtcctgtttacctgctctcacaggtaaacaatgggggtggtgtcttggagtcttatctaaattctcttgtgggggtggggggtgattctttgcagtaaacttttttccacaacacaaaagggtgagagcaattcctttttacttttttccggggacacaagactcagggaaaattcaacattgtcactactcaagggtggaaacttagtgtagcacataaccatgaggattctaaacctgtggctgctgagttcaaacaccagcatcccagtgagcctggtgggttaggagatctttctgtgctttacttgctccctccctgatatggtttggctgtgtccccacccaaatctcatcttgaattgtagctcccataattccgtgttgcggaagggcccagtaggagataactgaatgataggggaggttcccctcatactgttctcctggtagtgaatatgactcatgagatctgatggttttataagcggtttcccttttcacttggttctcattatctcgtcttccaccatgtaaaacgtgcctttcaccttccaccatgattttgaggcctccccagccatgtggaactgtgaatccattaaacctttttgtttgtaaattgcccagtctcgggtatgtctttatcagcagcatgaaagcggactaatacactccctaaaatggggatgagcatgatcattacaatagctacgatcctcatatttttaaagtattttagcaccgtacctagaatccactaatctatgaactgatcctgagcaagcctgtttcctactcagaccccaagctcagtacgaacataactttccatgcctctgtgcaatgctgcaaaaggcgtgcatacttggagtccacaggagtgtgtgctcaaaacacaaaagtcccagtgaccacgcaccactcggcatcaaagcaaaggtggcaggagtgtgtcccctggccacttgccttctcactcgaacagactgtggatgcagcacttgctcgtgggtaattgtggatctgactttccaaaagtacaagtatgtggccactttaatcactgagcctcagtttcgctctctgtaaaatagggagaactaataatcctagctgcagagattaaatggtggatgcaaacagccttgtacgaagttgttatctgtgcagaggaaaaagcggtatcactagcgtggaaggacccagaggatacagccaagcctttctgtcttctccatcccccggccttttaaacagcagtggggcggggccacggcatcgatcactcggcgctcctccaggcactgcgtcgtgatcagacgagcggtgagcgatcgatactcctatgctagcctctggctcctcaggggacacagccgagtggtcggaccaaacgcaacgagtcttcgccagcccaaaggcgactcgacaccgtcccagctgaagagaggttagtctgagcaactcgagagcggagtcagctccagttcctcagaagtggagaggcc

SEQ ID NO: 15631 - DNA, 2300 bp, Homo sapien
gcctcggtgatacctcatccccttttgtaggatcccttcaggagactgctttctggactctttgcctcccatttctttcctctacacctccatgatgccaaagaggataatctccctaaaacacagctaggcaacaccatgttcctgcttcaagacccttagtttgtagagatccttcatttgcaggatagaagtccattgtttttagcctagcacattctaaccctgtgcccagaacaaccactggcaaatacgggggtgctaagtacatcgacatggaatggccctagtgataggaaataaagttgatgacaggctggatttgaggtttaaggagaggaggaccagagttcgatgctcaggtgtgtggtatgattgtgtggactgcaccgtccacaccagatgatttgcaaagagaaggacttgggagaggaaaggggctaaggaggtggaaggagaggatgagtctaacgtaggctttgttgaggtgcagatttggtgagatggaggatatttttctagcaggcagttggagggactggttatgagatggcgcattttcccagccctgaggtccagttgaggatgctgttaaagaacagcactggctgggcgtggtggctcacactgtaatcccaccactttgggaggctgaggcaggtggatcgcctgaggtcaggagttcgaggccagcctggccaacatggtgaaacccgtctctactaaaaatacgaaaattagtcaggcacggtggtgggcgcctgtagttccagctacttgggaggctgagccaggagaatcactggaacccgggaggcagaggttgtagtgagccgagatcacgccactgcactccagcctgggcaacagagtgagactccatctcagaaaaaaaagaaaaaaaaaagaacaaaagagcagtaattagcagtcttgtggatctcttatgtgccaggtgcttggcaagcctttggtagttgtgactcatttaggcttcctctatgtctttaaggtagctactagtttcccagttttagaggtgaagagactaggccttagggaggctgagcattgttagctaaaaatgtttgcctgctgtatttgcccaaggcaccagtgaacttctttcttgtcagatcttgacatcacctaaaatgaatgtaaacacctcagaattccaggacccattgcagtcagaacatccaggaaagggtttgggaatctgtattgttaaaatgcacattaggaaatccttaggatcaggcagatctgggactttctggtctcagtgcttcctgtttagttccaaattcacattcttagcccctgcactgcgtgctccatggcagtagccagcgttttgatcagggcttgtggaatagttttattaactgtgatctttgtggtttacggaaagatcccattttgttagtgagcaggagatttcgaaaatagtctgaagtcctgccatgatagttgttttattagtggtttggggagaggaggaaactaacatttattaagtgtttactagtagttctctcagtaatgaacttcattataattttatggtgagaaaacggggcctctgctcaatttctccaaggccatagatctggtaaaaaggctcagccaagggttagacccagaattgcctgatagtaaaaatagctcagacttatttagtgcttactgtgttaccaggctattacatgtattaacccatctaatcttcgtagcagttctgcagaggacgtttctatcattagtcccactttacagatcagaaaccaaagcctgtggggactaagttgctcaatctcacacgcctagtaagtgggagagccaggccctgaatcccggcattctagctccagaatccacacctcttaccactgcccagtcctgatgctgtgactcgtgttcttcttctcacctttgtagtaaacagcatgaagaatgacttttaaaaatgatagcaaatttatatttgttaatgtaaattagtacaagacccaggacgttgcttctgatgtgcttggggttgactagtgtcatttacttccttttcagttcgttcccacatgcagggcagcacaaggagaatgggcgtcatgactgatgtccaccggcgcttcctccagttgctgatgacccatggcgtgctagaggaatgggacgtgaagcgcttgcagacgcactgctacaaggtccatgaccgtgagtaccgtttccctgttcccagggcgctctggtgctgtgttgatcagggaccagtgacataggtacaataccatgta

SEQ ID NO: 15632 - DNA, 2300 bp, Homo sapien
attcacacctgtaatctcaatactttgggaggtcaaggcgggaggactgcttgaggccaggagtttaagaccagcctgggcaacatagcaagatccactctcaacaacaacaacaacaacaaaataatgtgaatatgttaaataacagccaaaataaatgtaaatgagaatgagaacaggataggattgaatgctataatttggtggaaaaggagtgggaaaagtaggagtggaagaaagacaaccataagcttgtttatgcatattatgtcccttgtctctatgagaagagactgtagggagaatggtgggattagcatagacatgtattacctacttaaataattttattttatacaaaaatcagccaggcgtggtggtgcacgcctgtaatcccagctactcagaaggctaaggcaggagaatcgcttgaacccaggaggtggaggttgcagtgagccaagatcgcgtcactgcactctagcctgggcgacagggcgagactctgtcacaaaaagaaaaaaaaaattactttttttaaaaaaattaattaaaacagtttattggctttaaatgtacatcagtaaatttttaaatgctaaaaagttatgataaaataatacagaaccaaaacatcaaagaaaatagaggctcagcagcatgatttcaatatattttcccggataaacagattttttttctaagtatatgcctttttattcaagaacaaaaactccctaaattcaatgtttagaactgaattttttttaactaagcccagaaaactggggctcataaaataaggcataatgtgggcagcaaaagaaaaaaggagaaaaaaaatgggagaaaaattggttttaatcccatgtataatataggttggctggttttgtttttgttttagccaatttaaggcagaattatctctctgcaaccttgcagataaatcctagtgttttagccataagtttcaagagttcatatatacagataaaccaattaaaaaaaccttttcgaaggcttttgaagcattatataaatctttaaaattcctatcacccacattttaagaaatacatctatacgtttaaatttattattaaattaattaaatgcattaattaaatcaatttatttaaatttaataattttaaaatagaaatgtttgtggaataagtaaatctcagtcataccattcgtgcgggtgctaacacaattctagtgcttcacatgcccgacctcatttaacccaaaccagaacaaccttatgagcaaagggtcactgaccccatcttacagatgaggaaactgagactaagagggcacaaggtgacacacaagagttggtggcagagatagacgtgaccatacaacagcacagttcctgttttcaaggacactctctatccagcgagagtgagaaaagtgagtgaacagaacaactacaatccaggtccctcatctgcaaccctcaaatctaaaaaggtatgaatactagtggatgatcggatgcaggggaaaaaaaaaaaaaagtctgaataccaaaacttgtttaagttggaaaacttgacctgacttaaggtgaggctatttatggttatttatcccaacagtgtaaatatatgcatttttttttttgagacggagtttcgctcttgttgcccaagctggagtgaagtggcacgatcttgattcactgcaacctccgcctcccgggttcaagcgattctcctgcctcagccttccgtctcagcctcccgagtagctgggattacaggcacgcaccaccacgcccggctaattttttgtatttttagtagagacagggtttcaccatattagccaggctggtttcgaactccgaacctcaggtgatccgcccccctcagcttcccaaagtgctggaattatagccgtgggccaccgcgaccaggtcaatgtaatatatgcgtatcttcataactttagctgtggaaagggtcgtgtatttgattacaagccgctgctccagccccctctgagggtgaaacctaacatagaacatagggactttacctttccaaactccgagaactcctcgattttaaacgcatctggcctcggggctgtaacataagcggctgcggacttgtacaaagtaagaaactccgtacacaaaacagaggggagcacggagggcggcgggacaaagagggtggtcggcaaaggctgtattttccatagatgtaatcacagtttgaatcgaattttatattttgctttttcacctgttacaatgaaaagtatctttacctgtt

SEQ ID NO: 15633 - DNA, 2300 bp, Homo sapien
tttcaatatattttcccggataaacagattttttttctaagtatatgcctttttattcaagaacaaaaactccctaaattcaatgtttagaactgaattttttttaactaagcccagaaaactggggctcataaaataaggcataatgtgggcagcaaaagaaaaaaggagaaaaaaaatgggagaaaaattggttttaatcccatgtataatataggttggctggttttgtttttgttttagccaatttaaggcagaattatctctctgcaaccttgcagataaatcctagtgttttagccataagtttcaagagttcatatatacagataaaccaattaaaaaaaccttttcgaaggcttttgaagcattatataaatctttaaaattcctatcacccacattttaagaaatacatctatacgtttaaatttattattaaattaattaaatgcattaattaaatcaatttatttaaatttaataattttaaaatagaaatgtttgtggaataagtaaatctcagtcataccattcgtgcgggtgctaacacaattctagtgcttcacatgcccgacctcatttaacccaaaccagaacaaccttatgagcaaagggtcactgaccccatcttacagatgaggaaactgagactaagagggcacaaggtgacacacaagagttggtggcagagatagacgtgaccatacaacagcacagttcctgttttcaaggacactctctatccagcgagagtgagaaaagtgagtgaacagaacaactacaatccaggtccctcatctgcaaccctcaaatctaaaaaggtatgaatactagtggatgatcggatgcaggggaaaaaaaaaaaaaagtctgaataccaaaacttgtttaagttggaaaacttgacctgacttaaggtgaggctatttatggttatttatcccaacagtgtaaatatatgcatttttttttttgagacggagtttcgctcttgttgcccaagctggagtgaagtggcacgatcttgattcactgcaacctccgcctcccgggttcaagcgattctcctgcctcagccttccgtctcagcctcccgagtagctgggattacaggcacgcaccaccacgcccggctaattttttgtatttttagtagagacagggtttcaccatattagccaggctggtttcgaactccgaacctcaggtgatccgcccccctcagcttcccaaagtgctggaattatagccgtgggccaccgcgaccaggtcaatgtaatatatgcgtatcttcataactttagctgtggaaagggtcgtgtatttgattacaagccgctgctccagccccctctgagggtgaaacctaacatagaacatagggactttacctttccaaactccgagaactcctcgattttaaacgcatctggcctcggggctgtaacataagcggctgcggacttgtacaaagtaagaaactccgtacacaaaacagaggggagcacggagggcggcgggacaaagagggtggtcggcaaaggctgtattttccatagatgtaatcacagtttgaatcgaattttatattttgctttttcacctgttacaatgaaaagtatctttacctgttaaatcgtaattacgattaaaaatatttttcactaaatagtaagatttttagatgtctgcgtgtgtgttgcgggaggacatcccagtccgctgttttctgcggcccctgtctgggcctcagtttccccatcaagaagggggaaaccccaagaccccagtccccgagttccacagcccacggggaccgaccccggggccggaccccactgcctgtctcgcccaccccaccttccgtcctcccctcgccttccttgaagtccctcttctttcccctccaacccctagctccccacgttacccaccagggagcccaagcgcatcccaggccgcgctagcggatacggtcgcaaggtggactcttcttcctttgaggcggggcgaacgcgaacgcggcgttcccattggtggcctgcggcttattcgcccgtccgttgagtgacgcacttccggttctccgtttgcgccattgccctggtggttccgcctcgtgggttagatcccaaattacgcccgctctcgatccttaataatgggaaggggcttccacttgtcgccctccgcctcctgcacctcagtgacttccctgaccaaggaggaagaattggcgtgcagcctgggcttccctcaatggccaccattccgctggcacaatgtagtgccctgcc

SEQ ID NO: 15634 - DNA, 2300 bp, Homo sapien
taactttgaaacaaaggcaataatagccctttcccaaaacaaatcccctccttgcctaggaacgggtctgcctttgtagactaacaaattagctaaaagattagaaattatggtttaggaggtcacgcaagctggaggctacaagattctgaccctccccagattgcttccgggagtaacatcactgttctaaaacctaaaatcagtgcttgagatattttgcagaacccgtgttctaatgcaccagctgacgccacccagccctgtaatctggctaatctggtcctatggtcctaacccaggatctgactcagtgcaagaggacagctttgactcctttcctctctgatccaacctatcaacactctctaatccccagcacctccagccaccaaattatccttgaaaaccctgaatttccagggagactgatttgagtaataataaaactgtggtctcctgttcagccagctctgtgtgaattaaactttctctattgcaattcccctgtcttgataaattggttctgtctaggaagcaggcaaggagaaccattgggtgcttacaaaatgcgagaatacttgcatttaacctacacaaatcctccagtatattgaaaatcatctttaaattacttacaatacttaatacaatgtaaatgctatataagtaattgctatgctgtattgctttcggaatctgtattatttttattgttgaactgttattttttactgttttcccccacaaatattaaccacccacagttgcttcaatccgtagatggggaacctgtaaacatggacagctgactgtactttgtcctatgtctcagagacactgagtttaaggcccaggattccatgttgaccatccagctccaaagctgaagcttttaatcaccacacaccactgctttcccacttagcagatgaaactgaagcccagagaggttaagaggttgtccaagatcacaggggtggtgagtgaccaagcctggatttgatctatcctcacagagacagatatttgcaggtactgctgttctatattagttacctgtttcccttgctaggctgcatccctagctctcagaccagggatagaattcaaacgtttggaaaattaacgccttgaagactcaaagcagtccattcacttccacgagtaatttcacttgctttctcacaatccctaggtaagataacagttaacatataatcagcactcccatgtgacacttttcaatggccatgctaagcacctgatataggtgttattatctcttgtaaatctcaccaacactattttgcaagaactaatatcctcatttaatggaagaggaaactgaggctcagtgacttgcccaagcgcctgccaactagtaagtggcagagccaggattctagatcaggctctatgaccacagagtccacatttttcttttctttttttttgagctctgtcacccaggctcgagtgctgtggtacgatctggctcactgcaacctctgcctctcgggttcaagtgattctcctgcctcagcctcccgggtagctgggattacaggcacacaccaccacgcccggctactttttgtatttttagtagggacgggggtttcaccatgttggccaagctggtctcgaactcctgacctcaagtgatcggcccgccttggtctcccaaagtgctgggattacttacaggcgtgagccaccgcgaccggaccagagtccacatttttgacgtcgaggccacactcagttccacagatggggaaactgaggcccggggcagggcactacattgtgccagcggaatggtggccattgagggaagcccaggctgcacgccaattcttcctccttggtcagggaagtcactgaggtgcaggaggcggagggcgacaagtggaagccccttcccattattaaggatcgagagcgggcgtaatttgggatctaacccacgaggcggaaccaccagggcaatggcgcaaacggagaaccggaagtgcgtcactcaacggacgggcgaataagccgcaggccaccaatgggaacgccgcgttcgcgttcgccccgcctcaaaggaagaagagtccaccttgcgaccgtatccgctagcgcggcctgggatgcgcttgggctccctggtgggtaacgtggggagctaggggttggaggggaaagaagagggacttcaaggaaggcgaggggaggacggaaggtggggtgggcgagacaggcagtggggtccggccccggggtcggtccccgtgggctgtggaactcgg

SEQ ID NO: 15635 - DNA, 2300 bp, Homo sapien
taggaagcaggggctggatctatttcttgctctccctagcccccagctcacgacttggcatatggaggcatccacaaacagatgccgaaggatgggagtttttccacactcccacgccacctccaggtatttgctcatgctgtcccttccacctgcatgtttttctgcattgattcaggcactggtcagaggtcacctcctccaggaagccatccctgaccccagggaactgacttatctttactgtcacttccgggggtgggttggtggctgtcttgctcacttggttgtaaggtctcagagggcagggattgtgtctgtttcatgtcttcaggtctgcgtcatcagcgcttgtcacaaggttagacacacagtaggaccaagacagaccaagtacatgaaagaatgattgacatatgggccaggcgtggtggctcacacctgtaatcccagcacttcgggaggcagaggcaggcagatcacctgaggtcaggagtttgataccagcctggccaacatagtgaaacctcatgtctactaaaaatacaaaaatgagccggacgtggtggtgcacgcttgtaattccagctactcaggaggctgaggcaggagaattgcttgaactcaggaagtggaggttgcagtgagctgagatcacccactgcactccagcctaggcaatggaatgagaccccatcttcaaaaaaaaaaaaagaatgattgacgtgcagtggcccctgccctgggaagccaaccctcaccctccaccacagcacttgatcccattgggcagtccttggcttccaccctcaaactgagagctccttgagggcagcagggggtcaaattactctctgggttctcagcactgcccagtgtgagtccaaatatctcccacctcccctgtctccgctctttcctcactcagggctccacagccatgccggccttcagcaattcctcctgcaggctgagctggttcccacagggcctttgcactagctcttccctctccctacacaagtcttcccccataggctcttcagagtctcagctcaaatggcctctactcaaaaagcctcttccagaccacctgccccactggtctaagaggtccctactttcttcttgggccctcctgacctgaaatactttgttgagtgttttccccccagtcatctggctgcatccgggttcttatggtgtccagacgttaatggtctatggggcctgtgttcgaatcccagctccacccctgctcctgcttacctgcagagtgattctgagtttctttcttttcttttttaaaattttataaatgtcaatttttgtagataggggtctcgctaacagggttgcccaggctggtctcgaactatggggttcaagtgatcctcccgcctcagcttcccaaagtgctgggattacaggcatgagccactttgcccaacccattttgaatttcttaaggactctgtgcctcagtttcctgatttgtaaaaccggtgatagtatcactcccttatagggtagttgccaggattgaacgagttaacatttgcagtgcccgacagattgtactagttactgattgaagggctgttttactatccaaatgtggctggagtaggagttgggtaaacatttattgaagaatgtgcaaccactctcacttggaagccgggctgttaggaaggggaggaggattccagtcgcccagccctcccccaccaaacgcaactgccccggcgcaaaagaggccgcggaggccaggcaggagcaggtcctggaggcctggtcggcgtgggcgttttattccgagaccaaggggatccactgcagagttctccgctgggcgtgacctcgggctacggcgtgggaggaagcgcgcggcaagacacccagcgaggtgctggggtcgcccccaggagaggacggcggctcggactgtccggcggcggcggcggggacagcgacaggggcgcgaggtggccgggacccgggccgggcgcgccgggcggggcggcgcatgcaaatctgccgggcgccggggcggggagcaggaagccggggcgggctgggtctccgcgcccaggaaagccccgcgcggcgcgggccagggaagggccacccaggggtcccccacttcccgcttgggcgcccggacggcgaatggagcaggggcgcgcaggtaggatccggggcccgcgcgcggatcgggttgcgaaggtatcgcccgggcacgccggctgagggcgttcgggaagggctcggccgccggcggggaccacggggaccac

SEQ ID NO: 15636 - DNA, 2300 bp, Homo sapien
ttttgaagacagagtcttgctctgttgcccaggcttgagtgcagcactacagtcatagctcactgcagccttcagctccttggctcaagtggtcctcccacctcagcctccagagtagctgggactacaggcgtgcaccaccatgactgtctaatttttaaatttttttatagagacagggtcttgctatgttgcccagactggtcttgaactcctagcctcaatcgatcctcccacctcagcctcccaaaatgatggaattataggtgtgcaccgctgcacacagccttctcgagtatttctgaggtttaaatgagagggtgcatctttaaagtccttaaaaccctggcacacaatgagctttcagcaaatattagctctttttactgtctcttctcctgatctttcaaccactacaaatttcagtgcatgttatcagagaattcaccccgaagatcaagagaaagaaaaacaaaagctggtgtcttcccaaggttcgttctccagagaacacgacacacttcggtagctgggaagagctctacagggccaggatccctcaaatcaaccacaggggaatttgtaccaagttcctcaaaaacagctagaaaaaaaaagaaagaaagaatagcaagacgctttctcttttttctctggagtggtcacgaaagtcaacagcaagttgattcccaaaaatgagtcagcagggagagctacaaattgcatcttgttatcaaaacagcataaaatagcctcccccaactgtgggacatttcatcctggtatggccccgttttcacagcctggtataagcttaggaatcaaacacacccaggttcaaatcccagctctaattcttcttggcttgtgtgacgtttcactcctctgggcctcagtctctccatctgtaaaatgggactaatcttgtctgcctcacactttgtgggataaagtgagatcatgtaggcaccaaagtaattcgaggtggtggtgatggcagtggtagtggtggtggtggtagcggtggtggtggtagcaattctcttgctctcctttggagactgcactaggcattaagcttgttacattttgtctcctggtttcttgaatgtcttccagaaacatctgaccctctcatgggcctctggcatgttagcaagatgaaaactctcttgagaatttcttttctctattttcttcttgaattctcatgtgttaatgtctgccctcttcctcatagctaggtgcccccatttgacagatgggcaaagtgaggcattcagagaggtgatgtgacgtgcccaaggggtcctgctccctggagctctgcagcaggagactggatccaaaggaaatggaggcagagaggcatgggggtcaagccagagcagagggtcccaagctcagaccctattaggcaggtaaggctcaggaataagaaacaggctggtttgcaaagtctgaaaaaggggcttccgtgggaccttgggcaaggttctggtccttctctctgtgctgaggggctggagtcggccactgaggactctgggtccacgggtgaaactgtgccacatcttcacacctctggcctcagtttccatatctgtgcaatgtggtggctccaggaggcactgcctgcctcatgggttatgactgagaggcctgtggggatgatgtcacaggtccctaagagggaagtgtcaccccgatggccccaaatgtcttacttgcaggtgacctttggtgacagtgggtgcctgctgtggggccaggccccctcccacctctttctcactccctcccaggaggagcccagctgcgggtgggcggggctggcggggagcggctcaccacatcctcctcttcctccccactctgcacatgcggctgggtggcagccagcggcctcagacagacccactggcgtctctctgctgagtgaccgtaagctcggcgtctggccctctgcctgcctctccctgagtgtggctgacagccacgcagctgtgtctgtctgtctgcggcccgtgcatccctgctgcggccgcctggtaccttccttgccgtctctttcctctgtctgctgctctgtgggacacctgcctggaggcccagctgcccgtcatcagagtgacaggtcttatgacagcctgattggtgactcgggctgggtgtggattctcaccccaggcctctgcctgctttctcagaccctcatctgtcacccccacgctgaacccagctgccacccccagaagcccatcagactgcccccagcacacggaatggatttctgagaa

SEQ ID NO: 15637 - DNA, 2300 bp, Homo sapien
tcagcagggagagctacaaattgcatcttgttatcaaaacagcataaaatagcctcccccaactgtgggacatttcatcctggtatggccccgttttcacagcctggtataagcttaggaatcaaacacacccaggttcaaatcccagctctaattcttcttggcttgtgtgacgtttcactcctctgggcctcagtctctccatctgtaaaatgggactaatcttgtctgcctcacactttgtgggataaagtgagatcatgtaggcaccaaagtaattcgaggtggtggtgatggcagtggtagtggtggtggtggtagcggtggtggtggtagcaattctcttgctctcctttggagactgcactaggcattaagcttgttacattttgtctcctggtttcttgaatgtcttccagaaacatctgaccctctcatgggcctctggcatgttagcaagatgaaaactctcttgagaatttcttttctctattttcttcttgaattctcatgtgttaatgtctgccctcttcctcatagctaggtgcccccatttgacagatgggcaaagtgaggcattcagagaggtgatgtgacgtgcccaaggggtcctgctccctggagctctgcagcaggagactggatccaaaggaaatggaggcagagaggcatgggggtcaagccagagcagagggtcccaagctcagaccctattaggcaggtaaggctcaggaataagaaacaggctggtttgcaaagtctgaaaaaggggcttccgtgggaccttgggcaaggttctggtccttctctctgtgctgaggggctggagtcggccactgaggactctgggtccacgggtgaaactgtgccacatcttcacacctctggcctcagtttccatatctgtgcaatgtggtggctccaggaggcactgcctgcctcatgggttatgactgagaggcctgtggggatgatgtcacaggtccctaagagggaagtgtcaccccgatggccccaaatgtcttacttgcaggtgacctttggtgacagtgggtgcctgctgtggggccaggccccctcccacctctttctcactccctcccaggaggagcccagctgcgggtgggcggggctggcggggagcggctcaccacatcctcctcttcctccccactctgcacatgcggctgggtggcagccagcggcctcagacagacccactggcgtctctctgctgagtgaccgtaagctcggcgtctggccctctgcctgcctctccctgagtgtggctgacagccacgcagctgtgtctgtctgtctgcggcccgtgcatccctgctgcggccgcctggtaccttccttgccgtctctttcctctgtctgctgctctgtgggacacctgcctggaggcccagctgcccgtcatcagagtgacaggtcttatgacagcctgattggtgactcgggctgggtgtggattctcaccccaggcctctgcctgctttctcagaccctcatctgtcacccccacgctgaacccagctgccacccccagaagcccatcagactgcccccagcacacggaatggatttctgagaaagaagccgaaacagaaggtaattccagccctggttttctgctgggaccagggtgccttctctgcccaggagggactgttccctgcctgctgcatctagtgtcacagtgggagggctcggaggactgtgcccaagtcacaattggggacactgaggcaaagaagattcatgcagtgaggctgggcagaaatgaggttggggtctcttgttcagcacagcttaggggcccagcagcagggatgtggctgagacgaccctctatcttgaaaaccagcctccaaaatgtagcgggctggggaaggaaagccagtttcaagccaaacataacatgtcaatcacccgattctgggcggctgagtcgggaggtgacgggcatgggtgtagagcctgatgggacccattctgtgtcagtttctatgtcttaccaccttgattccacccagtcattcaaaacaatggctggtgtgcccatttcgcagatgaggcaatgaggctgcgagaggtagagtgattttccctcggtgactcaactgggacgtagcaggtcgggcagtcaagccaggtgaccccatgagctgtcgctgcatctttctcatgaagcacggggaacgggtcggatggtaagaggccaacccagttccctgtgcatgtggaggagaggagggtggggaggtcagtggaggctgagccttgaaggatgg

SEQ ID NO: 15638 - DNA, 2300 bp, Homo sapien
cctgtagcaggaagcctcctaagacaccttctgtccttgtaggaaacacacatggtggcccgatctgtatctgaggataaggtgctgttgccctcaggggtcagcctgcgtgcaaagacccaaaaggggatggattcggggcagagaaggcagtggaattagggtaggccccatttggtgctgtgggagcatgaggagggagtgatggagaaagtctgtgtttttaagctgatgtttcccagaagtgagcagtttattttaaacagtgttaaatatccctggatcccctagtgaaagcgtaggctctttcatcacttgccctgctgatggaggaggcaagattctcaatttggtgctatcgcatcttaaacactactctctctttttttgtgttttgttttgtttttttttgagacagagtgtcttgctctgttgcccaggctggagtacagtggtgtaatctctgctcactgcaacctccgcctcttcctgggttcaagcaattctcctgtctcagcctcctgagtagctgggattataggcacacaccatcacacccggctaatttttgtatttttagtagagatggggtttcgccgtgttggccaggctggtctcgaactcctgacctcaaatgatcctcccacctcggcctcccaaagtgctgggattacaggcatgacccagtgtgcccggcctccctttcttaactttaaacaaagacaaaccacatctccagtttctaggactctcaggcaggcagtagcatgtcactaaaattcaattactgcctttgtttttcttgtatttagtttttatgttgtattgtatttagttttatggtaagttgattgttttgtttaagtaacacttatataatatctgctatatgccaggcactgttctaaatgctttataaatgttgactaatttaattctcccaaagacctatgaggcaggtgctgtgattatcattactcccattttacagatgaggcccagaaaggttaagcaaactgcccaaggccacaaagcctataagtggcagagctgggatttgaactgagaccagccagctccatagtctgtgtcttgaccagcatggcgcacactgcctatttcatgccagttatctgctgatggtcatgatataatatttttgagacatgtttattggagtaaaaaataggaggcaaggtaaagatcaatagtaagtggataattaatagtagcaccagtgaaaacctcaaacgcaataggctagtggcaggagttctggaacactccagtgtggctgcagggatacagcacatggaccatgaaagttgagttgagaggatgggaggggaaaggtgttggagggcaggagtctgctccagcagaggcaaagatgcatgacgaagcctgggctgccggggagacgatgagtaattcagggcagtcagccagtaatggcaggaaacccgtgcactggtacagcacttcacagtccgtgaagcactaccacatctgctttctcacagcctcttcttcactgccaggtgcagtgagcactattgtccccatttcagagatggtaactgagttcagagaataaaagagccagagaagagctactatttgcttcaagatcttctggcttcaaattctgagcccttttctcaactccactgtgtcagggatctttggtggcaagtgacagaaatagaattcaacatgattaagcaacataggtggtttttggctcatgggaatgagaaatccacagggtggacatcagatatggctggatccaggacctcccatgatgccatggggactcctgacctgtatttctcagtatggctgtcattttcaaggaggctgtctctaagaggtgacaaagatggctacaagctctgagaagataccaaaaaaagtgtcagttttctagagttctagaaaaaaaatctcaggactgctttcactggccttgcctgggttgacatccatccctgatgcaatcactgtggtcagacagatggggtgttttgattggccaagcctgggtcaggagcccactttgtggagcatggggtggagtcagcctcaggcaaaccactagaggcagctcagatagaggagctctttgggaagagacgccgggcaggcagaagcagcaggtaccccctccacatccctagggctctgtgatgtaggcagaggtaagaaattaggagggatgaggagttttttgtttgtctgtttgtttttttaaagacagggtctcactctttcattcaggctggagtgcaatagtg

SEQ ID NO: 15639 - DNA, 2300 bp, Homo sapien
agctgaagagttctagaattgcccatcctttaggatagtcccagctgaagatgtccatgagtgccatactttagaaagtccccagtggaagacttccagaggtatccattgctaagatgtctgtagttagagttctagaaatgcctgctgttgggaatgtcagtatgtcaactcttggaattcttcaacagttgaagacattctccactgatgtactgagacttatatcagtagtacatcggttgagaatgtcctcaactgttgaagaattccaaaagtatgcattgcctggaatgctgccagaccattaccactcctgagatatgcccagtcctgcagggagagtccactgccaggactgtgagtggctgaattggatcaaagagaaatcaaacagagcatcctatcacatgcacgggccaggcagtgctggtgagtctgtgctccccatgcctgagtccagctactcaggcataggcttgattcttgtgggaagagaagagacactcagcccctttgatggaagctgggaaaagaggtggctctgctggaggcaggggctggcctggtttaaccctgacctggtgcatcctttccttgtactggcagagtccgaggagaaagctgatctcagtggactcaagaagtgtctccctcctccccctggagttccgcaaagactcgagctatgagctgcaggtgcgggcagggcccatgcctggctcctcctaccaggggacctggagtgaatggagtgacccggtcatctttcagacccagtcagagggtaggtgtgaagctgggatggacaccccactcctggtatcaaattttgtcctgttctagccaccctaagccctgagctttctggcacagctgggaggtattcagttgttcatcctcagatgtagcccttcaattacatttctagagcccctgctggccaggccctgttgggtgccagctgcttcttctgttaggcatttgatccccctaactctgaagtgggaatcagccctgtttttcagacgagataacttaggctcagagaaatgaagttacttgcctggggtgaggaatgagaacaagatttgaacccagatccatctcacttcaagacactagcagtaacagcctctcctaccctcttccactctaccccagacccatttcccaccatgcccaccccatatggcctctggtagagttggtgccatttaaccctttctttgcttccttcccagagttaaaggaaggctggaaccctcacctgctgcttctcctcctgcttgtcatagtcttcattcctgccttctggagcctgaagacccatccattgtggaggtgaggccaggggatgaggaaggcagggaggtggtcagcctgggccactgcccctgtatgatacatgcagggttggaaaacatgactgtcatcatggtaacaatgatgatgatgggataataaccaactcacagccaccatgtgctggacactgtggagggcactcccttcacccccatggctgccctatgagcttgagacactgcagttgcccttattttacaaatggagaaactgaggcaaggagatgtcaaggacaaagtcacacagctccaaggtggagaaattgggattgaaaatctgtgcccttaaacagggacctcagctgtgatcttgtccagtggattttaagctttgaggcttaatgggcttaaggggccactaggtggtggtgaagaggtggctgtaatagtccacacctctgaaatggcctctctgcgcacccctggttgcagataaagaagttgaggctcagaaggggcaacatttgcccagcacgcaacaggcagccaagaacataaccacgatatcccttcaggagcctgtgagggagacttacttctcccattttacagaaggggaaaccaagccccagggaaggagggaggcgcctgggctgagtcttgggatgctcggaagctcctgtaggatgaagctggggagcgtccgaatgggaggccaggctgccctctggtgatgtcagggtcctcacccctctctgccccctcaggctatggaagaagatatgggccgtccccagccctgagcggttcttcatgcccctgtacaagggctgcagcggagacttcaaggtgagctcccgaccctgtgatgagctcctcggagcccctcctcctcttcaggagccccacctcccctcaccccaggctccccagcctcaccccacaggcctagagcatccaggtctcagccaagccacaagccaggcctcagtt

SEQ ID NO: 15640 - DNA, 2300 bp, Homo sapien
ttatgtgttcgttgaatcccagcagaaagcagtgcaagcttcaaggcatctggagggaagcatttatgaactctctgggaaggagattgggaagggctggggccacagccctcttctcctctgacctggagcctagctcaaggtgatgatagaaagacaacgcacctctggccgggcgtggtggctcacgcctgcaatcccagcactttgggaggctgaggcgggcagatcacttcaggtcaggagtacgagaccagccttgccaacatggtgaaaccccgtctctactaaaaatacaaaaattagccaagtgtggtggcacgtgcctataatcccagctactcaggaggctgaagcaggagaattgcttgaacctgggaggcggaggtttcaatgagcagagatcacgctattgtactccagcctgggtgacagtgtcagactctgtctaaaaaccaaacaacaaaaacaaaaaacaaacaaaaacactaagacaactgacatctaataagggcttgctccaccctctgttttcattcctggagcaagccaagaggctgattcctaacctccactttataaaagagaaaactgaggcgcagcgacagcaaatgacttgcccttggagcctggtcttctgggccctttgaatggggtgatatggtttggctctttgtcccctccaaatcccatgttgaactgtgattctcaacgttggaggtgagacctgcggggaggtgattcatgggggcagaccctcctgaacagcttagcactatccccttggtgatgagtgggttctcgctcagtcacttcatgggagatctggtgggtttgtttgtttgtttttgttttgttttgttttgtttgagacagagtatggctctgttgcccaggctggagtacagtggtgtgatctcggctctctgcaacctctgcctcctgggttcaagcagttgtcctgtctcagcctcccaagcagctgggactacaggcacaagccaccaagcccagctgatttttgtattttttttttttagcagagatggggtttcaccatattgctcaggctggtctcgatctcctgacctcaggtgatccacccacctcggcctcccaaagtgctgggattacaggcgtcagccaccgtgcccagccaatctggttgtttaaaagagtctgggacctcccactttgctctcttcctcctactcttgccaggtgacacgcaggctcccccttagccttctgctgtgattggaagcttcctgaggcctcacccagaataaatgctggtgccatgcttcctgcacaacctgcagaactgagagccaattaagcctctttgtaaattacctagaccctggtatttctcttttttattttttgagacaggatctttctgtcgctcagcgtggagtgcagtggcgccatctcagctcactgcaacctctgcctcccggattcaagtgatcctcgtgtctcagcctcctgagtagctgggattacaggcatgtgccaccatgccagactcatttttgtatttatagtagagacagggttttgccatgttggccaggctggtcttgaactcctagcctcaagggatccgcctgcctcggcctcccaaagtgctgggattataggcgtgatcccagcctagcctggtatttctttatagtgacacaaggactaatacaaggtccttccttaggatagaaggagagtccttactgtggggataatatcagaataatgctagaacactttctgctgcaagggacagaaacccacctcaaaccagcttaagcaaaaaaggaaatttatcagctcattgattcagctagggtaggcagggttatgctgtggtaacaaacagccccatctcagcagcttagaacaacaaaggattgattccttgctcacgatacacgtctatcacaagtgaactgaaacttcagtccgtatctccttgctcaaggacccaggtgcccaggcagatggagcagtcaccatcatcatctgtctctgtgacagaggaaaaacaccccagggggtgtggtagccatctgaaaaatgctctgcccagaagtgagacttatcacttctgctcacaactgcccagtcccagccagtcacatggccccatctggctacagagggtcaggatgtacaatcctgccatgtgcccagcatatggtgaacagcataatgacttccatactcatgtatctaaacggtccaggagaaacgtggtttcaggcatggctggatccgggatctcaagagctattaccatc

SEQ ID NO: 15641 - DNA, 2300 bp, Homo sapien
tgagaatggggagaccgacgccgagggcacccagatgacccctgccaagaggccagcgctccaggactcaaatttggcccccagccttgggcccggagctgaagatggggcagaagcccaggccccatctccacccccagctcttgaagacaccgctgcagcgggagcagcacaggaagaccaagagggtgtcggtgagttcagttccccaggccaagagcagctgagcggccaggcgcagcctccagagggctctgaagaccccagaggtaccgcgcgccttgtcccccaccccacctcaccccaccctggctttccctcccctccgccctgatgggcctcacaccttcctccgaggatgggggacctgccactggcacaaaaggggcttgacttcagcttctcagagcctgagccctgagggggaggatactgcctgtaaatgcatttccaggggagggcaggcctcccacatccccaggcagcactgtgagttccagagcaggagctcaggcggtggggccagcgtgtgcactgcagcggctgctgtggggcagtgatggcatgggggtctcaacttcctcgggtggcagcacgccctttcctttcctgcacgtctgtcatcagcagcggccttctcatgtggcttctctgggcgtttttgttttctttggggtgtttttgcctcgggttttataccacccttgtggtcggggcttctgggtggaaaatgaggtgttcgctggcttcctgcaatgtggggcttgtccgggcctgggacgctgcttgcatgtggcgctgtgtgcggcagtctgcccggccctgccacctccagggtggccgctctgtgagatgctcattgtcctttttttttgacacttcatcccctgagcctcgaggtgccctgctcatgctaggtaccatgctgaaggttggagggcagagatggcttccctgactttccgagtctctcacattctcttcctcttccctcagggttcacagagagtttcggagctgccaacatctcccaggcagcacgggaaaggtgggtgtggggttctggctccggggcctggggcggggctcttgacagggaccgagtgtaaggatttgtgtgagggtctttgagggtctttccccaggtaccagctctgacagcctgcccggcaccttggttcttggcaggggtacttggaggggcgcagtgggcgagcagcaggcgtgctgagcactggcagtgcccaggtcggcctggaatgagggctgcgcttccagaatgcccagggcgctggtggagaaccatgcctggtgctgtcagctgtgcttcactggctcctcatggcccacaggcacctcacccactcctgcagatgagccaggggtccacagagggataagccctgaatgcccagctgcccccgggacaaccatgccacagagttacaggaagcaagggggccgcagaagcccctctggtgggggcgcctcccatgagtgtgtgtgctgaccccagattggcagggcccaagtgccctgtgtcctggctttcaagagctcaggtgtgccccctccaaggcccagccatagcgatgagagcctggtgtccagctcttctgggtccgccccactcgtgggccccgggtggctgttcagtctctggtttagtaacagaaacgtctgtttcgaggaaagtgtgcctggaactctgcacatggcgtggagcagagcttcagggtcacgctcccgtgagttttgccacagcctggaggtggtttctgcctgggctgccagtagagctggcaagtccaggagtcacaacccttgtccctctcctgccaatgtgggtgggcccactgaggcctcagttacagctacatcagagcggacaccacgtcctggttccacccagctggcggtcaagggcccctctgtccagacaggagagaagcagggagtttggaaagcagagagcaagaggtggctggtctcagccctgtgacctgggccaggcctaggacgcccctgagcctcagtgttctgtctggacgagctgccctcctgcccccaccaagccctgatgtcaagccctctccctgcagggactgtgagagtgtctgcttcatcggccggccgtggcgtgtcgtggatggccacctgaaccttcctgtatgcaagggtatgatggaggccatgctgtaccacatcatgaccaggcctggcatccccgagagctccctgctgcgccactaccagggggtcctgcagcccgtcgccgtgctggagttgctccaggtgtg

SEQ ID NO: 15642 - DNA, 2300 bp, Homo sapien
gatggcatcttccaacataaagctgttttgtgcacattgaaaatctgtttagtgtatccaccttcattactgatctcagctagagcttctagagaacttgctgcagcttctccatcagcacttggtgcttcaccttttacttttatgttacggagacggcttctttccttaaacttcataaaccaacctctgctagcttccaagttttcttctgcatcttcctcacctttctcagccttcatagaattgaagagagttagggcctttctctggattaggctttggcttaagggaaggttgtggctggtttgatctatccagactgctgaaactttctccatgtcagcaacaaggctgtttttgctttattattgtttgtgtgttccctggagtagcacttttaatttccttcaagaacttttcctttgccttcacaactttgactaactttggcacaagaggcccagttttcatctatattggctgtcaccatgctttcttcacagagcctgatattttctagcttttgatgtaaagtgagagatgtccaactcttcctttcacttgaatgcagaggggtcactgtaaggttattgactggcctgacttcaatattgttgtgtttcaggaatagggagccccaggagagggaagaaaatggggaatggctggtccctggagttgccagaacacacatgatacttattaattaagtttgctgtcttatgtgggcatggtttgtggtgccccaaaacaattacaatagtaagggcaaagatcactgatcacaggtcaccatcacagatatgataatcatgaaaaagttgaaatattctgagaattcccaagcgtgacagacacaaatcgagcacacggtgttgtgaaagtggtgcccgtagactctcttgatgcagacttgccgcaagccttcagtatgtaaaaaacccaagaacacaatatccgtgaagcacagtgaagtgaggtgcgctgttgaagttgatggtgttcactgtacatttcataaccacagttagaattctatactttggagtttggactgggcaaaaatgtagtgataacctatcaattatggctttagcagagacatattctataggaagcaacagtagccagccctggctagtgtaggcaaaagtagggtgtgtagaaggggcctggagtatctcacagggtctaaggaacagtgggtacatgagcagcaggaagggatgggaccaggccagccctggtcagggactccccgtcagagcactggactttacagttctcgaacctcagtcctcggcctctgtgcccttcactttacatcttgagcaggagaatcacagtggccaagagaaatccagtcagctgttgtgtcccagtcagctgtagtcagaggcctagggtcacggatcaggagcctgactgccaggggcccagtgtgtccacccagcaggtgacccctgtggctgtcggggaagcagtgagttggtgctggagcatgcctttcctgggtgtggcctgtgcattggtcaggggaggggggcctctgtcgggctgcctctgatcttcctctgtgtccccacagccgctcctctggaagagctaacaatgggaacctcctgcctccctgatacgttcaccaagctgataaacccccaggaaaacacctgcagcttggaggagtttgtcctccagctggagctgtctgggtatagtcccgaagacctgactgctgccttggagatcttggaagccattatagccacgggttgttttgggattgacaaggaggagctgcgcagacggttctcggccttggagaaggcaggtggtgggcgcaccaggacattcgcagattgcatccaggtgagctgtgctttaggttagccggatatcaccgaagcggaaattgcagctcccaggccaggtgcacactgaggatgggcttgatttggggcatagcatgctgcgttctttttaaacgttgaattagtcattaacacttgaaaactggggcatttcacatccgctttgagggtacagttgtggatccccaaaggtcacacggctgacgtggttcacgagcagccagagagaaagagatgctgctccagggcacagggctagcaaggggcagccccggggctaggagccaggcctgcctcgtgggcctgggctgctcagggcactcaacccgccagtcaggggaggccactccactcgtcccccgtcaccagcgtggaggatcccgagctccccacagaccccgcgtgtctcctgcctccccaggccct

SEQ ID NO: 15643 - DNA, 2300 bp, Homo sapien
gttgcccaggctggtctcaggcctcaagggattctcccgccatggcctcccaaagtgctgggacaacaggcatgagctaccatgccagacctagtttatgtaatattctaaatcctttgttgccatttcaatgatgttctcagcgtctttaccaggagtagattctatgtcaagaaactcaagaaaccaccttctttgctcatctataagaagcaagtccccatctgttcaagtttgatcctgagattgcagcagttccatcccatcttcagactctacctctagttctcttgttatttccaaggcatctgcagttactttctccgctgaagacttgaacccctcaaagtcatccatgagagtgggaataaatttcttccaaactcctgttgatgctggtattttgaccacctcccatgaatcacagatgttcttaatggcatctagaatggtggctcctttccagaaggttttcagtttcctttgtccagatccatcagaggaatcactataatagctatagctttacgaaatgtatttctttcttttttttctttgagacagagtttcactcttgtcgcccggactggagtgcggcggcatgatctcagttcactgcaacctccacctcccaggttcaagtgattctcctagctcagcctcccgagtagctggaattacaggtgcccaccaacacacccggctaatttttgtatttttagtagagatggtgttttaccatgttgggcaggctggtcttgaactcctgccctcaggtgatccacccaccgtagcctcccaaagtgctgggattacaggcgtgagccactgtgtccggccatcaaatgtatttcttaaataataagacttgaaagtgaagtgactccttgatccatggggtacagaatggatgttgtgttagcaggcatgaaaacaacattcatctccttgaacatctccatcagagctcatgggtgaccaggggcatcatgaatcagcataccattgaaaggaatctttttagtctgagcagtaggtctctacagtgggcttaaaatattcagtaagccacattgtaaacagatgtgctgtcatccagctttgctgttctgtttatagagcacaggcagaatagatttagcgtaattcttaagggccctaagaatttggggatgggaaatgaccactggcttcaacttaaagtcaccagctgcattacttcctatcgagagtggcctgtcgtttgaagccttgaaaccaggccttgccttttcctttgtagccatgaaagtcctagatggcatcttccaacataaagctgttttgtgcacattgaaaatctgtttagtgtatccaccttcattactgatctcagctagagcttctagagaacttgctgcagcttctccatcagcacttggtgcttcaccttttacttttatgttacggagacggcttctttccttaaacttcataaaccaacctctgctagcttccaagttttcttctgcatcttcctcacctttctcagccttcatagaattgaagagagttagggcctttctctggattaggctttggcttaagggaaggttgtggctggtttgatctatccagactgctgaaactttctccatgtcagcaacaaggctgtttttgctttattattgtttgtgtgttccctggagtagcacttttaatttccttcaagaacttttcctttgccttcacaactttgactaactttggcacaagaggcccagttttcatctatattggctgtcaccatgctttcttcacagagcctgatattttctagcttttgatgtaaagtgagagatgtccaactcttcctttcacttgaatgcagaggggtcactgtaaggttattgactggcctgacttcaatattgttgtgtttcaggaatagggagccccaggagagggaagaaaatggggaatggctggtccctggagttgccagaacacacatgatacttattaattaagtttgctgtcttatgtgggcatggtttgtggtgccccaaaacaattacaatagtaagggcaaagatcactgatcacaggtcaccatcacagatatgataatcatgaaaaagttgaaatattctgagaattcccaagcgtgacagacacaaatcgagcacacggtgttgtgaaagtggtgcccgtagactctcttgatgcagacttgccgcaagccttcagtatgtaaaaaacccaagaacacaatatccgtgaagcacagtgaagtgaggtgcgctgttgaagttgatggt

SEQ ID NO: 15644 - DNA, 2300 bp, Homo sapien
gctcctcccttcttgaagctgaaagatccagtatcacactttgatttttgcaaagtgggagtcacacattttgcttggcagaattatttaatgccaagagtaatagcacttgtatttagaaactttcatgggtccagacgtattttagaacagtgtgtttcatagaatcctctggcattcagcagtgagctaggcttttgccaatttagattttaataatgccctaattcccctgcattttatatctagataaaaatttgtgaaccagcatgaatttgcaccagagtttttcaggcctgacaattggtgaatttccatccctttaggtgttcatgagcagaaatggcaaaggcttattgagccccagtaatcaggcattgattgtcccttcattcaataaacatttgaagaggttctacccccaggatgaggggaaaagcgtcatataatgagatgcaatcatcttttagagcaggtgctgcatgaacattagcctgcgtaagaatcacctgagcagcatattaaatgctgattactgggccctacctggagagtctgcatttttcacaagcagacttgtggtgctgctgttatttatatgagagaagctttgccttaaatattgttagtttcaagggtccattcaaacgggtgaccttgggcaagctacttgtaacctccctgaatctcagtttatttctaagctgagaactccactgccaccaccatatgggccaaggtgaagttgggcaaggcgtctcaagtaaagttccagctgctgtgggtgaggccctgagctcccactgccccgggccccaccggccatgccatcaagccgaggtctccaagcatgctaggagagagtctttgagagtctgcaaaccttccctcacctatcaagcagtgcttttagtggtattttatatttctttgcaagaaatgcaattttctgtattacagaataactggatatcatttctcaactccattagcaaacctcttgagcacttaggagacatctggctgctcctggagccaggtggggcccaggcctgctgcgtgcagtgcatctcagcaatctgtctgtacaggcccctccgtatccctgccaccaccagcaagggcagtcgtttctgccaccttggccccagcatctcccggggctttccaggaggcaggaaggcctgggtttcccctgcgctggactccctgagcctgccgggctctctcgactgccttgcctgccttctgtcttcagtgaattcagcctggcatagaccctttccttaggtcacccaccagcactccaactctcttcctctgttccctctgactttcttgtatggatattttgtacgaagaggtcttaccaatctcagacccccgcagtggccggggagccttttcacaggcagggaatccactcttcttccccacccagccagaggtagtagccaccagagctgcagcaggaaggcgtgattggtcaccctgatgtttggttttccaggcgtggtgcgctgcccgcgcgtcaggaagaacagcagcacagaccagggcagcgacgaggagggcagcctgcagaaggagcaggagagcgccatggacaagcacaacctggagcgcaagtgcgccatgctggagtacaccacgtgcgtgtccgtcccaagcgcggccggccaggactgggctgcggtggtgctcatttcagatgcctgcccgcccttgtctggcttaggatgtcaggccagacggcctgtgtctccggtgcagaggctgcagatggctggctccagacatactttatttagcccacatcttgtttttaaaaatgtaatcggttgtcaaaatttattttgggaattttatataaaaatctggatttttgacttatcttgcaaaagtgaaaaccagtcaacacttagggcccccaagttcttcattgctacctgtggggtgtttttctggaaaggtgaaagttggttataaataaatgtccctcaacccatgccatgggctctctttttcggtgatgaccaagaagggctcttttctgttgatttcctgtcttttagtggaagccgtgaggtggtggatgaaggcttgatccctggagatgggctgggtgccgcagggctcgattccagcttctacggacacctcaagcgcaactggatctggaccagctacatcatcaaccaggccaaaaaggtgggtgtgcgtcacaccggactacaatctcaggggtcctcgctactcaccctcctgtccctccctgcctgaccagagacacaaatact

SEQ ID NO: 15645 - DNA, 2300 bp, Homo sapien
tcttcaggaaaatggggagaatattacccatctcctaaggtttctgtaaaaattaaataacatgttgtattaaggatcttagcacagtcctagctattcctcattccctacctccaattccacacttcagccacttacttcacatttgctgttctctgtccaacagtcctctttgccaactggctgcctaaatccaacctttaagttttgtctcgaacattattttattttatttttgagacagagtctcactctgtcacccaggctggagtgcaatggctgaatctcagctcactgaaacctctgtctcccaggttcaagtgattctcctgcctcagcctcctgagtagctgggatacaggcatgcgccaccacgccaggctaatttttgtatttttagtagagatagggtttcaccacgttggtcaggcgggtcttgaactgccgaccttgtgacccatccacctcagcctcccaaagtactgggattgcaggcatgagctgctgcacccggcctgtcttggacattattacctcttggaacctcccctgaccctcacaatatggcttaagagcacagacgctgaaaatagcctgggttcaaatcaattcttagtcacttattgcccccagaaccttaggttacataatccctctctgtgactcagtgtcttcctctgtaaaatgaggacgataacagcacctacctcataggtgaggatcaagtgaatttaatctcctgtttaacggagtttaatcaagtgaggatcaagtgagtttaagctcctaaagcttctagaatagattcttagaacagcaatgtggccgggcgccgtggctcacgcctgtaatcacagcactttgggaggccgagaggtgcggattgtctgaggtcaggagttcgcgaccagcctggccaacatgatgacaccccatacctactaaaaatgcaaaaattagccgggcgtggtggaacatgcctgtaatcccagttactcaggaggctgaggcacgagaatcgcttgaacctgggaggcggacggaggttgcagtgagccaagatcgcgccactgcactccagcctgggccacagagagagactctatctcaaaaaagaaaaaaaagaacagcacctcacccatgaagtccctgataaatgtcagcttttagcattatcgctaattgtcctgatacgcagatctcgagttgccctaggctatctgcaccgaatgaatataccatgagggtctgttgatctcaggagtctccagtctggctctaaagtgtctttcctgctctaatcctatcctccaatgtaaaggaaacattcttttaagcctgaagaatatccccaatcctgttcgccattaccccaaaacacacacagggacaaaacgggacatcactagattctccccctccccccgccaactccatcggactccagggccctgccaggcctgagggaccccagattagccttaccgccgtgccccaactcaatcaacaggcctccggtacttgcacagccccactccattcccccgccctgcccccagctccatcagcccccgggccctgcgcccgcccgcccgcccgccaggccaggccgcccgctgaccggtcctggagctgtaggtcgggtcgctcccgaggctcctcatagaagctgatgcccgggtgcgtggcgagggcccgccagagaaactcctgcgtgcagggttccaaaggcagcgggaagggcggcactcgcgtctccagccggctccacagcgctggcagacacaggccatcgagcccctccagagcgacttcgtccaacaacgactccagcgcgtccattgctacttcagtcggcggcgcccggggcgcatgcgcaacgcaccgccaagggccttggtccatcgcgcctgcgcacaacgatccggggcccggggaggtgggtcagacccagggttcggaggaggagttccagcgcgccggcatgacgtcactccccgggggcgggctcagtaagtggagctccaccgtcattggtccggggccccgcagtaaccaggggaactgcaaacagtgtagaggccgcttccggttcgagctcccggaaccgccgcctctagggatggacggtgagtgtctgtgggcccctccgggaggtcgggctgttattctcccatccctcccgaccgcgctttgggcagaatcctaggccatgaacccctggaccaccacttcctgacccaagggggtctccgaaatgagggatagggaggcttagtggtctggaacgcggaggagag

SEQ ID NO: 15646 - DNA, 2300 bp, Homo sapien
gttgttggagtttttttgagacagggtctagctatgttgcccaggctggtcttgaactcctgagctcaagcaatccacccacttcagcctcccaaactgctgggatcacaggtgtgaggcactgcacatggccaattattattatgattattatgagccactgcacctggccaattattattattattattgggtttttttgagacagagtctcgccctgttgcccaggctggagtgcagtggcaagatctcggcttcaaatgattctcctgcctcagccttccaagtagctgggattacagacatgtgtcaccacgtccggctaagttttagtagagacaaggtttcaccatgttggccaggctggtctcgaactcctgacctcaagtgatccacctgccttggccttccagagtgctaggattacaggcacgagtccatgcccggcccaatttttattatttttaaaggaactaattaatggacatcttaagattttcccagtttaaatcttcgatatggtaaatatcataaatataaataaacaaagctctttgaggtaagagcatacaggggtcccaaggcttaaaaggtttgaggactgatgttctatagcaacattacattgacctttccagaaggcaaaatggtaaagcacattttatagtacctctaaagtacaaagggaaaagatatattttaagcatatgacagaatgttcaattaaaaacattttctccacactacattcagtgaatataaaaagaatgtggattccccaggaacaaattcccgagaagtgagggacagtgctgtaattagaaaaatgatctggactctagcccagaccctaccagtctctctagactttagtcttcccatctgcaaagtgagatatcagaatagcctattttccatttgcttccaattgtcaataccatgactctaatcagggatccctaaatgggggcccacaagctgtctctggccttcagagtgactggccaaccctgtttttgagaagtaccccaagaggacaatcagctggtgcttggtgagcagctttcctttcaggtgaggaattgattttcagttacagcctcaatccggctcactagactctcctctgcagacatctgcatttacaacctctggaataaagggaccctcaaaaccggtccaaatctcaagctccataattcagctccagagacagggtgtctgggtttctcactcactctgctacatgctggttgtttgactttgggcaagttccttaacacctctgagcctcagtttcatcatctgtaaaatggaacaacgctgaactcaaaaggctggtatgaagcttagcgaggtgttgcccaagagtacttacagagttcttggtactggaaagcactttgttaaagggagctattattattaacgccaaggcacagaaagggagtatttcctaaactcccttcaccccccacaccaattccctttcccagcacctgacgattgcactcccacgatcaagcttgttttcatatcaactcccaaatccgacagttccacatcccaacattcacaagaccctcctcagacctctacttctccttccccaccctacatcccttcactgagctcccggccagtaccggtttccttcacgaccacagccgagcagaatggtcacagcactgaccactcccccaggctctcctccgcgttccagaccactaagcctccctatccctcatttcggagacccccttgggtcaggaagtggtggtccaggggttcatggcctaggattctgcccaaagcgcggtcgggagggatgggagaataacagcccgacctcccggaggggcccacagacactcaccgtccatccctagaggcggcggttccgggagctcgaaccggaagcggcctctacactgtttgcagttcccctggttactgcggggccccggaccaatgacggtggagctccacttactgagcccgcccccggggagtgacgtcatgccggcgcgctggaactcctcctccgaaccctgggtctgacccacctccccgggccccggatcgttgtgcgcaggcgcgatggaccaaggcccttggcggtgcgttgcgcatgcgccccgggcgccgccgactgaagtagcaatggacgcgctggagtcgttgttggacgaagtcgctctggaggggctcgatggcctgtgtctgccagcgctgtggagccggctggagacgcgagtgccgcccttcccgctgcctttggaaccctgcacgcaggagtt

SEQ ID NO: 15647 - DNA, 2300 bp, Homo sapien
ctatggcctcacagacatggtaagatcccaagccattaatatatagtaaaagtcaaaacaacaacaaaagggcaagaagagaaaatgattcctgaaatggtttcctaggagagccactacagttgaactcagagtgtagcttgagctccccagcccccagggcaaatagggaaaccagtggctctcctagttttcacagtggaggcagacctgctgctgctagtaaggagaattcagcttttcctggtccaggtttcagggaggaacagataacaggattctgtgtacttggaacaccagcagtaccttcattcattcattcattcattcagcaaagagattcaccctctacactcttttacacaaatggtgacctcttgtacctactgtcctgaaccttgtctctgtagcttagagactcttctctgtatatacagacctgcctgatccggccatatattatacatattattccatggcatggatatatatactggaacttatttacccattccttttttgctcaacatttagcttgttttctgatgtcttgttgccacaaccacgctgtagtcaatgtcctcatacacaagactttgggcacactgatacgcattttagacatgagttacaaaccaacccagtactgtgagcttgtcatcagtgcctcaccaagtctccttccctcgtctctggtgcagattatggacgaagaactctgtttcgagaagctgaagaagccttaagacgcagttcacggacagcccccagtaaagtccagcgccgaggatggcaccaggtctggagactgtggccccagcccacgctttagaatacagagtgtgggtggctgtgggaatagaaatacaatcagagcatttaaaacccccatgggccaggcacagtggctcctttatgcaatcccagcattttgggagggtgaggtgggaggatcactttgagcccagaagttcgagaccagcttgggcaacaaagtgagacttcatctctactaaaaataaaaataaaaaattcgccaggtgtggcagcacgtacctctagtcccagctactcaggaggctgaggtgggaggattgcatgagcccagaagtttaagcccgcagtgagctacagttgcaccactgcactccagcctgggcaacagagcaagagcctgtctaaaaaaaaaaaaaaaaacaccctatggggagtaggtgggtctggctgggcatggtagtgtgccctttctgcatgtggaactgacctttggagagaccgctctgctgcacggccctcccctttggatgtggccactccagccccacttgggggtataggaaggtcagactcagagtcccatcatgatgactcattcattcagctatttttttattgagtacccactatgtgccaggcacagttctggatgtcagggatacagtgggtgcatatgacaaagcccctgccccatggaactgagatgccattttgggttgcagctggtgtgctgatgtcaggagcttgcattttggagcatctaccccaggtaccacacgtaggctcagctcccatgtaactcgtctcctttgccctcccagcagaactgtagagtatgttccaatattgtccctctttataaggagctgaagagatggaggttcagaaaagttcagtgagttttccaaggtcaacagctaagaagtggcagaatcaagagtcagtcttagatcttttgccccaaattctgtgttcttgctcatatagttctggatattttacctcatagtcactcataccttaccggggaccagcaggtcccagccccgtcaaatgaagaatgacgaggttcacacacttggaaaggaaagctttatttctcagaaagggtggcagcctccctcccgggtggccattccggcaggctaggaaacacagcctcaggccagaagccagaaaactgcactttgaagttcagagggataagacggatttatgctgaataggtggcgcaatatacatattcagtaagctgtaggaggagttatgaatatttatgaaaggagaaatatgcgcatgtgcagttgagcttcatgcctctccatggatcccatcgtcaaaaaatggcggcattagcaggatctgagggtggaggttttggccttctgatgtcaaaaggcgaatcgggagacacggaaaccctcactgtgcatcctctatagaggggtcagaaccactccatggtcagtggtcccttaccaggaagaaatgctggtcagttgtgtagtaaccacagaagggag

SEQ ID NO: 15648 - DNA, 2300 bp, Homo sapien
tggaaaaacccaaaccaggggacttttctcagccccagccgcctcctcttggctttctacaatacctattcactctccagtgggacaaaactcacagctgctcccaaacgcgtccacgctggctcgacccagtgccttggcacaggctgggcctctgcttgcttgcaattctcttcttaaccttctcaatctggggaattcagttaaatccaagtgccctcagctacttgcagtccccaagcttggtgcctacctcggtgtcccacgatcatctcttttcacgtccatgtcaggcccccattcagccgtgagctcaagggaaggggttgtgtctggttattccagaatcctaggcttttagcatagttccttggcacatggaagatgccaaaaaaaaaaaaaaaaaaagaacaaaaccctttgtgtaataaataaatgactacatgaatgcacacacatggagtgtgcctcctaatgtctgccctttcattaaagctttagggaggagactgtaggccaggtgctgtggcttatgtctgtaatcccagcactttgggaggtggaggcaggtggatcacctgaggtcaggagctcgagaccagcctggccaacacagagaaaccctgtctctactaataatgcaaaaattagctgggcgtggtggtgcatgcctgtaatcccagctactcaggaggcggaggcaggagaatagcttgaactcgtgaggtggatgttgcagtgggctgagatcgtgccattgaactccaaactccgtctccaggaaaaaacaaacaaacaaacaaacagagaagagactgtaagctgggtctggcttacacaggtatttgtttggttcatccagtgtaaacaacaacaacaacaacaacaaagcaaacacaaattcattgccaacatttaaaaatggggagattcagacaggtgcagtggctcatgcctttaatcccagtgacttgggaggctgaggcaggaggatcacttgaggccaggagttagagaccagcctaagtaatatagagagaccttgtctctacaaaaaaattttaaaaattagcaggatgtggcagtgtttgcctatagttctggctactcaggaggctgaagtggtaggattgcttgagcccaggagtttggtaccactgcactccagcctgggcaacacagtgagaccctgtctctaagaaaaaaaaaaaaaaaagaaataagggctgggtgcagtggctcatacctgtaatcccagcactttgagaggctgaggcgggtggatcatttgaggtcaggagttcgagaccagcctggccaacgtagtgaaaccccgtctctactaaaagaaaaaaaaaatacaaaatttagttgggcatggtggcgggcctctaattccagctactggggaggctgaggcaggagaatcgcttgaacccagaaggtggaggctgcagtgagccaagatggcaccactgcactccagcctgggtgatgaagtgagactctgtctcaaaaaaaggtggtggtggaggggggagatttctccaaacagccagatttctgacccctctgcagactcggaagacatggcagctcaggagccctgatggccgtttcctggagccaagagtgtgcagcccttgaagcccgccatttcccagggctccagggtccccaccactccctactgcttcatatccaccttgcttccctcttctgccttggcctggcccctgtaggcattgagtctgcagtccttgtttaggggctgagcagcagcagcaagtcccatctgccaataagcaacctctgcaggcctgacactggctgagttgtcccttttatctcaaaggggcatcaccctgcatttgagaacatctcaacagactccccgtcaccaggaacgtgcctgctacttgacagagccagggagggaggattggctgatctggggttttattggcccccaggagatggaaggcccaggctccagctgcggtggaggacaaaggggacttgttttggtgacaatggtgcctttcaggagggaggaggtggcttttgttaagggggaacgatgagttcaaggggttctgacttattctggcaagtttctccagctctacaagaacttctagtgctctgggcagctgcgaggggtcaagaaaccacatccccaaatccagcgggtgagtctcattcctttgctgagtgggggcctaaaatggggcactgtggctgcctgacaaaggaagagactgatggctgacccttagatgtgggctaggggactgtaa

SEQ ID NO: 15649 - DNA, 2300 bp, Homo sapien
cctgagaaccgaagggccattccatcccactcagcggccgtcctcttctggacacctggttccagaattgcttgggactccagagaatatcttgaataagagccttgactagggaatcctacgccccacagccagaccggtggcaacaacctgctaacagagggagaatatggtctccaagtggccactctgtcctgacgacagcctccttgctgaccatggttcctggaggcagagaggcatgagtttgaatctagactatgccactacctaggtgtatagagcagttgcttaatccctcagaagctgagttttgttgtctgcaaaacgggtgatacgttgctaccttgcaggctgttaggaagattcggggatataatccacataaatttttgtgtctaagatcagattatctagaggcgcagcataggatgaggatttgggtgcaaagtcattggtgaaggaaatgctccctggggagactggtaagggaattgaagctgtaggacagggaagggagaacagaaagcaaggggtgctgtcaggccagtctgaccccatgggggctttgtagtgtgggtcacagctcagagttgtcttagccagagccacaggacaggaccctgctggtcagtcatgcattgatggcggctaagagagaaatataagttcccattttctgaacaaagatagaaaaaatgggctctggttgcccaaagacaatcctccaaagacagaaactctaaaaagagagcctaggagattgggcgggacatcaacatcctcctttttgacttggctcataataaagacctcataactgtcagcccttattgtgacaattataacgacaagaacaatcgttattgttattaatttccttggctggagtgggctgaaactctcagacggatgctcccgagcccagtaagaagataaggaaataaatctagcaatctagctggaaaagcacaactcggctgggcacacctataatttcagcgctttgggaggccgaggcgggaggatcacttgaggctgagagttcgagaccagcctgagcaacatagtgagaccctgtctctacaaaaataaaaaataaaaaaattagctgggcatggtggcacttacctttagtcacaactactacggaggctgaggcaggaggatggcctgagcccaggagttagtggctgcagtgaactatgatcatgccactgctctccagcctggacaaagagcaagatcctgtctcaaaaaaaatctatatatctgtatatctatctatatctatatctatatctatatctatatctatatctatatctatctaagcacaagccagctgggtgcagctcaggcctgtaatccctgcactttggaaggccaaggtgggtggatcatttgaggtcaggagttcgagacaagcctggccaacatggtgaaactcaatctctactaaaaatacaaaaattagccgggcatggtggtgggtgcctgcaatcccagctactcgggaggctgacgcaggagaattgcttgaacctgggagatggaggttgcagtgagctgagatggtgccactgcactccagcctgggtgacagagtgagagtcggtcttaaagaaagaaaagaaaggggggcggggagagagagagacagagagagacggagaaagaaagaaagaaagaaagaaagaaagaaagaaagaaagaaagaaagaaagaaagaaagaaagaaagaaagaaagaaagaaagaaagaaagaaagaaaggaaagagagagagagagagaaagaaagaaagaaagaaagaaagaaagaaagaaagaaagaaagaaagaaagaaagaaagaaggagaaaagaaaagaaagaaagaaccacaaccccgccaggcatcggggtacccgtgcctatttccccatggttaagttacttccggagcatccccacctccaagctctggcccatctcccatcacttctgaaagagcagagctgggccctgctgtgaggagaggggcgggggaagcgtcctggcccggggcccacgtgggcagggttgaacgcaccccctggggtgtgggggctgcgtgggggaggcagctgagtcagtgagcagcgccatgatgaggggcagtccctgccagcaccaacaggggctggaaacccagcgataggagcatcagcatctccgaggtaaagactgttgggttggggatgaaacctcctgggggcggccaccctcctgcaggctcagcgctctctgaatttcctgctttgctccccgctgcctggtgg

SEQ ID NO: 15650 - DNA, 2300 bp, Homo sapien
agttcgagacaagcctgaccaacacggtgaaaccccgtctctgctaaaaatatgaaaaatagccaggcgtggtggcaagcgcctgtaataccagctactcgggaggctgaagtatgagaatcgcttgaacccagaaggcggaggttgcagtgagctgagattgcaccactgcactccagcctgggcgacagagtgagactccatctcaaaaaaaaaaaaaaaaaaaagatgctactggattctttacagctgtttggcgatgatgtattttctctgtcaaccaatactctcaatgccaccattatcacatggaggtcctctctttcaaaatagttgagaatctcttgcacagtgccagaaaagggctctaaaagcaagtttggagacccttggccatccttcgtgcctgctcttaccagggacgttgcccacaacgttttcctctcacctaccccccggcagattagcagcagctgacagtgggtgccggctcacccacaggagtaaggcaattcataatcggttaaccttgaattctgcaaggcctgccactcggcaagccgggggttgtcggagcagttctcagcttgggcagaattcaaatgagctcttataatcaacatgcaattaattgttgcacgccctgagcatctgggcagtaagtgctgtgcagcgcgaagggagttcagggagcgtggtcatcttagagcagaggtggggacggggttgcacacagtttccacgttgcacaggagagcctgaagaggtttgtctgagtttggtcaactgatcttggttcagatgtcagtaacagtgaattattaattgagtctactgtgtgccaaatgctttttgcagccatgatctcattacagcagcccactgtgatataccttgaaggggggggggtcctcccttttttatagttatggaaattgaggctcagagagggtaagtgacctgttcaaagccacacagctggtcaagccctagatatgcttgatcccaaagtcagtatgtttggccaccctgcccccacccgaatcttgaagattctacccacattcacatggtgtgcatgtgagcagggttggcagcccctgtagggcaccactgcctggtagctgcaataactttgtggccggcatgggccctcctagggttctgctgtttgggatctcaggtgggtgcagtgggctgtctggggtaccctgttgccactcttcctgcagttgcatgccatggttgggagcccagatgacagtttcatccttggaggggagctcttcccagatgctggaggtgacacccaggagacagaaaaacgtttcaaaccctataacccaatactccaggaggggcgcctcctgacagattctgccactccaagtccagcatgggttgtcttatccagggggtcttgcagctccctggctgtgggaagccctgcaggctctgctgtttagaacctttggaaaaactcctttctcagggtctggtgcgggggtccttttggggatccccttctgggacagggtcctgctggtccgtgtccctcttggggagccccagcaggctctgcccttgtctcctggggcagggcctctctgggtctcatgagatgcccgctcccggcgggttttgttgccccacgtccgccgtggggatcttttctcaggagcgccttgcctgggattctccttgcgtctcagaccctcaccctggctcggatttctttcgggggcgtccctccactcccaggcccccgcccgcgcccggcgtggcggccccctctccccgtgcgggcgggctccggaacagtgtcgccggccgcctgcaggtgtctccccacggaggggcgcgcgtccctgcgccgtggccgctgccaggcgccagcggctcctagccgaggtgcactcgcgctccgggctccgggcgcgccgtagccgctcctccaccgccgcccgccccgccagcccgccccgcacgccccccgcgccgcgcccccaccccggggttggggggggcatgggcccgcgccgcgtccgccgccgccgatctcaggcacccgagccccggggcgcggcgggcagcggccgctgacgcggggcgccagctgccaacttcgcgcgcggagctccccggcggtgcagtcccgtcccggcggcgcgggcggcatgaagactagccgccgcggccgagcgctcctggccgtggccctgaacctgctggcgctgctgttcgccaccaccgctttcctcaccacgcactggtgccagggcacgcagcgggtccccaag

SEQ ID NO: 15651 - DNA, 2300 bp, Homo sapien
atgggatggaattgctgcaatctcaggatcaagcttgaacagatggggacttgcttcttgtaaatgaccaaagaaagtgggtttttgagatggaatcaactggtgaagatgctgtgaacattgttgaaataacagaggattagaataacacataaactcagttgatgaagcagcagcagggtttgagaggactgactccaactttgaaagaagttctactgtgggcaaaatgctatgaaacggcaccgcatgctccagagaaatatttcatgaaaggaagtcaatcgatgcagcaaacttcattgttgtcttattttaagtaattgccacagccaccccaactttgagcaaccaccaccctgttcagtcagcagcagtcactttcaaggaagacccttcaccagcaaaaagattaccgctctgaaggctcagatgattgttagcatttttagcaataaactactttttaactaagatatgtacattgttttcttagacataatgcttattgcacactttatagactatagtgtaaacaaaacatatgcattgggaaacaaaaaaattagtgtgccttgcgttattgcataatttgctttattgtggtggtctggagctgaacctgcagtatctctgaggtatgcctgtatatccttccagacttttttctctttttatgtaataagtaataactaagtttgtagatagctggagatatagctgcttttgcctaacagtatgccttcattttcctttacatatgtacagcaacttcagattgtcaaaatgtccagtggttttttttttttttttttgtgaggatgtataataattttcctattgctagaaatgagttccttttatgtccatcttacatatgctagtgggcctgaaggatagattcctggaagtggaattactgagtcaaaggttatatccatgttaaaactggacagattctattatgttatcctccaagtctgctatattactagagcatatatgtgtttattctttgaatttttttgtagttttagtcatacataacattttatacatttttaaacagtgtattgttttaataacaatgtgttgctttccataaatttatgttgtatttataattataactttgaaaatagtcctatcccatcaggaatatgtttcattattttcctagccattgctggacttctaggctgcctcccttaaaaaataaaaaattataaagaattctgaaatgcacacattcatgaatgtagctttacccttttaggtaatcttcttagagtaagtattataggttataggtaatcttagagtaagggttaaaggttaggaatattttgtgactttgggaaatcatagtaatttttttcccgaagtaattctgcctgccttgactttttggtgtgctgtttttatcttagtcttaccagcattaggtcccatctgtaacacgtttttctcctttgctaatttgaaagcaacagtggtaattgaaccaagtatttgataggcatgctgaagggaaagcagtaggagagactggcctgagtgttaaggcacagaagagtcgggggctcggggagatcttggctctgctggaacaattagtgaggtgaagaattctaggacctggatgacatgccagggagtgtgatttaatagctgatagggagccactgcagactctaagctgagaagtgcctgagttcaaggctgctggtgactgtgaaggaggaacgggaggaggtgataatggctgcggcaggagctgtggacatgacagagaagatgggcttctcttgtagtcatcataggaaaaattcttgagctagatagggcctaggtggtgtaatttggaaaccaagaatgacacatagcttgtggctgcctcagcaaagttcgaatcccagtcttacagggatgtggtgagctgacgtgccctcttccctctgcaggtccaagacaagctgctgctatctgcgtgccacttactggtctcactggccaccaccgtgcggcccgtctttctgatcagcatccctgcagtgcagaaagtattcaacagaatcactgatgcctctgccctgcgacttgtcgataaggtgaggccccagagctcccccggggtccccagggctgtgtgactgagacccaaggaagctgaggaagaagagtctggcctttgattttgtactcagagcttacaggctgtaccagcatagacagatttcttattgtgtggcactgacacagactcagtgattctcatcgtgcccattctaaggcaggca

SEQ ID NO: 15652 - DNA, 2300 bp, Homo sapien
aaatagtcattaattcatttaaaaatatctgtgatgaacccattacatattaacagataatatgctttaataaaaaataactatatttttcaaagcaaacagaaaaattcactgagaagagtggtgttgttttacagttttgcaaatctctaacatgtggcttagtgaaaggcagcttctgcatttcatctgttgcaatatcccatgtgatgtagcctctggaaagctccattgtacacttggagataatgaaagtgaaaaaggaaaagaacatcttagtattcctttaaaaatagttttgaatttgtggactcccttccccgtaatcaacagccattttaatgtagataacctctgtcttctgtttggtaacatgttcttgtaagaacttactgttttgtgtccatgtattttaatatgtaagtggtatagtaaaactgtcattctgtttcttacttttaatttaactgtatctttttaaggtctctccaagctgttgcccgtctgtgccttagtcctctacttctgctcactgtgtgatatgatacctgactctgcattccctatcctctcccgccaaggaggaggccagactgcctccagctctccccctcacgcctgtcccttcatggacccgtgtgagggttgctttgggagcataccaggagaatggtcaggtgaaaggatatgtgaatgtttaataggactccagagtgccaggtcctcctcagaatggcccttcttcctgcaccgccttgtgaaggttcctgcatccattccttgtacttgacgtctggcatttgccaacattttttcagactccttttaatttgctttttctgattactaatgaatttgaaatctcttcatatgctttggagtttctttctctgaaaattgtctctccatatcaactgcctgtttttgtactggggttgttgtgtttactgatgtgtagcattttaaaaatagattttagtttttagtccttttcgatgttagaaattgtgaatatcttctcacagtctgttgtctgcctggtaactttcccttaatgtttttcattgattaggaactctttttttatttttattttttattttttgagatggagtttcgctcttgatgcccaggctggagtgcaatggcgtgatcttagctcactgcaacctccacctcctgggttcaagcgattctcctgcctcagcctcccaagtagctgggattacaggcatgcaccaccatgcctggctaactttgtattttactagagacagggtttcaccatgttggtcaggctggtcttgaactactgacctcaggtaatccacccgcctcggcctcccaaagtgctgtgattacaggcatgagccaccgcgcccagccttgattagaaaatcttaattttgttatattcctcagtattttttgttaaggttttcttttttggtagttttaaggagtctttttctctcttatatttcaaatactcttatattttcttctgttaactttaaagttttatctttggtttaagtctttacttcatttggtgcccaactttgtatgtggtgttagggatttttatttgtttatttatttaatggtcatgtatcatgcttttcaaaagcaaggtcatgatttgggggaacagtagcaagaaaacaaaaacttgagtggatttggggttttgcagccagagaataatcccatcttctcttcacttatgtctcctgggaaactgctgttgtacaaatctcactaaaactaaatttgagtcaaaacactaaagattgtatccagatccccctcactaagaatcataatcaattatcttatttttgctgtactgttaaaatttcctaattagtgtttaactttgagcatatagattttatttttttatttcataggtaactaaactgatacatatatgtatacatatatatatatatttttttgaaggagaattacttaaagtcatttgtaagagatttgatgctggatagcttaaaagcctttcttattttcaggtgacttactgagtaacctgttgcagagtcccagttcagccaaactgttgaatcagccaattcccatccttgatgtggagagtgagtatatctgttccctggctttggagtgcctggcccatctcttcagttggattcctctgtctgccagcatcaccccatccctccttaccaccatcttccactttgcacgatttggctgtgacatccgggccagaaagatggcgtcagttaacggcagcagccagaactgtgtctcgggtcagg

SEQ ID NO: 15653 - DNA, 2300 bp, Homo sapien
aaggaaaaggaggaagtaatgggaatcttttagaatatagactgataagccaaaggtctccaaatggaaagagatgcttaccaaggatcagttctatttcattgtgtgaagagaaatttcctgtcctccctacactgcatgatctgaatttaagtcagtgttagaaataggcccaatttgtagaaaacgaagataaaaattgtggagaatatacaaagttttagtgttcaagagacctgaatttatagagagcattttaaacacatcattcattgctgctggttacctagtgctgcttctgaagacacttgaatttaccttaagttcccattattgagtacttgtcctgttctttaggggtgagcttttccttgctttgtgatagggagagttatttctaagggaaaggaatgtaccctgtatttctttctttttctttttttttttttttttttttgagacagagtcttgctctcttgcccaggctggaatacagtggggtgatcttggctcactgcaacctttgcctcctgggttcaagtgatcctcctgcctcagcctcctgagtagctgggactataggcgcctgccaccacacccggctaatttttgtatttttagtagagatggagtttcaccatgttggccaggttggtctcgaactgctgacctcaagtgataaagtgctgggattacaggcatgagccaccacgcccagcccgtaccctgtatttcttgaagtgaagaatataaagtctgtatgggtgcagttcctgagtgttctgctcttccctaaagtttatatatttttttagcttaagtaaaaaaaaaaaaaaagtgtgtcagggaattaactacatttaaagttaagattaaggaaaaacttgaagtgcttttcaaattgtctgctcttttatagattgtagcaattaactcaacagataattttagtggcaacttgtttacttttatcatttctggaaattaaaaaataagtgtaatagtaatgctttgaattttgtaaaaatgattaggaagatgtaagtagtgctttgctgttgaaggcgtactttttttgtcttgtttagttaaactttcttatggtagagagactattacacgtgatagaaacagcaacttaatttgctacatgggtatttgcaaaatcctaactaatcttagtttaatgacatgtatgtatggtgttgctctgctatatttaatcatgaacttttctgaagcatgcaaagtttagaagtgtaaagttgatttaacaacatgcatattgaaaagacatcacaaattgatttacacatcttaatcactaatacagatataatttatatacatacacacacaaaacttggctactagacaaagtaacaaaggctgtgttaggaatctggacatgtataaaaattgtcatgttaggtataaaagaccattgttttctagctgtttttaagttcatggtattagaattttgtccataaaatatgatgagaatgtattttgaatggttaaaaagagctacctaaatatcctctaagtgatgtttcttttttttttttttttttgagacagagttttgctctcggtgcccaggctggaatgcaatggcacgatctcggctcaccacaacctccacctcctgggttcaaacgattctcctgcctcagcctcccaagtagctgggattgtaggcatgcaccaccacacccggctaattttgtatttttagtagagacgggatttctccatgttggtcaggctggtctctaactcccgacctcaggtgatccgcccgtctcagccacccaaagtgctgggattacaggcgtgagccattggagctggcctctaagtgatgtttctgaagtgttgatttatgttcatgtaagattaaacacacacagatgcttcatagctttaatgctactgagtcctctttgtactttattagtccaacactctgctcagaacatgctttttcctggcagttgatccagtcccctgtgacaaccccccttgggctgatcatgttgaagacaacttcagaagagctggcttgtccccgtgaggacctcagtgtggctcggaaggaggagttgcggaagctgctactggaccaggtgcagacagtgcttgggctactgacaggtgagcagtatggtagtgcccagagatagaggcctgcccgcaggcacccagagttcaggccttggcactcagcagctttgagcagttgtttgcgctgtttctgagatagcatgaaaatgggaagctgcgttcccaacacc

SEQ ID NO: 15654 - DNA, 2300 bp, Homo sapien
gcaggtcaaggtgactaagggacagcatgtccagaaacatgatggtagccccgtaatgcttgctgccttgtgggttctggctgatgccatcagcagcctcaggaggaggaaaaccgtttctaaccaacgtgatgtgtggacagggctactcgccgcaacactcgtcatcgttgctcttgccaccggtcgattcacttttttggtggcagtgttttaaaataaaaccaacccaaatgaagagttagccgttttgaattctcttgcatttttttcctttcctatctttgtagaattagtcttaatcttttctttttctgcctttctagccgtcattttgtgtgtgtgaacaatgtaggctccactgaagatttgtagaggaatggcgaggccctagaatgtagctcatattcagacgaagtaagttagctagcagttttaagaagatggaagggtactcttagaacattccagccacacattagcttaaataagaactttagcagtgaaagtttctctgcctagagaaatatccatagcgaggttattggcttttaggtggctgaaaacattgtcagtgtccatggtcacctcagacgcagaaaaatattgtatgatttattctttctatcttaaagaatccgctggttttgacatcatttacattatatgcagagagacatgtttaaataataataagatagcccagtcttgtctaatttcatgtattttcatagctttcttttgttgccatttaacttttccagaggagcttcttaataactttgcccagcaaataggagcctggagattctgcctgtactttctctccagcactaggaatgactatgtaatgatgtacagtttaacagtttttgaggtaagttgtcagtaattttatactcttctgaaaaggattttgtagttctattgccatatcattagcactagactagagctgtaatgtgctgggagagggtagctcagctctgggatgtcgtcccacatactgtctttatgtagttgtctggtgtttggggcatcttccatcttccacactagaaaggtaagatggatggttgactttagggttaagtaggtaggtcatttgtggtaacatgtaactattccctgcctgttatcattgataaaggaaagataattaaataaaaacattttaggaggagaaataataaccataataccatcatccccaacaacaaaaagttttatttatcacctctcttccaatccttgtcttctgtgcccccctttaaaaagcctaactgtaggccgggcgcagtggctcatgcctgtaatcccagcactttgggaggccgaggcgggtggatcaatgaggtcaggagatggagaccatcctggctaataaggtgaaaccccgtctctactaaaaatgcaaaaaaaaaaaaaaaaattagccgggcgtggtggcgggtgcctgtagtcccagctactctggaggctgtggtaggagaatggcatgaacccgggaggcggagcttgcagtgagctgagattgcaccactgcactccagcctgggcgacagagcgagactccgtctcaaaaaaaaaaaaaaaatctaattgtaatcatattgcccatgctattttgtattctacttttccccactttattttatatccccacatgtggttatgacattattcaccaaggcatgctcctgtttttgaacattgaagttgcttctgtcattatattttggtggccattagagacagtggtgtaaaaaagtttttgcacatacagctttttgtttctgttatttggcagttcttcctaggaatgggactgttgtgtcctaagatttgaatacttttattattcttattgccatattgccccaaacctttatttaaagagggattcttgtttattgaagtgataatagctacctgtgggatgaaaagcagttatttttgtgtataggttgttaacttaaaagatgtatatttgtttttcagaatctgatcaataaaatgtggcttggggtcccatctcaggataagatggaaatccgtagctgtctgcccaaactccttttggctcaccataaaaccttaccttactttatccggaacaagctctgcaaagttattgttgatattggacgtcaggattggcccatgttctaccacgacttttttactaacattttacaggtaaggatatgcctaaggaaactttatcttgtgaatagtttgtttgttgaagtgattatttccttgtcctgaagaggacttttaagattagcagtttggaa

SEQ ID NO: 15655 - DNA, 2300 bp, Homo sapien
ttgacaggaaagaaaaatagctcagggaagtctgagttatgtgaagtatgcaaaatttgtcaggtccactgagacttgtgtatgggagttcgggcacactcccacctccacatgctcggggacaattgtttaaagatattttgttccagactagctgcctcccccatttccttcaggttcctgaaatttgtgatacaaagaacaatgtataggcaatagcttatgttattttttccccctttctcatcattcctattcaaccttatgttatgcctcttttttccttagaaacccacttgaagccaggcgggagggctcacgcctgtaatcccagcactttgggaggccgaggctggcggatcacctgaggtcgggagttcaagaccagcctggccactatggtgaaactccgtttctactaaaaataaaaaaaatagccgggcatcatggtgggtgcctgtagtcccagctactcgagaggctgaggcaggataatcgtttgaacccgggaggcggaagttgcagtgagctgagattgcaccattgcactccagcctgggcgacaaagcgagactccgtctcaaacaacaacaacaacaaactacactctagtctgggcgacagagcaagaccctgtcttaaaaacaaacaaacaaacaaggaaaccccatttgtaactgccactaattggactatacttctggtgggccatcttcaagcttcgggcttgaataaaccctatacttaaatactattttctcaatctcgttatttaaggttgacaagggccattgggttacatagatttgctccaatctatgtagtaggcacacccgcgggctcaacctcagctgtttgggatagtttcctgactgtttcttaaaattagcactttcagcctggctggatgactcatacctgtaatcccagcactttggaaggctgaggcaggaaagctgcttgagcccaggagttccagaccagcccaagcatcaaaaggaggcctcacctctgcaaaaaataaaaaaatttagctgggcatggtggcgcaccaggaggttgaggctgcagtgagccatgattgtgttaccgcactccagcctgggcaacagagcaagaacctgtccccaaaaataaaacaaaataaagatgagcactttcacgagtaaagtggattggaggatgggaacaggaatccaacacattctctgcctctctcagcaccttggctatcgaagttacgtttatctcccctgtcctagcatccacagcagggcctggaatatagtcgggcaagagtgtgtggactgcatgaatgtaagctccatagggccgcgtgtcgtcacgctgccagctcgatgctccgcccgtaaaaggcactcactaaaattttagcggaatgaatgggcgaaaaaagcgaaagggaaaccacgcctttactaaaatggcagcccgggctccctttaccaagatggctgccggcccgcgtggacgcacgggcggtgggcgcagggggcggggcaagagagggcgtggtaagaaggcggggccagtgggagccgtcaggtgcagccccgccctccgccctccgcccgctccccccgctcgccccgctcgattccggattggtccggttccagcgccgcagcccggcggccgcgctgtggggccgcccggcgctcgccacttccggcgcgttggggctgttggtcgggggcggccgcgcggtactagcgggcggctccagggcgggcgcgcgcaaggatgctctagggggcggcggcagtggccgtgtgggttgaggctgcgaggacagcgcgggcccccgggcctctcccctgagccggccgcctgggccgcgcggtcgaggcctgtcagcctccgcccgttcagcctcggggccggggccgccgccacctctgcccgcggaggccggggagcccctgcctgggcccgcagcctcccccgcgggggtcgggcccgggcgggggtcccgagcagctgccctcctcgccggcatccgagcctcatttcctgctttttcagtttccttggggaggggcgggtgggtctggatgaattgtctcggggtcccccgatgaggcgacccgggcggccctgccctttttagagggtcccctcggggcccggtggggaaggggttgtctttgcatgggtgggggacttcccgagtctgccgggaccatgacctgaactgtgcgagcgggacgtgtccgaagcccaagaaccagctcatctgagccgccccctccccggccagcatggtaagtggaattgga

SEQ ID NO: 15656 - DNA, 2300 bp, Homo sapien
gaagtcaggagtttgagaccagcctggccaacatgatgaaaccccgtctgtagtaaaaatacaaaaattagccaggcatagtggcacacgcctgtaatcccagctactcaggaggctgagccaggagaatcacttgaaccccgcaggcagaggttgcggtgaggcaagatcgtgccattgcactccaggctgggcagcagagcaagactctgtcaaaaaaagaaggaaggtaggaaggcaggaaggaaggaaagaagaaaggaaggaaggaagggcggggagagaaaaagaaagaaaggagaagagaagagaagaaaagaaaagagaaaaaagacaatctagacagaggcaggaggccgacaagttaagaactgaaacaatattctcaatggtagaggttgccaacctatggtctgggggccagatttgtctgcaaagtgtgtttcatttggcccattcaatatttccgaattttgggaattcgtttcaaacatttaaaagttggaagatttctggatgtcctgcttctctttgaatatcatccagccacgcacagcccacgatgtctccagttcccctcttctccaccctctctatcactttacatgcgaccccagtcgctcatgtctgcgcctgtaggtacttgcgtttgcaatccctggctcctaaagctctggaaacagtcgggagtggctgggaggattacgctgggttgagaaaacagcctgatcaaaaacttagaagaaataggggcagtcataaaaaatgatgagttcatgtcctttgtagggacatggatgaagctggaaaccatcattctcagcaaactatcgcaaggacaaaaaaccaaacaccgcatgttctcactcataggtgggaattgaacaaagagaacacatggacacaggaaggggaacatcacacaccagggactgttgtggggtggggggaagggggagggatagcattaggagatatacctaatgctaaatgacgagttaatgggtgcagcacaccaacatggcacacgtatacatacgtaacaaacctgcatgttgtgcatatgtaccctaaaacttaaagtataataataattaaaaaaaagaatgaaaaagaaatgcttttgaagcttgaagctaaaaaaacaaaaaaaaaagaaagaaatagggaaggcgtcctattggggctttctcactagggaaagagtgagctgcagggaggagaaagaacagggcctggaaggacgagctgtccctatctcatctctgtccccatccacccacttcatccaggccaccaatttccggttatcaaacagacaatgcaacatcccttacacctgctgtacctctgcctagaatctcctttcttcccttctatccggcgagcagttcctcccagctgcactcctggactagtcactgcctatttgcagcagggatcgcaaaggcgacctcagttggatagggcaaccacccaggcccaagtttatgacctcttccccaagaagactgtgagttctctgacgtctcgctggaaataggatgcatggatggatggatggatggatggacggacggatggatggatggatggaagcgcaggcaggcaggcggacgcatggatgaatgaaatgcatatccgaatgcagaacctggatttgttttccctccttcaaacacacacaggctccgccccactagcacagaccgggacagtctggggcagtctcgtcccgcagggcccagaaagctggaccaggtgaccctctcagactcccccgagtcctctgtaacctcgttctcgccccctcgtgggctctgacctagaaaaggagtggggtgggtggggggtggggggtgggagccagctcgggagccaccggcgctaggacccagcgcggccggaagggggtgggggcgccgcgcggggagaatctgcgctccgcggcgcgcggcgggagggcgggcgcgcggcgggtgagcgcgcttgcgcgagggcgcgcgccgagcgggacggacaaaggggcgggcggcggcgcgcgagccggagggcggagccgcgggccgggcgggcaggtgcgcgctggctggagggcggagccgcgatgccgcgatggagcgcagcccgggcgggcgccggggccggggcccgagcgccaggcggagcgcgagctggagccgcagccggagcccgggccaggccgggggccgggagcgcagggccgggctgctcgtagcggcggcgaccgagccccccagcggctgaggggcttccagcgcccgccggtggccgggacc

SEQ ID NO: 15657 - DNA, 2300 bp, Homo sapien
gccgtgtgtaccacctggaaagccacagtgagaccctggaattggcccttggttgtctgggacacattgagccaacccttggtttaacctgggtgttctccaggttaggaggggaagggaaagacttgggttgctgtccctgggacaaatgggaacagaacggtgccctgacctgaaatagcttcttcatctaggctacctctcctccccagaaactagcgcctcactttggggggtacttactccctccctgtcccacagggagtacaaagtatggtttaggtaaagaccgccagtgtggcctgggtcgggcagcagagtcacagggaagatgcgattcccattcatccgctcaaacacaccccttccccgcactctcacagacaaagacacacacccgaagccccagccatcacccagggccacataaggcagcccccctcacctgtgggcacccccaaattttcccctctcggggggacttcactagaagctcagcttggccgtgggggaggggtattcacactccaaggacctgggggccaacctccaggctcgcagcttttggggggggactctccgccctcttcccccctctccatggcacaacgggctccaccaccactcctccgtggggccggggagctgcgcccgagcctcaaggctagggagtggggtgggggaagggagaggaggagggggcggctcctccaagcgagacacaaagagacgtccttcagcctcggctccatggcgacgctggggaagggggagcgcgcaacccgatacttccttccccacctgcagggctatggggacctcggtggccactcacctgccgcccctcacctgggcccggcttacctgggctggggccgcggggacgccgcggcagggggcctgggcgccgtcgcggtcttcgtctgcccggccccgggggctcagggcgccacgaccatggaccggggtgcaagcggtgccgccaggggctcagtcgcccaagtcctggagctttaggggggggatccccgaggcttcttgctggtgagagtgtctcttgctgtccccggctgcctagatttgggatttctatgtaccggagttggggggaattgggatcccctgatctaggggcgttctgagctgggtcttcttgtcttgaggtgtggagttgtaatgaccggatcttgggagggggttctcgcaatcccggcctgggggcactgcgttctaggtcttggggcgggggcccagactgaggagggggagtccttgcggtgccgtagggggcttgctgtcttctaaataccgaggaagtctccgctttccccgcaggggagtcgctcggtgtcggatccgggagggccccccctcttccccgaggctcgccggatcctggatgtggaagggggctccccgcactcctcggctgcgggggctttagtgggtcccggccaccggcgggcgctggaagcccctcagccgctggggggctcggtcgccgccgctacgagcagcccggccctgcgctcccggcccccggcctggcccgggctccggctgcggctccagctcgcgctccgcctggcgctcgggccccggccccggcgcccgcccgggctgcgctccatcgcggcatcgcggctccgccctccagccagcgcgcacctgcccgcccggcccgcggctccgccctccggctcgcgcgccgccgcccgcccctttgtccgtcccgctcggcgcgcgccctcgcgcaagcgcgctcacccgccgcgcgcccgccctcccgccgcgcgccgcggagcgcagattctccccgcgcggcgcccccacccccttccggccgcgctgggtcctagcgccggtggctcccgagctggctcccaccccccaccccccacccaccccactccttttctaggtcagagcccacgagggggcgagaacgaggttacagaggactcgggggagtctgagagggtcacctggtccagctttctgggccctgcgggacgagactgccccagactgtcccggtctgtgctagtggggcggagcctgtgtgtgtttgaaggagggaaaacaaatccaggttctgcattcggatatgcatttcattcatccatgcgtccgcctgcctgcctgcgcttccatccatccatccatccgtccgtccatccatccatccatccatccatgcatcctatttccagcgagacgtcagagaactcacagtcttcttggggaagaggtcataaacttgggcctgggtggttgccctatccaactgaggtcgcctt

SEQ ID NO: 15658 - DNA, 2300 bp, Homo sapien
tgatggacggatggctacatggatgtgatggagatggtttactatcgggaccttccgcatcctgctgatgttttgttgcttaggatatgaatggctgagcggaggctgtaaaacctggcactctgcttgggtatgaggttcttcctgccatcctgccatcatttgttttttatgttttgtcgccaaaagtgaccttgaggaaccctgggagctcaggaaggaaggagcgcccagaagcagggacagggagctggttggggaggaccagaaatcaggtttgtgaaggttccagagaggacctgtccttgcgaggagtgtgggagactgagatgggggaggggtcattggaatgatgcgggcgctacttggcattgtccattgtgaggcaccaccggggtcatcagggattggtggagagggagtataaagccccaggtttgctaagggagggcccagaccgaagaaggtttggcggatagcagaacctttttgtctccctctaattgctcctaagcctcacgctcccttgccccgcgtgtcctgttgcttccctgatcttctccgtgacctgtagctaaaccttccaccagcgcttgagaacttaatttgaaccggatcctttcccagacccctttcttcttctcctccccctcctccacctcctccaggtgcccaacagcccccttctcctttcccttcccttacttccccccttcccctccccttccccttcccctccccctccccttcccctccccctccccttcccctccccctcccctgcccctccccaactcagatccgccccggtccccgtccccttccctcccccctgccctaagccacctccacctctgtcctggccgcctcagggcaccctgaaaggatcatgacatgcggctgcgcttttggctcctcatttggctcctgctgggatttatcagccatcagcccacccctgtgagtagacgctggacccgcggggtttcttcctttttactgggctgtgtcacgcggcatgaaattacacagctcaggccttgtaatcccagcactttagggggccgaggtgggcagatcacttgagtccaggagttgaagactagccagggcatcatggcgaaaccccatctctacaaaaaattccaaaaaagattagtcgggcctggtggtgcgtacctgttatcccagttactggagaggctgaggtgggaggatcgcttgggccgaggagctggacgttgcagtgagctgagatggccccgctgcactcttgtctctaacaaacaaaatggaccaaaacaaagtgaaatgtcatttgatttgtgtcatctggtttgatgacttttttttttttttttttttagacagagtctcactctgtcgcccaggctggagtgcagtggcaagatctcggctcactgcaacctccgcttccggggttcaagcaattgtcctgcctcagcctcctgagtagctcagattacaacgcctggctaatttttgtgtttttagtagagacggggtttcaccatgttcgccaggatagtctccatctcttgacctcgtgatctgcctgcctcggcctcccagtgctgggattacaggcgtgagccaccgcgcctggccaaaatatatacccttaagtgtaagtttactaactttggaaagtacttacaccagcataaaccgaccccctttcaagatctacattattttatttatttatttatttttttgagacagtttctcccttgttgcccaggctggagtgcaatggggcaatatcagctcaccgcaacctctgcttcccaggttcgagcgattctcctgcctcagcctcccgggtggctgggattacagacatgtgccaccactcccagctaattttgtatttttagtagagatagggtttctccatgttggtcaggctggttttgaactcctgacctcaggtgatccgcccgcctcggcctcccaaagcgttgggattacaggcgtgaaccaccgtgcccagccaagatctacactattatgtcaccccagaaagtgaactctcactcttcccagccagtctctttcttatcataggttagcttgcttattctggaatttcgcgtatacagatgcgtgccatgccataggtactcttttgtgtctgctttattctgctcaacaccatgtttctgaaatcattaccattgttgtatggttctctaactccatcatttccatttcagactcagcatatgctgagttcaacctgttgaagggctatctctgtttaattcaccatcttg

SEQ ID NO: 15659 - DNA, 2300 bp, Homo sapien
agacaagagtctctctctgtcgcctagtctggagtgcagtggtgcaatctcggctcactgcagactctgcctcccgggttcaaactattctcctgcctcagcctcccaagtaggtgggactaaggcgcccaccaccacacccggctaatttttatattttattagagacagggtttcaccatattggccaggctggtctggaactcctgaccttgtgatccgccgacctcggcctcccaaagtgctgggattacaggcgtgagccaccacacccagcccctgttttgtttttgttttgcttgtttcttagggttgtttttctatttatggtaaaggcattggctttccatttgtagcatcaatagaatatttcctgtttacaataaccttatgtcatagtaaatggtaaagggatttaaagcagtggttttcagctcccagaggcctgagtgagtttgggcacactctgtgtgatcaggcagaaggcctgtgggaagtttagctgaggacagggccaggaaaggtgatggacagtgggggtctgtcctggtcaccagacccctgcgtcctgcccacctgcttggagctccccacccatcacacatgatgctgccaagccctctgggtattgtgggcaaataccttaggagagaagctgatgaactttgtttcttgaaatgcacagattccttggacatccctgagaggtcaatcatgaaggtcaacttggttttctccccctcatttgggttcagaatttaaagtccacacacacaggcagtaagatgattatagataaggacatcatcactcggtttcggatgttaaaatgtctaggtgggttaggggtgatttgagatcacacaaccttgtgccacaaagaggaattcccaggccagagggagacattttattgccatgttatgatcttatcattgagttgaaaggcaatcttgtttcattttggattctttcttatgtttatgtcttataagggcactttgaatttccaagcaaataataattttgaattagcttttaatcattgacttctagcacagttatatgatcagaaacgtgctgtgtgatttgattgctctcaaatatattgagatttgctggaacaaaataagtcaggttaatttttgtaaatgtaccatgcatgcttaaaatgaatgtatctacatttgttcctgagatacaggttgatggacggatggctacatggatgtgatggagatggtttactatcgggaccttccgcatcctgctgatgttttgttgcttaggatatgaatggctgagcggaggctgtaaaacctggcactctgcttgggtatgaggttcttcctgccatcctgccatcatttgttttttatgttttgtcgccaaaagtgaccttgaggaaccctgggagctcaggaaggaaggagcgcccagaagcagggacagggagctggttggggaggaccagaaatcaggtttgtgaaggttccagagaggacctgtccttgcgaggagtgtgggagactgagatgggggaggggtcattggaatgatgcgggcgctacttggcattgtccattgtgaggcaccaccggggtcatcagggattggtggagagggagtataaagccccaggtttgctaagggagggcccagaccgaagaaggtttggcggatagcagaacctttttgtctccctctaattgctcctaagcctcacgctcccttgccccgcgtgtcctgttgcttccctgatcttctccgtgacctgtagctaaaccttccaccagcgcttgagaacttaatttgaaccggatcctttcccagacccctttcttcttctcctccccctcctccacctcctccaggtgcccaacagcccccttctcctttcccttcccttacttccccccttcccctccccttccccttcccctccccctccccttcccctccccctccccttcccctccccctcccctgcccctccccaactcagatccgccccggtccccgtccccttccctcccccctgccctaagccacctccacctctgtcctggccgcctcagggcaccctgaaaggatcatgacatgcggctgcgcttttggctcctcatttggctcctgctgggatttatcagccatcagcccacccctgtgagtagacgctggacccgcggggtttcttcctttttactgggctgtgtcacgcggcatgaaattacacagctcaggccttgtaatcccagcactttagggggccgaggtgggcagatcacttgagtccagga

SEQ ID NO: 15660 - DNA, 2300 bp, Homo sapien
aaaatactagcagtggaggtgttaataccattgagactttctccttgctgttggcctctcatactttgggaaatgttgctaagatctagtttaggtaccacctccctaaagccttttctgttcattatagctcaagtatcatttttctctacctctttttttattcattacttctgtggtgacttgtgtctctatgtcattagttacacagtaaattagcactttcatttgtttttgagaggatagtgaatgtcatctttgtgttgctacaacactgagcaaaaggccttacttagtgtacacttaaaagattgagttgtatatgaagtggccctgaggaggagtcaaaaagaggatgggtgtggtgtggatggcctggattacttagttctacctgtcctgagtagggaaatacggatctcttggaaagactgggaaaggaggttaatggcctctgttccttccaaacaggccattgttgctgagcgaggatgaagaagataccaagagagttgtccgcagtgccaaggacaagaggtaaagccatggcgaggctgggtgatgggagtctctgggagcaatgaagctgtggggaggctgggtgataggagtctctgggagcagtggtgagttttccctcggtgggcacgttcaatgtggtatcgggctcccaacccaggtttgaggagctgaccaaccttatccggaccatccgtaatgccatgaagattcgtgatgtcaccaagtgcctggaagagtttgagctcctgggaaaagcatatgggaaggccaaaagcattgtggacaaagaaggtgtcccccggttctatatccgcatcctggctgacctagaggactatcttaatgaggtgtgatgcctatatttattaccaccacttattcatggttttgtacttttagtggtgggatgtataggatcttttaaaaataagctaacagatgtagttaataagtagtaccagtggtgttccaatagcaagactcaaaagtggagaagaagcctggagtttaggaaatgttacttagtttcaaatcactgttctctgtttctttcctcttcttccctttagctttgggaagataaggaagggaagaagaagatgaacaagaacaatgccaaggctctgagcaccttgcgtcagaagatccgaaaatacaaccgtgatttcgagtcccatatcacaagctacaagcaggtggggaggctagaggcacacttactgaactgggaacagtgaccccgtgactgaggcccaaagatggaattgctagtgggaggtgtgactggagcaggaagatgacagaactgtctggggtggaggggtggggtgggctgatggctggacagcgtccatgattgttctctcacttccctctctgtccagaaccccgagcagtctgcggatgaagatgctgagaaaaatgaggaggattcagaaggtgagccaaagaacctttgttgcaaataggaagtccagagttagtgttgcccttcgcctggtttcttggctgccctccagtctggcttttcaacattcaggatctttttctccctccattaccactaggctcttcagatgaggatgaggatgaggacggagtcagtgctgcaactttcttgaagaagaaatcagaagctccttctggggagagtcgcaagttcctcaaaaagatggatgtaagagccagggttagatggatgatttcctgccagaggtagttcctgagtccctgggggaaaaagacaagactcaaacccctagggttgggaggggtggaatttagtggagttgagaacaagcttcctcttacatcagagcagtgggcaaacagggatctgggcccagctctgccaggggaagctgtgtgtgttcctgcggccaaattgcagcatcactctgggacttgatggtgagtcccagcccttggtatcttgattccatgagtagctgctcttgttctactcatgtaaataaatctcgaacatgcgttagtaaggaggagacaccagtcaatctccctgtcttcttgctgatcctcttttcttccctctaaggatgaagatgaggactcagaagattccgaagatgatgaagactgggacacaggttccacatcttccgattccgactcagaggaggaagaagggaaacaaaccgcgctggcctcaagatttcttaaaaagtaaggaaagtagtgggacctagggttacactggaactggtggaaagctcttaattgtctggaaggttattgattcttccatggagtccttttag

SEQ ID NO: 15661 - DNA, 2300 bp, Homo sapien
ctacacattcttcaagagtcaactctgtgtgtgtgtgtgtatgtgtgtgtgtgtgtgtgtatacacaaagagagatacggagagagagggcacaaagtgacatctggaagataacgctataaactgacaattgtgtttgcttctagagagaaaagctgatgaacatgaggtcagggcaggaaggaaacattttttcctgtatattttttcttcctgtgtattctgttgtaccattttcattttgtaaaaatgtacacatattatttaaaataaagagagctgggcgtggtggctcacgcctgtaatcccagcattttgggaggccgaggcgggtggatcacctgaggtcaggagttcgagaccagcttggacaacatggtgaaaccccttctctattacaaatacaaaaattagctggatgtggtggtgcacgtctgtaaatcccagctacttgggaggctgaggcaggagaattgcttgaaactgggaggcggaggttgaagtgagccaagatcataccattgcactccagcctgggcaacaagagcaaaactccatctcaaaaaaaaaaaaaaaaaagatatttatggatttacagacgtacaatgaaccccttggtttttttttttaactttttttttttggagacagagtcttgctctgtcgctcaggctggagtgcagtggcacgatcttggctcactgcaacctccaccttcagggttcaagcaattctcctgcctcagcctcctgagtagctggaattacaggcatctgccactatgccaggcgaatttttgtatttttagtagagatggggtttcaccatgttggccaggctggtctcgaattcctgacctcaagtgatctgcccacctctgcctcccaaagtgttgggattacaggcatgaaccaccatgcccagcctcatattaagttttgacggtgctgggtgggttgtgagtacatagatgtccattggaatagtctttattcttgtctgttgaaatatttcacaataaaaaacaaaacggccaggtgtggtagctcatgcctataatcccagcactttggaagagcatgctcttcccttcccagcacttccctgtcccgctcccatatcaaaaccaccttgaaaaatgtaacacagtcccttgcactaaaacctctgccgatggcggctccaaaccacaggcctataaagacctgcaagatctagcatcgtctactttttttttttttttttttttttttgagacagagtcttgctctgtcacccaggctggaatgcagtggtgtgatctctgctcactgcaatctcttcctcctgggttcaagtgattctccagcctcagcctcccacgtagctgggattacaggcaggtgacactgtgccaggctaattttcgtattttttagtagacacggggttttgccatattggccaggctggtctcgaactcctgacctcaggtgatccacccacctcagcctcccagagtgttggaattacaggagtgagccactgtgcctggctagcattgtctacttttttttttttgagatggagtttcgcttttgttgtccaggctggagtccagtggctcgatctcggctcaccacaacctccgcctcccgggttcaagcgattctcctgcctcagcctcccgagtagcttggcttacaggcatgcaccaccacgcctggctaattttgtatttttagtagagatggggtttctccatattggtcaggctggtctcgaactcccgacctcgggtaatccgcctgcctcggtctcccaaagtgctaggattacaggcgtgagtgagccaccgcacccggcaggattatctacttctatactattaatgcctattaatgctgtaattacacgcgtgagccactgcgccccgccgatcttcgtgttttaaatcccgacaccaacgcgcggtaggattcgcgacgcctgcagccaaggtctcagcgcccggttccctcaggcttgtccccgcccccttatggcgcgaaggccactgggagttgtagtctcccagtgtagttagtcggcgcttcccggaagtgacgcgaggacccgccttctctctcggcgtttccgctgtcagggccctgcggtgtgactcgcgggctcagctggttggtattttttgggcctcgtgcttcgtggtgggagacccaggtcgaggtccgggtggggccggtgaggggttgggcgtcgggaggtgttggctcgggcctcttcgcgtggccggtgacgccttggctcccccgcaggtccgg

SEQ ID NO: 15662 - DNA, 2300 bp, Homo sapien
tggagatggtttactatcgggaccttccgcatcctgctgatgttttgttgcttaggatatgaatggctgagcggaggctgtaaaacctggcactctgcttgggtatgaggttcttcctgccatcctgccatcatttgttttttatgttttgtcgccaaaagtgaccttgaggaaccctgggagctcaggaaggaaggagcgcccagaagcagggacagggagctggttggggaggaccagaaatcaggtttgtgaaggttccagagaggacctgtccttgcgaggagtgtgggagactgagatgggggaggggtcattggaatgatgcgggcgctacttggcattgtccattgtgaggcaccaccggggtcatcagggattggtggagagggagtataaagccccaggtttgctaagggagggcccagaccgaagaaggtttggcggatagcagaacctttttgtctccctctaattgctcctaagcctcacgctcccttgccccgcgtgtcctgttgcttccctgatcttctccgtgacctgtagctaaaccttccaccagcgcttgagaacttaatttgaaccggatcctttcccagacccctttcttcttctcctcctccacctcctccaggtgcccaacagcccccttctcctcctttcccttcccttacttccccccttcccctccccttcccctccccctcccctccccttcccctccccttccccttcccctccccctccccttcccctccccctccccttcccctccccctcccctcccccgccccaactcagatccggccccggtccccgtccccttccctcccccctgccctaagccacctccacctctgtcctggccgcctcagggcaccctgaaaggatcaggacatgcggctgcgcttttggctcctcatttggctcctgctgggatttatcagccatcagcccacccctgtgagtagacgctggacccgcggggtttcttcctttttactgggctgtgtcacgcggcatgaaattacacagctcaggcctgtaatcccagcactttagggggccgaggtgggcagatcacttgagtccaggagttgaagactagccagggcatcatggcgaaaccccatctctacaaaaaattccaaaaaagattagtcgggcctggtggtgcgtacctgttatcccagttactggagaggctgaggtgggaggatcgcttgggccgaggagctggacgttgcagtgagctgagatggccccgctgcactcttgtctctaacaaacaaaatggaccaaaacaaagtgaaatgtcatttgatttgtgtcatctggtttgatgacttttttttttttttttttagacagagtctcactctgtcgcccaggctggagtgcagtggcaagatctcggctcactgcaacctccgcttccggggttcaagcaattgtcctgcctcagcctcctgagtagctcagattacaacgcctggctaatttttgtatttttagtagagacggggtttcaccatgttcgccaggatagtctccatctcttgacctcgtgatccgcctgcctcggcctcccagtgccgggattacaggcgtgagccaccgcgcctggccaaaatatataaccttaagtgtaagtttactaactttggaaagtacatacaccagcataaaccgaccccctttcaagatctacattattttatttatttatttatttttttgagacagtttctcccttgttgcccaggctggagtgcaatggggcaatatcagctcaccgcaacctctgcttcccaggtttgagcgattctcctgcctcagcctcccgggtggctgggattacagacatgtgccaccactcccagctaattttgtatttttagtagagatagggtttctccatgttggtcaggctggttttgaactcccgacctcaggtgatccgcccgcctcggcctcccaaagtgttgggattacaggcgtgaaccaccgtgcccagccaagatctacactattatgtcaccccagaaagtgaactctcagtcttcccagccagtctctttcttatcataggttagcttgcttattctggaatttcgcgtatacagatgcgtgccatgccataggtactcttttgtgtctgctttgttctgctcaacaccatgtttctgaaatcattaccattgttgtatggttctctaactccatcatttccatttcagactcagcatatgctgagttcaacctgttgaagggctatctctgtttaattcaccatcttg

SEQ ID NO: 15663 - DNA, 2300 bp, Homo sapien
gttttatagttttagctcttacatttagatcttgttttcattttgaattaacttttttgcaggtggtgtgatacagcagtctgtgcagaaaaaagttaacatagtagaccctaactgctaactttatttttacttttattttttattttgtttagagacagggtttttgtcacccaggatggagtgaagtggcgtgatcatagctcaccgtaaccttgaactcctgggctcctctgcctcagcctcccaattagccaccacacccagctaccttttgtacatttttttggtagagacggtgtctcactatgttgcccagtctggtctcaaactcctcagctcaaatgatctgcccaccttgacctccagagatactgggattacaggcgtgggccactgcaccagacccaggtttattcttacaccaatacaacactgtcttaattactatagctttgtagtgagcttttgaaaataggaaatgtgaatcctccaactttttttttttggagacggagtctcgctctgttgctcagactggagtgcagtggcactatctcagctcactgcaaactccatcttccaggttcaagtgattctcctgcctcagcctaccaagtatctgggactacaggcaggtgccaccatgcacagattccttggacatccctgagaggtcaatcatgaaggtcaacttggttttctccccctcatttgggttcagaatttaaagtccacacacacaggcagtaagatgattatagataaggacatcatcactcggtttcggatgttaaattgtctaggtgggttaggggtgatttgagatcacacaaccttgtgccacaaagaggaattcccaggccagagggagacattttattgccatgttatgatcttatcattgagttgaaaggcaatcttgtttcattttggattctttcttatgtttatgtcttataagggcactttgaatttccaagcaaataataattttgaattagcttttaatcattgacttctagcacagttatatgatcagaaacgtgctgtgtgatttgattgctctcaaatatattgagatttgctggaacaaaataagtcaggttaatttttgtaaatgtaccatgcttgcttaaaatgaatgtatctacatttgttcctgagatacgggttgatggacggatggctacatggatgtgatggagatggtttactatcgggaccttccgcatcctgctgatgttttgttgcttaggatatgaatggctgagcggaggctgtaaaacctggcactctgcttgggtatgaggttcttcctgccatcctgccatcatttgttttttatgttttgtcgccaaaagtgaccttgaggaaccctgggagctcaggaaggaaggagcgcccagaagcagggacagggagctggttggggaggaccagaaatcaggtttgtgaaggttccagagaggacctgtccttgcgaggagtgtgggagactgagatgggggaggggtcattggaatgatgcgggcgctacttggcattgtccattgtgaggcaccaccggggtcatcagggattggtggagagggagtataaagccccaggtttgctaagggagggcccagaccgaagaaggtttggcggatagcagaacctttttgtctccctctaattgctcctaagcctcacgctcccttgccccgcgtgtcctgttgcttccctgatcttctccgtgacctgtagctaaaccttccaccagcgcttgagaacttaatttgaaccggatcctttcccagacccctttcttcttctcctcctccacctcctccaggtgcccaacagcccccttctcctcctttcccttcccttacttccccccttcccctccccttcccctccccctcccctccccttcccctccccttccccttcccctccccctccccttcccctccccctccccttcccctccccctcccctcccccgccccaactcagatccggccccggtccccgtccccttccctcccccctgccctaagccacctccacctctgtcctggccgcctcagggcaccctgaaaggatcaggacatgcggctgcgcttttggctcctcatttggctcctgctgggatttatcagccatcagcccacccctgtgagtagacgctggacccgcggggtttcttcctttttactgggctgtgtcacgcggcatgaaattacacagctcaggcctgtaatcccagcactttagggggccgaggtgggcagatcacttgagtccaggag

SEQ ID NO: 15664 - DNA, 2300 bp, Homo sapien
gtggctctggggtgcatcccctcacctatgattaggcttgcaaaaaagaacttggctaaactttatattgtggatatctgtgtctgcctcccaccttcctgtgacttccttgatggcagatgccatgtatgaaacgctgctgaatttctagagccctgcacgttagtaggattccattttccatcagctgagtgacctgggaggcacactagagagggcacatttcttttcttttcttttctttttttttttgagacagtctcactctgtcacccaggctggagtgtagtggcgcagtctcagctcactgcaacctctgcctcctgggttcaagtgattctcctgcctcagcctcccgagtagctgggattacaggtgcgtgccaccacacctggttaatttttgtatctttagtagagacagggtttcaccatgttagccaggctggtttcgaactcctgacctcaggtgatctgcccaccttggcctcccaaagtgctgggatgacaggcatgagccaccacacccagacgagagggcacatttccaactgcattctgaaggcctggtggtgagaaagagcatatagaggtggcacagcccatagcagagatgaggccaaggacaagaagagaatgcaggatgccgctttccacctagaagaaggtaagggtatgattccttatttggaactacataaagtgaccttgctctacttctcttccccataccctccttctcccctccccagccccactttcctattccaattagggcaattctatgaaatcacagcatcagaatcttaggccttaaaatcatttagtctggccaggtgcagtggctcacgcctgtagtcctagcactttgggaagccaaggcaggtggattgcttgagctcaggagtttgaggccaccctgggcaacgtggcaaaatccagtctctacaaaaaacacaaaaattagctgggcacagtggtgcgcacctgctgtcccagctactcgggaggctgaggtgggaggatcacctgagcctgggaggtcaaggttgcagcaaaccaagatcctgccactgcactccagcctgggcaacagagcaaaaccctgtcaaaaaaaaaaaaaaaatctggtctaagcaccacctttgatggaggcaggaatcctgcagcagcctggagccaacccaatggctccctgcctctggtgctctatttcttatcaccatacaggtctctaaggtcacctttaggtctaacattgtatgaatgattgtcagcaactttccaatttttttcatatacatatattttttttattttattttttactttttctttttttgagacaggatctcactctgtcacccaggctggagtgcagtggcgtgatcatagctcactgtagcttcaacctcctgggcacaagtgatcctcccacctcagcttccaaggtacctgtgactacaggaatgcgccaccatgcccggctaattttgttatatatatatatatatatatttgtaccttggttttctcatctgtaacaccaggggttgaagtgctgtgatattttttggttctaggataatttggaaatagggatctcttaacatcttggatactgccaatagatcattcacgaaatccctttagatgagtgttatgtttacttaggtctctaaaacaatttgtaaggtcaacagatggggataagaatgacctgaagctggtcgtctttgttcgcaaccagaaacagtcctgcctcaaaaaaaaaaaaaaaaaaaagggagtaggcaggtggccatatttgtttctggcaagtgagtgctgaaggaaaggagctgaagcctcccacagtcataactggtgctggcaggctactgtctcggtcttgggcgccactgatctaaggtcacggctctgcttgctgctcccacccgctccagtttaaaacctgcggttccagggttctccagcccctccctttttcacgctccgaagccgagaaggcccaaagcgaagacagagaggacccggaagtagggaaaacctctgagcacgtgatgggggaacacgcgggtgctgtcacgtgatccgacaaacggcctctgcatagtgcagaacattctgctgctcttaaaggtacaggcctcagggtccctgctgtagacggggcgggggagagtacgatgggtggggcgtggtgggtcgtagggcgctcgagatggagcccccagcttccttgatggatcgcggggcgcgagtgccctagacaagccggagctgggaccggcaatcggg

SEQ ID NO: 15665 - DNA, 2300 bp, Homo sapien
aattatcctagaaccaaaaaatatcacagcacttcaacccctggtgttacagatgagaaaaccaaggtacaaatatatatatatatatatataacaaaattagccgggcatggtggcgcattcctgtagtcacaggtaccttggaagctgaggtgggaggatcacttgtgcccaggaggttgaagctacagtgagctatgatcacgccactgcactccagcctgggtgacagagtgagatcctgtctcaaaaaaagaaaaagtaaaaaataaaataaaaaaaatatatgtatatgaaaaaaattggaaagttgctgacaatcattcatacaatgttagacctaaaggtgaccttagagacctgtatggtgataagaaatagagcaccagaggcagggagccattgggttggctccaggctgctgcaggattcctgcctccatcaaaggtggtgcttagaccagattttttttttttttttgacagggttttgctctgttgcccaggctggagtgcagtggcaggatcttggtttgctgcaaccttgacctcccaggctcaggtgatcctcccacctcagcctcccgagtagctgggacagcaggtgcgcaccactgtgcccagctaatttttgtgttttttgtagagactggattttgccacgttgcccagggtggcctcaaactcctgagctcaagcaatccacctgccttggcttcccaaagtgctaggactacaggcgtgagccactgcacctggccagactaaatgattttaaggcctaagattctgatgctgtgatttcatagaattgccctaattggaataggaaagtggggctggggaggggagaaggagggtatggggaagagaagtagagcaaggtcactttatgtagttccaaataaggaatcatacccttaccttcttctaggtggaaagcggcatcctgcattctcttcttgtccttggcctcatctctgctatgggctgtgccacctctatatgctctttctcaccaccaggccttcagaatgcagttggaaatgtgccctctcgtctgggtgtggtggctcatgcctgtcatcccagcactttgggaggccaaggtgggcagatcacctgaggtcaggagttcgaaaccagcctggctaacatggtgaaaccctgtctctactaaagatacaaaaattaaccaggtgtggtggcacgcacctgtaatcccagctactcgggaggctgaggcaggagaatcacttgaacccaggaggcagaggttgcagtgagctgagactgcgccactacactccagcctgggtgacagagtgagactgtctcaaaaaaaaaaagaaaagaaaagaaaagaaatgtgccctctctagtgtgcctcccaggtcactcagctgatggaaaatggaatcctactaacgtgcagggctctagaaattcagcagcgtttcatacatggcatctgccatcaaggaagtcacaggaaggtgggaggcagacacagatatccacaatataaagtttagccaagttcttttttgcaagcctaatcataggtgaggggatgcaccccagagccaccaatccggccccttccgcccctgggggaagcattaatgacgccgaaatgtgtcagagctcccaccagccccctcttcactgctactctttcttcccaggcaaaacaggaaccacaaaccccagcttcctcttgcagagtggctgtggcttgtaggggaggcagaaatggctgaggtgcggatacgagacctgagtcacttgagctgctgttgccacatgtcccctccctctccccctccccagttctaaggtctcctgctcccactttgtcctttctggcctcttgcttgtcctttatttccaaatgtgcacctgagtcccctgtgtgatgtacacccatttcccgggctgcagtgggggctactgtgggcatcaggggccgtgggcagggcctggggtggggacgcatcagggagacaggggaagaggaagtgcctttggtcctggggaaggttggcttgtcttggtgggtggggacggtcattatcagctttctggacacacagacagagacagacaggatggacttcctccggctatacctccctgggctgcaccaggccttgaggggggcactggtgagaagggcagacagctgccagatacttgcaccccattccctggggcctcacttccgggcacctcccctggggcctcacctttcccctcctccttctgatctcctcaaactggagattgctttctcaggtt

SEQ ID NO: 15666 - DNA, 2300 bp, Homo sapien
gccacagctagtctgggccgcctcactctcctcccctgtgagctcctcctcaggcctggcctctggagttgcctccaagtcggcagtgccttcagcctctccatctgagggcagctcagccactggatccctgctgctccctctctcctcctgggcctcctctgcctgtaccagctcttccatcctggcccggtcggccctgatccccaagtcctgcctcatctcagcctccttaccacgcaggtctacctggccctcaaagctctcccctgcctcctggcctcccacagcttccctccctgcggtctggctctcagcagcctcttctgttctttcagtgcccaggacctggggctgtttggggaaagggctcacctcagcctctctctcctcatccccctcctcctctaggacccagacttttccagtagcctctaggagcctttctcctgggactgctccatattctgtctgtctgactcccagcaggtcagcctcctctttgcctgaggttgtccaggcctcgtcccctcctgaggctgtcccggcctcctcccctcctgaggctgtcccggcctcctcccctcctgaggctgtcccagcctccccgcctgaggctatcccggcctcctcccctcccgaggctgtcccggcctcctccccgcctgaggctgtttcagcctcctccccgcctgaggctgtctcagcctcctccccgcctgagattgtcctggcttcctccccatctaaaattgccctggcctcttccctacctggggttgtcctggcctcctctctgcctaagattccccagtcctcaggctctgcccctgggccccacgtcccccatgccctagtgctttcacaggccttctccaccactaccacctcttctcctttcccagccccttcggccccaggctcctcagtttcccctgcatctgcctccctgaccccctgctccatctcccggttgtcccctgccgcctttggcccaacagcaccagccttcccctccgtctccccatgccaggtccactctgactccgcccctctggccatccctggctctcttgccctgacctcttcctcctcctcctcctgttcccagcttctcagcctctcttctctgttcacttcctgctcatgggactcctgcctctcctgggcttggccgctcctgtcttggcaagccccagaccctgccttggatttctttctggcctccaagtgggcgcttggctcctggcacctggcagccttggctgtctccccagccccactgtcctgcctctctgcttgggacccatgggagctgccatctccccagccccaggtctgttctacagctgagctccccacttcatgtcttctgtcatctccaggccctctcagccttccagccccctcgttttggctgcctctaaggccctccaggtcctcctgggcttcctcctctacaatcttccctgtctttcccaccgccaccacccccagttcctcagccgcctgcgcctcccgctctacagtggggactgcatctcccaggaggtaggagacaaaggtgccgagggaatcctaggaaaaaagagagagagaggggagagtcattgaggagagtcccagccctttccctgggggccctggctggaggagcccaggttaaggaagagggtactgggatctgaaaggagaagaagaggatttgcagaaggagccagaaggggcatcgattaggggtacgaggacgcatggttggaggtggggactgaaattcagaaaatattaggccaggagtctgcctgaacctgagaaagcaatctccagtttgaggagatcagaaggaggaggggaaaggtgaggccccaggggaggtgcccggaagtgaggccccagggaatggggtgcaagtatctggcagctgtctgcccttctcaccagtgcccccctcaaggcctggtgcagcccagggaggtatagccggaggaagtccatcctgtctgtctctgtctgtgtgtccagaaagctgataatgaccgtccccacccaccaagacaagccaaccttccccaggaccaaaggcacttcctcttcccctgtctccctgatgcgtccccaccccaggccctgcccacggcccctgatgcccacagtagcccccactgcagcccgggaaatgggtgtacatcacacaggggactcaggtgcacatttggaaataaaggacaagcaagaggccagaaaggacaaagtgggagcaggagaccttagaactggggagggggagagggaggggacat

SEQ ID NO: 15667 - DNA, 2300 bp, Homo sapien
ctctctctctcttttttcctaggattccctcggcacctttgtctcctacctcctgggagatgcagtccccactgtagagcgggaggcgcaggcggctgaggaactgggggtggtggcggtgggaaagacagggaagattgtagaggaggaagcccaggaggacctggagggccttagaggcagccaaaacgagggggctggaaggctgagagggcctggagatgacagaagacatgaagtggggagctcagctgtagaacagacctggggctggggagatggcagctcccatgggtcccaagcagagaggcaggacagtggggctggggagacagccaaggctgccaggtgccaggagccaagcgcccacttggaggccagaaagaaatccaaggcagggtctggggcttgccaagacaggagcggccaagcccaggagaggcaggagtcccatgagcaggaagtgaacagagaagagaggctgagaagctgggaacaggaggaggaggaggaagaggtcagggcaagagagccagggatggccagaggggcggagtcagagtggacctggcatggggagacggaggggaaggctggtgctgttgggccaaaggcggcaggggacaaccgggagatggagcagggggtcagggaggcagatgcaggggaaactgaggagcctggggccgaaggggctgggaaaggagaagaggtggtagtggtggagaaggcctgtgaaagcactagggcatgggggacgtggggcccaggggcagagcctgaggactggggaatcttaggcagagaggaggccaggacaaccccaggtagggaagaggccagggcaattttagatggggaggaagccaggacaatctcaggcggggaggaggctgagacagcctcaggcggggaggaggctgaaacagcctcaggcggggaggaggccgggacagcctcgggaggggaggaggccgggatagcctcaggcggggaggctgggacagcctcaggaggggaggaggccgggacagcctcaggaggggaggaggccgggacagcctcaggaggggacgaggcctggacaacctcaggcaaagaggaggctgacctgctgggagtcagacagacagaatatggagcagtcccaggagaaaggctcctagaggctactggaaaagtctgggtcctagaggaggagggggatgaggagagagaggctgaggtgagccctttccccaaacagccccaggtcctgggcactgaaagaacagaagaggctgctgagagccagaccgcagggagggaagctgtgggaggccaggaggcaggggagagctttgagggccaggtagacctgcgtggtaaggaggctgagatgaggcaggacttggggatcagggccgaccgggccaggatggaagagctggtacaggcagaggaggcccaggaggagagagggagcagcagggatccagtggctgagctgccctcagatggagaggctgaaggcactgccgacttggaggcaactccagaggccaggcctgaggaggagctcacaggggaggagagtgaggcggcccagactagctgtggcctactgggcgtggaatggggtggcctcacacacagcgtcaccaaaggccaaggacctgagctgatggggggcgcccagaccccaactaagcaacccgaggaaagggaggcaggggaggtggagctcatgggagttctggccctgagcaaagaggagcaggagaggagcctggaggcaggtcccaggcacgcggggtctgtaaagcctgaggcctccgaggccttcccaggagcctgggaaaaccgcacgagaaaggacatggagagaggaaatactcaggaggatgcggccgatggcgagcagcgggaggaggaggagactgcgggaggccagaccctggcggctgaggctgaaggagaccgagagtctgaactatcagaagtcccagaggcaggcggggaggggctgacaacccaggacgcgggatgtggaactgaggagggagaggcatctgtctcagagaaccaggagctggacggaagcacaggggcagacgcagggccttgcccgtcactgggagaggcctatgccagagaaactgaggatgaggaggcggaggctgacagaacatccagaagaggctggaggctgcaagcggtggctgtgggcctcccggaccgtgaggatgcacagactggctctgtggctgctgggattatggggggtgatgtggtcccacacatcagcgctgctggcgctg

SEQ ID NO: 15668 - DNA, 2300 bp, Homo sapien
cctcagcttcccatagtggtaggattaccagcatgagccacggcacccagccaactgccccctaccctttctttttcttttcttttcttcttttttttttttttttttttttgagacagtgtcttgctctgttgcccaggatggagggcagtggtgcaatcttggctcgctgcaacctccgtctcccaggttcaagcgattctcctgcctcagcctcctaagtagctgggactacaggtgcctgctgccatgcctggttagtttttgtatttttagtagagacggggtttcaccatgttggccaggctggtctcaaactcctgacctcaagtgatccacccgccttggcctcccaaagtgctgggattacaggcatgagccaccacgcctggccttattttattgtgtttttaatagagacggggtcttgctattttgcccaagctggtctggaactcctggcctcaagggatcctctcacctcagtttcccaaagtgctgagattacaggtgagagcagagtcgcccagccagggttcaagatgtgagaggtaaggcagttctgggtgacagtagaggttgggaggggccatggagagagccgaagcgaggccccatgtggtcaagggggtgagcaggtggcatgcctccaggacccgctgtggggagccccagctgcataggctgccggggagtgagctgccaccactggggggtgctgcagaggaaacaggggctggactccagccccagttccctgtccgtctccagtggcctgtggggctgctccctcggcagatgttggtatttccctggtgcgctcgttcccaagtggcctggtgggcagtgcccaggcaggccgaggaggcagagagcaggaaggggaagccccgcctggtttctatctcacaccagggacccggcagggaaaccccacaggtcctaaaaagaaagtggcagcagttgttcttggggaagaccaagaaaccccatcctctccctgaagatgggaaatccagggcggggctgagggtggggctgtgctggaagggagacctgtggtccatgtggcccagccctgaccatggcctctacagagcagaaacaccaagattattcttggacctggttgagccctgatcctgacctcactcaactcaagcctggccacaggctgagccccgatcctggtcactgactgagctctcatcccagcccaagcctggaccccctgctgagtcccagtcccagtcagcaccttggccaaagaccaagctctagacccaaccctataggccacaagcaaagccccaggtcactgatagctctgaccctaaacacagacacagccgggacattggcccgggactaggctgtgagttcagctgtacactgattcctgatcctgattatagactgaaatcaaatcctatatctgactcaggttaaagatggagacagagcccttggccctggaaaaaaccctaaccctggtcccagatatggcctcggacctggttttatccagccctgaccctagttacaaactgagctccaatcccaccctcacgctgagcctctgcctggccccatgcaaaggtgcatcccagccacccactgagcactgactctctctgcgccacctccctcagccatctggtaaaccataagggagtcagatgactcaaaaccccgaatcccctcgggtgggcaatccccttacctggctatccatctttggaaggacagtagaccctaggatgatggtggcagagccgagaatcaggagggggtttgggactctgggatcaaccagtgaatagggctggatggctcacccaagcatgggacattgaggacagggctggacgtgggagcttagcagtgagtctggagcttggatgtcccgaaaccccagcttcccgtcaccccccatcatacctcccaccccctccgggaagggaaattacatttccccattttagcaaggggtggcgagagggaagaatgagtgaacacaaagctgaaagtacaagcaggacggaaagtgaaaccgggcacagcccccagtataagaccccccctacccaggagatggctgaccaaagaggctgggccccgccatgggccagacggcaggcgaccttggctggcgtgagtttgaagccaggggtggggggcttggttgagtttgggcagagaatggacgagcttggctggtgcagatggggggtcgagagctgagagcagcaacttggccaagactgaggattcggctggctgctgcatgggaagggagg

SEQ ID NO: 15669 - DNA, 2300 bp, Homo sapien
ccagtggggacaaataatggtaaagcaaacaaataaaaaagatactggccaggtggctcacgcctgtaatcccagcactttgggaggccgaggcgggcagatcacctgaggtcaggagttcgagaccagcctggccaacgtggtgaaaccccgtctctactaaaaatataaaaattagccgggcgtggtggcacaagcctgtaatcccagctactcaggaggctgaggcaggagaatcacttgaacccaggaggcggaggttgcagtgagccgagatcataccactgcactccagcctggtgacagagtgagactctgtctcaaaacaaaaacaaacaaaccaacaaaaaaaggatggagtcttgctctattgcccaagctggccttgaactcccagcttcaagcaatcctcccagcttaccctcccagagccctggaattacaggcatgagctaccgcactaggccaatctttgcttaatttaagattattttcctctttctctgatcacctggtctgttattattggcccaatcctgttttcattcaagtatcctgtcttcactttcatttcctgggtgttaaggaactcatacatcatccaaatctgggaaaacaaaggctaaattcaattccggctcaggcaagggagaaacacaagcagaagttcagctttttgtgtttttgtttttgttttcagacacagtctcattctgttgctgaggctggagtgcagtggctcgatctcagctcaccacaacctctccctcccaggttcaagcgattctcctgcctcagcctcctgagtagctgggattacaggcacttgccaccacaccaggctaatttttgtatttttagtagagatgggatttcgccatgttggccaggctggtcttgaactcctgacctcaggtgatccacccactttgtggatctcccaaagtgctgggactacaggcataagccaccacgctcggcctcattgtgtcttctgcctcagtacatccatattttgaaatacatattattttattataatttgtttttgagacagggtctccctctgtcaccgggcactgtagcatgtgtctttcaaacattatctcatttgatcctctccccaactctaggaagaagatacaattattatcatccttattttacagaattggaaaccaaggcacagagaggtgaagggactcgcccaaggtcacacggaaagtggtgggtcaggggattgaactgagggcaactggctccagaccctgaactctccaaccctctgccaccctcctcctaggtgagggagattacattactggggaccctgtttcaggatattaaggggttttccaagatgtttctcatagaaaaaagaaaaaaaagggtgtggctcatgcctgtaatcccagcactttgggaggccgaggcaggcagatgacttgaggtcaggagttcaagatcagcctgtccaacatggtgaaaccccatctctactaaaaatacaaaaattagccaggcatggtggcagatgtctataatcccagctattcgggaggctgagccaggagaattgcttgaacctgggaggaggaggttgcaggttgcagtgagccaagatcacaccactgcactccagccgggcgacagagactccatttcaaaaaaaaaaaagaagacaagcaagatgttgagtgtgactgggtggaagccactgacttgtccctggcacaagtgtgctgatatcccttccccctccttcctcacgtcctgcatctcagcgagaattggggtgccggggttagctgtgtggccgtcatcccaggcccaggtgaagccctcgatcaggtgaggccatgatcccaacgagtgttttagcccagatcctgcctcttccctgctttctgccgagaagcgggacctcctctatggaaaatatccagctgggtgagcctgggagggaggaggtgagttgggctggactcagggaccgactcttcccgtctcatgactgtgtttactgggctggattttgggaaggggccagattgcatcagacagggcctgatgggctggagccagactgtggtctgaggaggagacacagccttataagctgagggagtggagaggcccggggccaggaaagcagagacagacaaagcgttaggagaagaagagaggcagggaagacaagccaggcacgatggccaccttcccaccagcaaccagcgccccccagcagcccccaggcccggaggacgaggactccagcctggatgaatctgacctctata

SEQ ID NO: 15670 - DNA, 2300 bp, Homo sapien
atattgcagacacgtggtggattgaatgagggaggggagggaaagggtgatgtcagggataacccccaggtgctggctcaggacattgtactaagtaggaggtgggacatgaaaactgagtatagatgattcttttgagaaatgtggatgtggagaagacagagcaattccttacatgtggacaacactctaaaacactttttaaaaagttaataaatacatgtttattgtagaaaaatcagaaattaacgataaaattttaaaacagggcagagaccaaaataatttaaaaaacaactgtaagctctacatctctcctgatcagtgactagggttgattttttaaatttattttatttatttattttttgagacagagtcttgctctgttgcccagactggagtgcagtggcgcaatcttggctcactgcaacctccgcctcctgggttcaagtggttctttcctgcttcagcctccagagtagctgggactacaggtgcgtgccaccatgcccagctaatttttgtatttttagtagagacatggtttcatcatattggctaggctggtctcaaactcctgacctcgtgatctgcccacctcggcctcccaaagtgctgggattacaggcgtgagtcaccacgcctggcctagctagggctgatatttaacaatcaggaaaaagagcccctgagacctttacaaatgcaaaatttgcaaaatccctcaaagcataaccttcataaaaggcagtaagtagaactgcagctgggtggatgggcatgtcattcactgacctgacgcccacagaaagaactgcaagtgtgatggaagaaaatgatgcattaattttggggttaacatagtttcagtgctaacgcctgagattctctaataaacagaaaaatactgacggggctgaggttggtggctcatgcctgtaatcccagcactttgggaggctgaggcaggaggatcgcttgagcccaggaactcaagaccagcctatgcaacatagcaagacccccatctctaccaaaaaaaatttaaaaatcagcagaatgtgctggtgtgtgcttgtagtcctagctactcaggagccctgatggcaccactgcactccaacctggacaacagagcgagaccctgtctcaaagagaaaaaaaaagaaacatgtgatggccaggcactgtgctaggtactaggaatacacaggtgaacacaagatgatcccaatctcataggacttgcaagtttatcaaataatcaacaaataattacagacatttgtaggttatgtaagaaactttaagataccaggatggctttcgataaaataccattgaggctacatgtccattgcacgtccatatccttagtactttcctgagaagattccctagaagtgcgatttctgggtctaaagatctgcttgttttttgtttgtttgtttttttgagatggagtttccctcttgtcacccaggctggagtgcaatggtacaatctccagtcactacaacctccgcctcctgaattcaagcgattctccagcctcagcctccccagtacctgggattacaggcacccgccaccacgcccggctgatttttgtattttttagtagagacggggtttcaccatgttggccgggttggtttcaaactcctgaactcaggtgatccgcccgccttagcgtcccagtgttgggattacaggcgtgagccaccgcgcccggcctgtttttaattaattttttaacaacagacttttattttttagggcatttttaggttcacaacaaaattgagcagaaagtacagttttcatattacccctgcgcccacccacctccagcaagcagcaatctgttcgctttcaagttttatttatttatttatttattgcattttgttttaaatagagtctggggaaatgggagaaaacgctgaaaacgcacaagcactttggttggttaaattagggttccgccaagagccggagcggtgtgccaagtgaaaactacatttcccacggggcagcgggtcacgtcacagaggaacgactacgcatgcgtgcaaggtcctccgcgcgcgactacgctcataaaaggaaaaaaaagcgtgtgcggttctcgacgtgccgccaatcttcgaacgcaggtctgtgatcatccgcagactccgaaaaagggttcgaggaacgcgcctgctcccctcgtcgcagtttccagcccgacgagcttgttttgtcccggactcggtaggtggcgacgggccgtggcctgagacctccggcga

SEQ ID NO: 15671 - DNA, 2300 bp, Homo sapien
cctttatgggcttcttcaactaaagaggggtatattcatgaagattccaggaaaaggtaaagatttctcaagaccgtggtgccacaatttacacccaaatacaggtgttcctggagccgtcttggcactggtgggtgtacggtttcatatgttactgattgtacagtgagatcctaggtgaaacctacatcaaatacagcgccatgttgcttctggttggtcgcagccagcttggtcctcatcctatttttcagggacttattggcccttggcacatgcagctatttcaagtttccttcttctggtcatgtgaaactgctgcctgggattttctgttgtcttgctagcactctattaatctcacattctcgcctcttttctgtgccaccccctgctggtccggctggttttcactagagtgcaatacaaagtctcagtcaagagggcctcctgaaggttgctgagggcaggggtggagctagtagccggaggacctgccagtcatggggattcctcaggggcacagaggagggaggaggggcctgtggccctagcaggggagcagcctctcctctgcctggaaatcccatgcctcagttttccccgcttgcctctgagctcacgcaaccctgggaaggcttgggagactcacctttactcagatggttgtttacctgtctcgtgcccagcttgaccctggactttaaatagtgaggacaaagaacgaggagggtggggggatgcactccttccacggggccctgtggcttccaagcctcaacctcctctggcctctgtctgtggagcctccttcaaacccatggaaagaaaagtacctgccaggggctgtggttcttctaggatcttctatcgatgttctgtgaggtccccagggagccatgaagctggggctggctcccagggcaatgggactgcagtgtccttgttctttcttgttctatggatccatgctctgctccacccctgccccttcactctgcccacacgcatcactccagactggccttgtggtcagagcctggagtgcatgggctgctggaggcctgtgggttgcactgggccaggacccctggcaccttcaagactggcctggagccagcaggtaggtgacctttccagggcctgcctatcccatctttctcctccaatccctcccctctcttgcctgggtcaattagagaaagcttgtcttttggagttcaggggcaggtcaggagcccagtgacagctcaaaaaaaaaaacccacaaaaacaaacccaccattgggccctttcccctttcattcttctgttttctacacaccaaacccagtcgtggctttggagatcactttaagcttgtctccagctggcaaactaaggagggtaatagagaagctcccccacccccaaccctaccccttccttccggaagcaaatctaagtccagccccggctccagatccctcccacactgacctaagaaaccctcagcacagacaacacccctgcattccccacacaacacccacactcagccactgcgggcgaggagggcacaaggccaggttcccaagagctcaggtgagtgacacaccggaatggcccaggacgccctcaccctgctcagcttgtggctccaacattccagaagccgaggcctctgctatccctgccctctccccatggatatcccatttcagacaaccccggccggcctgaatccccctcccttccttttttttttttccggggaggccaggtcttgctgtcaccgaggctggagtgctgtgggatcctggccactgcagccttgaattcctgggctcaagtgattctcctgcctcagtagctaggactacagaccctcaccatcctgcctggatagttttaaaaaatatttttaaaagatttttagagatggggtcttccaatgctgcccagattggtctccaaattctggcctcagcctccctagggtctgggattacaggtgggagccaccctgcccaggatcctccttttgctgagtcatcacagttttgctcattcccacatcaggctctggcccccaataccagctcagttgctcaatgggctgtttgtcctggagcccagatggactgtggccgggcaagtggatcacaggcctggccagcctaggagttgccacatgtgaggggccgaggggctcaaggaggggaacatcggggagaggagcctactgggtggaggctgggggtcccagcaggaaatggtgagacaaagggcgctggctggcaggaagacagcacaggaag

SEQ ID NO: 15672 - DNA, 2300 bp, Homo sapien
gtttctgcaggcacactggatagccctgctggagctcagtgtccctaatcccctccagatactggtggcctaggggaggtcatcaaagaccggtgggacatcgacctcagcccgtttccacgcttttttttgttttgttttgtttttttgagaccgagtttcactcttgttgcccaggctggagtgcaatggcgtgatcttggctcaccgcaacctccgcctcccgggttcaagcgattctcctgcctcagcctcccaagtagctgggattacaggcgtgtgccaccaggcttgactaattttctatttttagtagagacaaggtttctccatgttggtcaggctggtctcaaactcccgacttcaggtggtctgcctgcctcggcctcccaaagtgctgggattacaggagtgagccaccgtgccaggccttctccaggctcttggcaccttagccagaaacaatttaaggacaagtgcaaaagtcatgaacgtaggcagatttcctgcagagtaaagggactcactgaagaagaggaacgtgggggtcctcaagagagtgtctcatgccctacaaggtgtggggctgacctttatgggcttcttcaactaaagaggggtatattcatgaagattccaggaaaaggtaaagatttctcaagaccgtggtgccacaatttacacccaaatacaggtgttcctggagccgtcttggcactggtgggtgtacggtttcatatgttactgattgtacagtgagatcctaggtgaaacctacatcaaatacagcgccatgttgcttctggttggtcgcagccagcttggtcctcatcctatttttcagggacttattggcccttggcacatgcagctatttcaagtttccttcttctggtcatgtgaaactgctgcctgggattttctgttgtcttgctagcactctattaatctcacattctcgcctcttttctgtgccaccccctgctggtccggctggttttcactagagtgcaatacaaagtctcagtcaagagggcctcctgaaggttgctgagggcaggggtggagctagtagccggaggacctgccagtcatggggattcctcaggggcacagaggagggaggaggggcctgtggccctagcaggggagcagcctctcctctgcctggaaatcccatgcctcagttttccccgcttgcctctgagctcacgcaaccctgggaaggcttgggagactcacctttactcagatggttgtttacctgtctcgtgcccagcttgaccctggactttaaatagtgaggacaaagaacgaggagggtggggggatgcactccttccacggggccctgtggcttccaagcctcaacctcctctggcctctgtctgtggagcctccttcaaacccatggaaagaaaagtacctgccaggggctgtggttcttctaggatcttctatcgatgttctgtgaggtccccagggagccatgaagctggggctggctcccagggcaatgggactgcagtgtccttgttctttcttgttctatggatccatgctctgctccacccctgccccttcactctgcccacacgcatcactccagactggccttgtggtcagagcctggagtgcatgggctgctggaggcctgtgggttgcactgggccaggacccctggcaccttcaagactggcctggagccagcaggtaggtgacctttccagggcctgcctatcccatctttctcctccaatccctcccctctcttgcctgggtcaattagagaaagcttgtcttttggagttcaggggcaggtcaggagcccagtgacagctcaaaaaaaaaaacccacaaaaacaaacccaccattgggccctttcccctttcattcttctgttttctacacaccaaacccagtcgtggctttggagatcactttaagcttgtctccagctggcaaactaaggagggtaatagagaagctcccccacccccaaccctaccccttccttccggaagcaaatctaagtccagccccggctccagatccctcccacactgacctaagaaaccctcagcacagacaacacccctgcattccccacacaacacccacactcagccactgcgggcgaggagggcacaaggccaggttcccaagagctcaggtgagtgacacaccggaatggcccaggacgccctcaccctgctcagcttgtggctccaacattccagaagccgaggcctctgctatccctgccctctccccatggatatcccatttcagacaaccc

SEQ ID NO: 15673 - DNA, 2300 bp, Homo sapien
atatgttactgatcatacaatgagatcctaggtgaaacctacatcaaatacagcgccatgttgtgtctggttggtcgtagccagcttggtcctcatcctatttttcagggacttattggcccttagcgcatgcagctatttcaagtttccttcttctcctcatgtgaaactgctgcctgggattttgtattcacttgctaccactctattaatctcacattctcgcctcttttctgtgtcaccccgtgtgggtccgacaggttgttactagagtgcaatacaaagtcttagtcaagggaacctcctgagggttgctgagggcaggggtggagctagtagcctgaggacctgccagtcacggggattcctcatgggcacagaggagggaggaggggtccatggccctagcatatgagaagcctctcctctgcctggaattcccatgcctcagcttcccccacactcccacctgtccgcttgcctctgaactcacgcatttcttggaagtcttgggagattcacctttactcagatggttgtttacctgtctcgtgcacagcttgaccttggactttaaagtgaggataaagaacgaggaggatggggggatgccccccttccacggggccctgtggcttccaaacctcggcctcctctggtctcttgtctgtggagcctccttcaaacccagggaaataaaaccacctgccacgggttgtggttcttctaggatcttctatcaatgttctctgaggtccccaggagccatgaagctggggctgactcccagggcaatgggactgcagtgtccttgttctttcttgttctatgcatccatgctctgctccacccctgccccttcactctgcccacacacatccctctagactggccttgtggtcagagcctggagtgcatgggctgctgggggcctgtgggctgcactgggccagaacccctggcaccttcaagactggcctggagccagcaggtaggtgacctttccagggcctgcctatcccagctttctcctccaatccctcccctctcttgcctgggtcaattagagagagcttgtctgttggctgcctggcagggtggagttcaggggcaggtcaggagcccagtgacagctcggaaaaaaaaaaaaaaaaaaaaaaaaaacagaaaaaaaaaacctacaaaaacaaacccaccattgggcctttcccctttcattcttctgttttctacacagcaaactcagtcgtggctttggagatcactttaagcttgtctccagctggcacactaaggagggtaatggagaagctcccccacccccaaccccaccccttccttccggaagcaaatctaagtccagccccggctccagatccctcccacagtggacctaggaaaccctcagctcagagaacaaccctgcattccccacacaacacccacaatcagccactgcgggcgaggagggcacgaggccaggttcccaagagctcaggtgagtgacacagtggaacggcccagggcgccctcaccctgctcagcttgtggctctaacattccagaagctgaggcctctggcatccctgccctttccccatggatatcccatttcagacaaccctggcctgcgtgaatccccctcccttcccttgtttgtttgtttttttccccggggaggccaggtcttgctgtcacccaggctggagtgctgtgggatcctggccactgcagccttgaattcctgggctcaagtgattctcttgcctcagcctctggagtagctaggactacaggccctcatcatcctgcctggttaatgtttaagaatttttttaaagatttttagagatggggtcttgcaatgctgcaccaggttggtctccaactcctggcctcagcctccctagggtctgggattataggtgggagccaccctgcctaggcctgtgcttttgctgagtcatcagagttttgttcattcccacagcagctctggcccctagtagcagctcagttcctcaatgggccgtgtttgtcctggagcccagatggactgtggccaggcaagtggatcacaggcctggctggcctgggcggtttccacatgtgaggggctgaggggctcaaggaggggagcatctccactgggtggaggctgggggtcccagcaggaagtggtgagacaaagggcgctggctggcagggagacagcacaggaaggtcctagagcttcctcagtgcagctggactctcctggagaccttcacacaccctgacatctgggccttgcccgacga

SEQ ID NO: 15674 - DNA, 2300 bp, Homo sapien
ctggagctcagtgtccctaatcccctccagatactggtggcctaggggaggtcatcaaagaccggtgggacatcgacctcagcccgtttccacgcttttttttgttttgttttgtttttttgagaccgagtttcactcttgttgcccaggctggagtgcaatggcgtgatcttggctcaccgcaacctccgcctcccgggttcaagcgattctcctgcctcagcctcccaagtagctgggattacaggcgtgtgccaccaggcttgactaattttctatttttagtagagacaaggtttctccatgttggtcaggctggtctcaaactcccgacttcaggtggtctgcctgcctcggcctcccaaagtgctgggattacaggagtgagccaccgtgccaggccttctccaggctcttggcaccttagccagaaacaatttaaggacaagtgcaaaagtcatgaatgtaggcagatttcctgcagagtaaagggactcactgaagaagaggaacgtgggggtcctcaagagagtgtctcatgccctacaaggtgtggggctgacctttatgggcttcttcaactaaagaggggtatattcatgaagagtccaggaaaaggtaaagatttctcaagaccgtggtgccacaatttacacccaaatacaggtgttcctggagccgtcttggcactggtgggtgtacggtttcatatgttactgatcatacaatgagatcctaggtgaaacctacatcaaatacagcgccatgttgtgtctggttggtcgtagccagcttggtcctcatcctatttttcagggacttattggcccttagcgcatgcagctatttcaagtttccttcttctcctcatgtgaaactgctgcctgggattttgtattcacttgctaccactctattaatctcacattctcgcctcttttctgtgtcaccccgtgtgggtccgacaggttgttactagagtgcaatacaaagtcttagtcaagggaacctcctgagggttgctgagggcaggggtggagctagtagcctgaggacctgccagtcacggggattcctcatgggcacagaggagggaggaggggtccatggccctagcatatgagaagcctctcctctgcctggaattcccatgcctcagcttcccccacactcccacctgtccgcttgcctctgaactcacgcatttcttggaagtcttgggagattcacctttactcagatggttgtttacctgtctcgtgcacagcttgaccttggactttaaagtgaggataaagaacgaggaggatggggggatgccccccttccacggggccctgtggcttccaaacctcggcctcctctggtctcttgtctgtggagcctccttcaaacccagggaaataaaaccacctgccacgggttgtggttcttctaggatcttctatcaatgttctctgaggtccccaggagccatgaagctggggctgactcccagggcaatgggactgcagtgtccttgttctttcttgttctatgcatccatgctctgctccacccctgccccttcactctgcccacacacatccctctagactggccttgtggtcagagcctggagtgcatgggctgctgggggcctgtgggctgcactgggccagaacccctggcaccttcaagactggcctggagccagcaggtaggtgacctttccagggcctgcctatcccagctttctcctccaatccctcccctctcttgcctgggtcaattagagagagcttgtctgttggctgcctggcagggtggagttcaggggcaggtcaggagcccagtgacagctcggaaaaaaaaaaaaaaaaaaaaaaaaaacagaaaaaaaaaacctacaaaaacaaacccaccattgggcctttcccctttcattcttctgttttctacacagcaaactcagtcgtggctttggagatcactttaagcttgtctccagctggcacactaaggagggtaatggagaagctcccccacccccaaccccaccccttccttccggaagcaaatctaagtccagccccggctccagatccctcccacagtggacctaggaaaccctcagctcagagaacaaccctgcattccccacacaacacccacaatcagccactgcgggcgaggagggcacgaggccaggttcccaagagctcaggtgagtgacacagtggaacggcccagggcgccctcaccctgctcagcttgtggctctaacattccagaagctgaggcctctggcatccctgccc

SEQ ID NO: 15675 - DNA, 2300 bp, Homo sapien
atgtgctttggtctttatttcctagttatacgatcctgggtaaggagctcaacttttctctgccaaaattaaatgaggattaaatgagatcatatatgtgaagttgtgaaagacagtgcctggcacatagtaggatcaatcaatgttaatatctctaaaatagagattgagtctgaagatccacaaagtggtagaactgatcttaagattcccaaatgatagaattgggctttatttgcctaagtagtatggtattacttattgtatgcccaggggatcttttttttttaaataatgtttatttatttattttgagacagagtctcgctctgtcccccaagctggagtgcagtggcaccattttggctcactgcaacctctacctacccggttcaagcaattctcctgcctcagcctcctgagtagctgggattacaggtgcgcaccaccatgcccagctaatttttgtatatttagtagagacagggttttgccatgctggccagactcgtcttaaactcctgacctaaggtgatccagctccctcagcctgccacagtgctgggattacaggtgtaagccacggcacccagccctaatgttttatttttttgtagagatgaggtcttactatgtggcccaggctggtcttgaattcctggacctaagtgatcctcccaccttgacctcccaaagtgttgggattacaggcatgagccaccgtgcccagttcccttcttaaatagtttaaagggggagaagaaagaaaaagacagattttcttcccttccactaccaaaacaggcaaaacacaccagaacactttgcttagcatttcttttcttttcttttctttttttgagaaagagtcttcctctgtcagccagggtggagtgcagtggggcgatcttggctcacttcaagctccacctcctgggttcaggccattctcctgcctcagcctcccgagtagctgggactacaggtgcccaccaccacgcccagctaattttttgtatttttagtagagacgggatttcaccgtgttagccaggatggtctggatctcctgacctcgtgatccgcccgccttggcctcccaaagtgctggtattacaggagtgagccaccgtgcccggccgtcccttcattttttaagataaattcacataccataaaacttaccattttattttctctctctttttctttctttctttctttttttttttttttttttttttttttttgcaggctggagtgcagtggccctatcgtggctcactgcaaccttgaattcctgggctcaagagatcctcccacctcagactcccaagtagcagtagctgagactatcagtgcgcaccaccaagtctgagtaattacaatacttttttctttttctttttcttttttttttcgtagagatggggtcttcctattttgtccaggctaatctggaactcctgccctcaaaggatcctcctgtctaattctctcaaagtgctgggattacaggcatgtgccaccgcacccggccaaatgcacctccttttttcaagtgtacaattcaatggtttttaatatattcacaaagtcatggaaccatcacacctatctaatttcaaaatgttttcatcactccaaaaaataaccccatatgggaggccgcggcgggcagatcactcgagaccagcctggccaacatattgaaaccccgtctccactaaaaatacaaaaattagtcgggcgtgatggcgcacgcgtgtagtcccagctgctcgggaggctgaggcaggagaatcgcttgaacccgggaggcggaggttgcagtgagcccagatcgccccactgcactccagcctgggcgacagagcgagactccgtctcaaaaatatctaattaattaataaaaataaaataaataaataaataaataaccccatgccttctgcctctgtggctttgcctattctgggtattttgtgtcaacggacccatgcatgggggtgggccgggcacctttcaaacgttcagcccccacgacggcccgtggcctccggattggacggcacgagctgggtgtgcgcggggcgcccaaccgctcaggagctcctggaggaggcaggtgcaggtgccggctgctgcagcgcagtagctgctggaggctggcgaggcccggaggcggtgcaggaagcctccgaccacgcgggctcctgatcgcgggcgcccacagcgcggacatggcgggctggtggccggcgttgtcgcgcacggcccggcgccacccgtggcccacc

SEQ ID NO: 15676 - DNA, 2300 bp, Homo sapien
tgttgctgtttttgagacagagtctcgctctgtcgcctaggctggagtgcagtggtgcaatctcggctcactgcagactctgcctcccgggttcaaactattctcctgcctcagcctcccaagtaggtgggactacaggtgcccaccaccacacccggctaatttttatattttattagagacagggtttcaccatattggccaggctggtctggaactcctgaccttgtgatccgcccacctcggcctcccaaagtgctgggattacaggcgtgagccaccacacccagcccctgttttgtttttgttttgcttgtttcttagggttgtttttctatttatggtaaaggcattggctttccatttgtagcatcaatagaatatttcctgttcacaataaccttatgtcatagtaaatggtaaagggatttaaagcagtggttttcagctgccagaggcctgagagagtttgggcatactctgtgtgatcgggcggaaggcctgtgggaagtttagctgaggacagggccaggaaaggtgatagacagtgggggtctgtcctggtcaccagacccctgggtcctgcccacctgcttggagctccccacccatcacacatgatgctgccaagccctctgggtattgtgggcaaataccttaggagagaagctgatgaactttgtttcttgaaatgcacagattccttggacatccctgagaggtcaatcatgaaggtcaacttggttttctccccctcatttgggttcagaatttaaagtccacacacacaggcagtaagatgattatagataaggacatcatcactcggtttcggatgttaaattgtctaggtgggttaggggtgatttgagatcacacaaccttgtgccacaaagaggaattcccaggccagagggagacattttattgccatgttatgatcttatcattgagttgaaaggcaatcttgtttcattttggattctttcttatgtttatgtcttataagggcactttgaatttccaagcaaataataattttgaattagcttttaatcattgacttctagcacagttatatgatcagaaacgtgctgtgtgatttgattgctctcaaatatattgagatttgctggaacaaaataagtcaggttaatttttgtaaatgtaccatgcttgcttaaaatgaatgtatctacatttgttcctgagatacaggttgatggacggatggctacatggatgtgatggagatggtttactatcgggaccttccgcatcctgctgatgttttgttgcttaggatatgaatggctgagcggaggctgtaaaacctggcactctgcttgggtatgaggttcttcctgccatcctgccatcatttgttttttatgttttgtcgccaaaagtgaccttgaggaaccctgggagctcaggaaggaaggagcgcccagaagcagggacagggagctggttggggaggaccagaaatcaggtttgtgaaggttccagagaggacctgtccttgcgaggagtgtgggagactgagatgggggaggggtcattggaatgatgcgggcgctacttggcattgtccattgtgaggcaccaccggggtcatcagggattggtggagagggagtataaagccccaggtttgctaagggagggcccagaccgaagaaggtttggcagatagcagaacctttttgtctccctctcattgctcctaagcctcacgctcccttgtcccgcgtgtcctgttgcttccctgatcttctccgtgacctgtagctaaaccttccaccagcgcttgagaacttaatttgaaccggatcctttcccagacccctttcttcttctcctcctcctcctccacctcctccaggtgcccaacagcccccttctcttcctttcccttcccttacttccccccttcccctccccctcccctccccctccccctcccctccccctccccctcccctccccctccccaactcagatccggcccattccccgtccccttccctcccccctgccctaagccacctccacctctgtcctggacacctcagggcgccctgaaaggaccaggacatgcggctgcgcttttggctcctcatttggctcctgctgggatttatcagccatcagcccacccctgtgagtagacgctggacccgcggggtttcttcctttttactgggctgtgtcacgcggcatgaaattacacagctcaggcctgtaatcccagcactttagggggccgaggtgggcagatcacttgagtccaggag

SEQ ID NO: 15677 - DNA, 2300 bp, Homo sapien
gagagtgacactccatctcaagaaaaaagtcatttcaatgactacctcaggagattcataggtatctgacccacatctgagatgggatttgcattgcattttcgctatgatgagaacaaatatttaatatcttagaagattaaaagcatactgtgataatatggaaatcttggtgggaattcagtcattagtgagaatgttttgcgttaagttcaaaccagcctcaatgaagctgatgtgagggaagggaaagtgaactctgagtagagcagggacagaaggaagatgctccagtgcagatcaggaaggagcagggggtgaaatgttacaaattctagaactcagagagctgaaggtaattacttccttttcaagttgtgaaacatgttaacctgtggtaaaatacttataagatgataattaccatctaaccgtgttgaagtgtacagttcagttgtgtgaagtatattcatgtcattttttttttttttttttgagacggagtctcactctgtcaccaggctggagtgcagtggtgggatcttggctcactgcaacctctgcctcctgggttcaagcagttctcctgcctcagcctcccgagtagctgggactacaggcgtgcatcaccatgctcagctaatttttgtatttttagtagagacggggtttcaccatgttgcccaggatggtctccatctcttgaccttgtgattcacccgcctcagcctcccaaagtgctgggattataggcgtgagctaccgcacctgggctattttttttttttttttttttttttttgagacagagtttcaattttgttgcccaggtttggagtgcaatggcacaatctcagctcaccacaaccttttcctgctgggttcaagtgattctcctgcctcagcctcctgactagctgggactacaggcatgcaccaccatgcctggctaattttgtatttttagcagagacagcgtttctccatgttggtgaggctggtctcaaactcccgacctcaggtgatccgcctgcctcggcctcccaaagtgctgggattacaggagtgagccaccgtgccagcctcatgtcattcttgtgtgtgtgtgtgtgtgtgtgtgtgtgtgtgtgtgtgtgtgagagacagagtctcattctgtcgctcaggctggagtacagtggtgtgatctcggctcactgcaacctccgcctcccagcttcaaatggttctctgcctcagcctcccgagtagcttggattacaggcgcccgctgccatgcctggctaatttttgtatttttagtagagacagggtttcaccatcttggccaggctggtcttgaactcctgaccccgtgatccacctgcctcggcctcccaaagtactgggattatttatacgcatgagccaccgtgcccagccgtcattcttatattattatttcctaggtgtctttcctgaagactatcttctggtctcgaaatggacatgatggatccatggatgtacagcagagagcctggaggtccaaccgcagtagacagaaaggtatggctctgttggagtccccatagtgtggaaatgagtttgccctggaaagggaaagaacagcttcttgacctcaggtttctcaccttctcctctcctcactctcaccaagggctgaggtccatttgtatgcacacaaagaaaagagtttcttcctttcgaggaaataaaattggcctgaaagacgtcattactctacggaggcatgtggaaacaaaagttagagctaaaatccgtaagaggaaggtgacaacgaaaatcaaccgtcatgacaaaatcaatggaaagaggaagaccgccagaaaacagtaagatgtgccttgacacaaatactgttgtatgaaccatgtgccaatcaaagtagacaactgtaaagtccttgagaatattttctacaatatttgtggcaaattcagtgggctcaaaattgagtttgtcctttctgcttcattagtttaagctgtataattcctttcccttcctacattcttgtttgtaattttttcgggggaagaggagttgctagtactggcattggttttcctttctctcttttttttttttttttcctgagatggagctttgctgttgttgcccaggctgtagtgcaatggcacaatctcagctcactgccttttggcttcaagcaattctcctgtctcagcctcccaagtagctgggattacaggtgcccaccaccatgcccagctaatttttgtatttttactagagatggggtttcaccatgttgt

SEQ ID NO: 15678 - DNA, 2300 bp, Homo sapien
tgagccaagatcatgccactgccctccagcctgggcaacagagcaagactctatctcaaaaaaataaagactcagttaaggcaccactggagagaccacaccccagaaagaatggtttgggttttttaccccgcacagaggctgggattcttttttatagcatgcacactactatctttttttttttttttttgagacagagtctcactcctgttgcccagtctagagcgcaatggggtgatctcagcccactgcaacctccacctccttggttcaagagatactgctgcctcagcctcctgagtagctaggattacaggcatgcgccaccacgcctggctaattttttttttttttttttttttgcattcctaaagtgcaaactttatttgagtttttttttttttaatttatttttttattgataattcttgggtgtttctcacagagggggatttggcagggtcatgggacaatagtggagggaaggtcagcagataaacaagtgaacaaaggtctctggttttcctaggcagaggaccctgcggccttccgcagtgtttgtgtccctgattacttgagattagggattggtgatgactcttaacgagcatgctgccttcaagcatctgtttaacaaagcacatcttgcaccgcccttaatccatttaaccctgagtggacacagcacatgtttcagagagcacagggttgggggtaaggtcacagatcaacaggatcccaaggcagaggaatttttcttagtgcagaacaaaatgaaaagtctcccatgtctacttctttctacacagacacggcaaccatccgatttctcaatcttttccccacctttcccgcctttctattccacaaagccgccattgtcatcctggcccgttctcaatgagctgttgggcacacctcccagacggggtggtggccggtcagaggggctcctcacttcccagtaggggtggccgggcagaggcgcccctcacctcccggatggggcggctcgccgggcaggggggctgaccccccccacctccctcccggacggggcggctggccgggcggggggctgaccccccaacctccctcccggacggggcggctggccgggcagaggggctcctcacttcccagtaggggcggccgggcagaggcgcccctcacctcccgggcggggcggctggccgggcgggggggctgaccccccccacctccctcccggacggggcggctggccgggcagagcggctcctcacttcccagtaggggcggccgggcagaggcgcccctcacctcccggacggggcggctggccgggcgggggggctgaccccccccacctccctcccggacggggcggctggccgggcagaggggctcctcacttcccagtaggggcggccgggcagaggcgcccctcacctcccggacggggcggctggccgggtgggggggctgacccccccatctccctcccggacggggtggctggccaggctgaggggctcctcacttcccagtaggggcggccgggcagaggcgcccctcacctcccggacggggcggctggccgggtggggggctgaccctcccacctccctcccggacggcatggctggccaggcggggggctgacccccccacctccctcccggatggcacggctggccaggcggaggggctgaccccccacctccctcccggatggggcggctggctgggcggggggctgaccccccccacctccctcccggacggggtggctgccgggcggagacgctcctcacttcccagatggggtggctgccgggcggagacactcctcacttcccagatggggtggctgccgggcggagaggctcctcacttctcagacggggcagctgccgggcggaggggctcctcacttctcagacggggtggttgccaggcagagggtctcctcacttctcagacggggcggccgggcagagacgctcctcacctcccagacggggtctcggccgggcagaggcgctcctcacatcccagatggggcggcggggcagaggcgctccccacatctcagacgatgggcggccgggcagagacgctcctcacttcctagatgtgatggcggctgggaagaggcgctcctcacttcctagatgggatggcggccgggcggagacgctcctcactttccagactgggcagccaggcagaggggctcctcatatcccagacgatgggcggccaggcagagacactcctcacttcccagacggggtggcggccgggcagaggct

SEQ ID NO: 15679 - DNA, 2300 bp, Homo sapien
ctacacattcttcaagagtcaactctgtgtgtgtgtgtgtatgtgtgtgtgtgtgtgtgtatacacaaagagagataaggagagagagggcacaaagtgacatctggaagataacgctataaactgacaattgtgtttgcttctagagagaaaagctgatgaacatgaggtcagggcaggaaggaaacattttttcctgtatattttttcttcctgtgtattctgttgtaccattttcattttgtaaaaatgtacacatattatttaaaataaagagagctgggcgtggtggctcacgcctgtaatcccagcattttgggaggccgaggcgggtggatcacctgaggtcaggagttcgagaccagcttggacaacatggtgaaaccccttctctattacaaatacaaaaattagctggatgtggtggtgcacgtctgtaaatcccagctacttgggaggctgaggcaggagaattgcttgaaactgggaggcggaggttgaagtgagccaagatcataccattgcactccagcctgggcaacaagagcaaaactccatctcaaaaaaaaaaaaaaaaaagatatttatggatttacagacgtacaatgaaccccttggtttttttttttaactttttttttttggagacagagtcttgctctgtcgctcaggctggagtgcagtggcacgatcttggctcactgcaacctccaccttcagggttcaagcaattctcctgcctcagcctcctgagtagctggaattacaggcatctgccaccatgccaggcgaatttttgtatttttagtagagatggggtttcaccatgttggccaggctggtctcgaattcctgacctcaagtgatctgcccacctctgcctcccaaagtgttgggattacaggcatgaaccaccatgcccagcctcatattaagttttgacggtgctgggtgggttgtgagtacatagatgtccattggaatagtctttattcttgtctgttgaaatatttcacaataaaaaacaaaacggccaggtgtggtagctcatgcctataatcccagcactttggaagagcatgctcttcccttcccagcacttccctgtcccgctcccatatcaaaaccaccttgaaaaatgtaacacagtcccttgcactaaaacctctgccgatggcggctccaaaccacaggcctataaagacctgcaagatctagcatcgtctactttttttttttttttttttttttttgagacagagtcttgctctgtcacccaggctggaatgcagtggtgtgatctctgctcactgcaatctcttcctcctgggttcaagtgattctccagcctcagcctcccacgtagctgggattacaggcaggtgacactgtgccaggctaattttcgtattttttagtagacacggggttttgccatattggccaggctggtctcgaactcctgacctcaggtgatccacccacctcagcctcccagagtgttggaattacaggagtgagccactgtgcctggctagcattgtctacttttttttttttgagatggagtttcgcttttgttgtccaggctggagtccagtggctcgatctcggctcaccacaacctccgcctcccgggttcaagcgattctcctgcctcagcctcccgagtagcttggcttacaggcatgcaccaccacgcctggctaattttgtatttttagtagagatggggtttctccatattggtcaggctggtctcgaactcccgacctcgggtaatccgcctgcctcggtctcccaaagtgctaggattacaggcgtgagtgagccaccgcacccggcaggattatctacttctatactattaatgcctattaatgctgtaattacacgcgtgagccactgcgccccgccgatcttcgtgttttaaatcccgacaccaacgcgcggtaggattcgcgacgcctgcagccaaggtctcagcgcccggttccctcaggcttgtccccgcccccttatggcgcgaaggccactgggagttgtagtctcccagtgtagttagtcggcgcttcccggaagtgacgcgaggacccgccttctctctcggcgtttccgctgtcagggccctgcggtgtgactcgcgggctcagctggttggtattttttgggcctcgtgcttcgtggtgggagacccaggtcgaggtccgggtggggccggtgaggggttgggcgtcgggaggtgttggctcgggcctcttcgcgtggccggtgacgccttggctcccccgcaggtccgg

SEQ ID NO: 15680 - DNA, 2300 bp, Homo sapien; identical to SEQ ID NO: 15660
